United States Patent Application Publication US 2026/0092266 A1 - sequence listing, part 5

SEQ ID NO: 820 - DNA, 23342 bp, synthetic construct
  misc_feature 1..23342: note = Synthetic
  source 1..23342: mol_type = other DNA
gaaagcggaaaagcgaaatttttagattcaccttgcgaaaataaaaactgcattcaaagcggagaaataagcgcaaatggacaatgggccgcctgcctgccaaacggaatattcattaatatagaaggaaaaaacaaaaaaaacactttcgatgcagtttcaaactaaaatccgcagcaataacatcgggagtgtttcttgtgcggtttttaaacttacaggacaaccctgatattttcagcaattttttctttctaatctcttgataatttattcgattttttatatagtctaaagaacgaaacgaaggcgttttgtaaaatacaggctaattgtctgttttttgcaaagcgccttttttttatgcaaggggttactatgactgaaaaaaacagaactttgtatgatccgtcatttgagcatgacgcttgcggaatcggagcggtcgtaaacattgacggtacggcgactcacaaaatcgtggacaacgcgctttgcatagttgaaaagctggagcaccgcgcgggaaaggatgcgaccggagagaccggcgacggagtcggaattcttgttcagatttcgcatcggtttttcaagcaggcggcaaagcaggaaggaatcgggctgaaggaagcgcgcgactacggagtcggaatgttcttctttccgcaggacaaatatatccgctcgcaggcgatgaaaatgcttgaagtccttgcaaaaaaggagaacctcaaatttctcggctggagaaaggttcctgtgaatcctgatgttctcgggcagcgcgcaaaagactgcatgccttgcataatgcagtgctttatcgagcgtccggaaaatatcagccgcggacttgactttgaccgcaagctttacattcttcgccgtcagtttgagcattcgcacctgaacacttatattgcttcgctttcaagccgcacaatcgtatacaagggaatgttccttgttcagcagctcaggactttctacaaagaccttcagtccgaggactacacttcatcccttgcgcttgtccactcaagattcagcacgaacacgcagccgagctggcagagggcgcatccgaacagattcatcgcgcacaacggagaaatcaacacaatccgcggaaacgttgaccgaatgctggcaagagaagagactcttgattccccggttttcaaggacgaggagctgcgtgaaattcttccggctgtggacgcgacaggctctgactcggcaatgctggacaacactctggaattccttgtgatgaacggaatgccacttccgcttgcggtgatggtctgcattcctgagccttggaaaaacgacgggacgatgagccagcagaagcgcgacttctaccattactgggcaacaatgatggagccttgggacggacccgccgcgattcttttcagcgacggagattttgtcggggcaactcttgacagaaacggactccgcccgagccgctattacatcacaaaagacaatatgctcatcctttcttcggaagtcggagttcttgacattccggaagaaaacatcgttaaaaaatcacgtcttcagcccggaaaaattcttcttgttgacacagtccagaagcgtcttatttccgacgaggaggcgaaaaaacagtacataaacctttatccttacggcgaatggctgaacatgaaccttctgaagctgaaggatcttgtgattccgaacaagaaaattccggtctacacgcaggaagagcgcgacataatgtaccgtgcgttcggctggaactacgaagatgtgaacgagatgattcttcctatggcgcagaacggagttgaaccgaccggagcgatgggaatagacacgccgcttgcagtcatgagcgacaagcatccgccgctttacaactacttcaagcagctgttcgcccaggttacaaatccgccgattgactctctgcgtgaaaaggttgtcaccgacacgacagtctacgtcggaacagacggaaatctccttgagccgaaaagcgcgaactgcacggttcttgagataaacaatccgattctgaccggcgtcgatatgctaaagctcaagaacctgaaccgccccggactgaaaactgcggttgtttcccttttgtattataagaacacttcacttaaagaggcgctggacaatatttttgtcgcaatcgagcgtgaatatcacaacggaagcaacataatcattttgagcgaccgcggagttgacgaaaaccacgttgccgttccaagccttcttgcagtcagcggagttgagcagtatttgatccgcacaaaaaagagaaccgcaatttcaattattcttgagtcggcggaagtcagaaacgtccatcaggctgcgatgtgtcttggctacggagcgcgtgcggtgaacccttatcttgcgcacgaatgcatcgccgagctcattgaccagaagcttttggacaaggattatcacaccgcaatcgacgactacaacaagggaatcataaacggaattgtaaaaatcgccgcaaagatgggaatctcaacgattcagtcctatcagtccgcgcagattttcgaggcaatcggaatcagcaaggacgtaatcgacgaatattttacaaacacagtgagccgcgtcggcggaatcggccttaaggaaattgatgaggatgtgaacttccatcacaacaaggcttttgatccgctcggacttgccgtgaacacccaccttgactctgtcggaaaccacaagctgcgccgcggtccgacctgcgaggatcacctttattcgcctgaaacaattatcgccctgcaggaatcaaccaggacaggaagctacgaaagattcaaggaatacacggctctggttgacgacaacgcgcatccccacaccttgcgcgcaatgctcaagttcagtttcccggaaggaaaagaaatcagcatagacgaagttgagccggtttctgaaattgtaaagcggttcaagacaggcgctatgagctacggctcgatttccgaggaagcgcaccgctgcatggctctggcgatgaaccacctgcacggaaaatcaaattccggcgagggcggcgaaaaaccggagcgccttggaacagaggcgaattccgcaatcaagcaggtcgcgtccggacgtttcggcgttacggaagaatatttgctgagcgcaaaggaaattcagattaaaatggcgcagggagcaaaaccgggagaaggcggacatcttcctggaaaaaaagtatatccttggattgcgcagacacgttacgcgactccgggtgtatctttgatttcgccgccgccgcaccacgacatttattcaatagaagatttggcgcagctgatttacgacttgaagaacgcgaaccgtgccgcccgcatttcagtcaagcttgtctccgaggctggtgtcggaacgattgcggctggcgttgcgaaggccggcgcgcaggtgattctgatttccggacacgacggcggaactggagccgctccaatttcttcaatccaccatgcggggcttccgtgggaattagggcttgcggaaacccaccagacgctgattcagaacggactccgctcgcgcgttgtgattgagacggacggaaagcttatgagcggccgcgatgtcgcgattgcctgtcttttgggcgcggaggaattcggttttgccacagcgcctctgatcacaatgggctgcgcgatgatgcgcgtgtgcaaccttgacacctgtccgttcggtgttgcgacccagaacagcgaacttagaaaacgattcacaggaaaacctgaatacgttgagaatttcatgaaattcattgcacaggaactgcgcgaaatcatggcgaaattcggcttccacagcattgacgaaatgtgcggacacacggagcttcttgccctcaaagaaaaaagcgcgttcccaagggcaaaccttgtggacatgagcagaatcatcggctggaaaactccagaagacgcgaagacacattttgagccggcggatattttcgacttccagcttgaaaaaaccgtagacgagtcaaagctcctgaaagcatttgaaaagttaaagaaagcgaagaaaggcatttttgagctttcagtttcctcaactgacagaaccgtgggaacaatcctcggctcggaaatccagaaaactttcggctcatctcttgaagaggacagctacgttgtgaactgcacgggcggaggcggacagtcattcggcgcgttcattccaaaaggacttacactgaaccttacaggagacgcgaacgactacctcggaaaaggcctgagcggcggaaaaatcgtagtccacccttcagcaaaggcaggatacaaagccgaagagaacatcatcatcggaaacgtggccttgtacggagcgacaagcggaagcgcgttcataaacggaatcgccggcgaacgtttctgcgtaagaaattccggggcggttgcggttgttgaaggctgcggcgaccacggacttgaatacatgaccggcggaactgccgtaatccttggcggaacaggaaagaacctctgcgcgggaatgtcaggcggaacagcttacgttctggacatgaaccacgatttgtatctgcgtctgaacaagcagcttgtttccatgacagaagtttcagacagccacgacattgagctcgtaaaggatttgattcagcgtcatgcaaaggagacaggctcagagcttgcaaagaaaattctcaaggacttcgataactacatcaggcacttcaagaaaatagttcctaatgattatcagaagatgatgacggaaatcgcaaagggcgaagagcgcggtttgaatcacgatgaagcagtccttgaagcttttaaaaagctcactgcataggaaaaagtcaggggtacattatgggtaagaacgatggatttatgatatacaagcgcgttgaagattcctggattgagccatcttcacgcataaagaatttcaaggaattccacaatcatcttgacgacagggaacggcgtgagcaggcggcaagatgcatgaactgcggagttccgatgtgccagagcgcaatcaggcttgcgggaatggtgacgggatgtccgctccacaattttattcctgaatggaacgacgcgctttacaaaggccagtacgacatggcggcctggcggcttctgaaaacttcaagcttcccggaattcacaggaagagtctgccccgcgctgtgcgagaaagcctgcaactgcggaaacggcggagacataaaggaagctgtgacaatccacgacaacgagctttacataatcgagaaggcgttcgagtcaggctacatgaaaccgcagattccgaaagtcagaagcgacaaaaaaatcgcggtaatcggctcaggtcctgcaggacttgctgtcgccgacttgctgaaccgccgcgggcacaatgtgactgtctacgagagggatgacagaatcggcggacttctgatgtacggcattccgaacatgaagctggacaaaaaaatcgtggagcgcagggtcaatcttatgaaagcggaaggagtcacattcataacgaacgctgatgtcgggcgcaacgtggatgccaagcagcttctttccgaatacgatgcggtcgccctgtgctgcggagcgaaaaaaccgcgtcctctgtctgcccagggaagcgaggcgcagggaataatgttcgctgtggactggctcaagagcgttacaaaaagccttttggactcagacttttcggacaagaatttctttgatccaaagggaaagcacgtggtgatccttggcggaggcgacacgggaaacgactgcacaggctcaagcataaggctcggggcggcaagcgtaacccagcttgaaatgatgccctgccctccagcagaacgtcagccaaacaatccgtggccgcagtggcccaaagtcctcaagacagactacggtgcacaggaatcaattgaaaagttcggccatgatccgcgcgtctacaaaacgacaatcaaggaagtctatcagaaagacggaaaagtctgcggaataaaaacagttcaggttgaattcaagaatgtggacggaaaacgtactctctgcgaaatcgaaggaagcgaaaaagagcttccggccgacctgattctgattgccgcgggattcctcggttgcgaagactacaccgcaaacgcattcggtgttcccctttccccaaggaacacggtcgcaacttccggcgcagactcatacttcacgggaacagacaaagtctttaccgcaggcgacatgcacagaggccagtcgctcgttgtctgggcaatcgcagaaggaagagaatgcgcaagggaaatagatgaatacctgatgggatattcaaacctgtaactcataaaaaatacagccagactagcctaagcttttgccttatgccagttctggcttttttcccaaaatctccctgtaaatctccaggtccttgcttgcgaacacgttgaaaattaccttttttacgcttgcatttttgttttcgtcgagccagccttttacggtttttactgcaatttgggcggcgagtttttgcggaaatctgaaaacgcctgtggaaatgcagcagaacgcaacgctttcaagtcctttttgcgcggcaatgttcaggcagcttgtgtagcacgaggcgagctggattttatcgcgttcggttacactggcgcggattatcggaccgaccgtgtgcagaacgtattttgaaggcagattgaatgccggagtgattttcgcgcttccagttttttcaggtgaaccttgtttttgcataatctcgttgcatgcgaggcgaagctgaactcctgagaaagtgtggatgcagttgtcaatgcacgcgtatagcggagcaaagcagccgagcagggcggaatttgcggcgttcacgattgcgtccgcgttcaaagttgtaatgtcgccctgccacaaaaaaatccgtttgtccgccggaacatttttcagcgttgcaacatcgatgataccgcgctctttgttgcgttcggttaaatattcgtcctgaattttcaagaattcatcagaaaccggccgtggcggacgcacattcatcagcgagcgcagcaaatctttctgagcggctttgttatcttgcggcggaagttcaatttttttgtattcgtcaggcgaattcggctcgtttagaagagcttttataagccattctcgtcgttcgggttgtgtcattcggagtttcctttttttttgggggggggctaacttatacaccttaagaaaaataaggttttacctttcttttcgttgttttcacccaagcagttctctaagttttttggtaagcattccttttctcttttcataaaactcttcaaaatgctcaagttctagtccgacatcatcagggatgaatgcctgcttgcagaactctgctttttgttcatcattcatatcgttatagtactcaatcaatggcataccgtttttactaccattactacgtccttccaaaagttgaagattaggaagacgattgcgatttccacgccatcttttccatgcatccatagttacagaaataggcttgttaccatcaaacctgtcatacggatgcaggtgatcctgttcgtatttgaagttcttgttaatccaatctaagctgagatagtagagagcctccccagcaacgcggcttcctttttcggagttgagaatgtcctcaatcttgccatcagtcacacgaagttcgttcatctgattcagcatatcaacagtaatctcataatcgttttcattgatgttgctcttcatctgctgtaacttacttgtagtgcctgactgaaaatatgtaaacagaatagcgcgtacaagatatgcacgaatgccttctgtatttttcttataatcaggattgtagtagataaagtaaacgataggtagcaacacgttccaactgcttgaaaaacggcttacttctatcttcaattccttgaggaatgcttccaagtcctttagagcctttttaaattcactccagttatttttcaattcttcagctattttcttgttgatgttcgacttgattacatcaccatagagcattagtgcgactctgatgataaaatcggaaccgaatccagcatacgaatctacaagcagttttccgaactctgcctttgcactcggccaataagcttccaagatagacatggtgatttctgacttacgaagtgctttaccaccgctattgaaacgaacaaacatctcaagcgcatcgtcctgcttcatatcctgaatttcggtataacgaatcaacttttcgacaaaaatcttctcatagagtttatttaggatgcctctcgcataatccttgctgtctgccggaacatttgcaattgcatcttcgatagctttttccctagaggtttcgtcctggaacttcggttcaagaatctttctgatttcaaactgagttgggctcagtttccctactttctcactgaacttgatgtcatatttcttactgttgtattcttcttcatctacagtcagcttatttttattgagttcaataagaagcttggtaacgatgcccccgccaggtttcttacgagcgtgtttttgacgaatgaacgcatcaccgaacagggacagataaagagaagtgagtctctgctgtccgtcaagtattgcggtatctgtaaaatttacatctatgcttgatagttcataatttacactgtcagcttgtttacgactgtcaaatgtagtcgaagacaaaaagttacaaaaatacgtatcccatgatacattagaatcatctatatgccaaaacagaaatgttgcaatcggatagtcaagaagaatggaatcccataatttttcaatttgttccatgctccacacatactgtctctggaatgctggcattacatactttccatttttaatattttggagagcttcataaatagaaatgctactatcaatcaatacactcatatttatctctttttcttataaaaattaattttacgaaatattatatcacaatatatgcaaaaagattcagttctactatacaagattgcggaaaattacgagattttgcaatccccattctcgtcgttcgggttgtgtcatgtctacctcccttacaaaatatattccagctgccgctcttttgtcttcagccccattttctcgtagaatttttccgccgaagtgtttcctgcccagacgttcagcgttacctcgtagcagccaagccgtttcgcctcgcttttgacgtgctcaaaaagtttttcgccgatgtgccggccgcgggtgtttttgtcaacgcacaaatcgtcaataaaaagcgacttgaactgaaccatgttgtttgaaaaaggctgctcctgaatctggcaaaaagcgtacccgacgcaaatgtcattctcgtccgcggcaacataaatcggcttcaggtcatccttgagcatttccgaaagctccgcatccgtgtactttgtcgttcccggaataaaaatatcaggccgaatctccgcatgaatctccagaacctgtcccaacaaatcaataattctcggaatgtccttttcgttcgctcttcgtattgtcattttttgctccttattatatcaaaaatttgtcttttataagacgcgtcacattttttgtattgaaaaaaggacttaatttattttgctaaaaaatatctgtaggttcttaaaaaacaaaaaggaagccgcagctcccttttttcagtttttctgtacacattccaaagaatgtataagcattttgcggaatcttaaagattccttgttagcagattgaccagaaaaattaatcagtaaaataataatatgccaaattagatttatttgtcaaatgtttttctaaaataattgtctccatattaatatgccgtgatataattttagctggagattataatgaaatatcgtttagggcttgatctaggaacaaattcgattggctgggctgtttattcgcttgatgaagataacgagcctgaaaaacttgaagacctcggagcaagaatattttcagacggacggaatccaaagtcaaaagagccgcttgctgttgaaagaaggtctgcacgcggacaacgcaggataatttatagaagaaaactccgcagaagagaaactttccggcttttacaaaaacaaggtcttcttcctcttaaaaaagatgaagcccaatcgctaaaacttatgaatccttacgagcttcgcataaaagctcttgatgaaaaactggagccgtttgagcttggacgtgtcctttttaatctttctgtgcgacgtggatttaaaagcaaccgaaaagacggttctcaggaagaaacaaaagaaaattcaaaatctgaaaaattgacgcaggcagataaatgctcaaatctttcggatgcaataaaaaaatcaggctatagaactcttggagaatttctttggaaaaacaaggaatctaatggcggaactcgctttgctccaaacagaatggattattatcctgtacggcagctttatatagaagaatttagttttatacgtcagaaacaagagccgttttatcctgatgttgattggaattcaatctacaataaaattttctttcaacgcccgctgaaggttcaggaacacggaaagtgccagtatatgccggaaaaagaaaggacatttaaggctatgccgtgtgcgcaaaaaatacgcattttacaggacgtttttaatctaacttttattgcagagggaaaatcaaaaaaacttcttcccgaatggcaggacgaaattataaagcttcttgattcaaaagaaaaagtgacttttaaggatatccgcaaaaaacttgattttgatgagaatatcactttcaatcttgagtcagaaacacgcgactttttacagggaaattcaaccgctgtaaaactacgcagcaaaaatcgctttggcgaaatttgggattctttaagtcttaaagagcaggatgatattgttgaatgtctgataactgcgcaggaagattctgatgttcagaaaatgcttgagaaatacgatttgacttctgaacaaaagaattttatcacaaaacttgttcttccaagcggcacaacaagtttctgccgtgaattttctgaaaatgttgtgaataaaattgaagaaaattcaaaaatatttgcagattcagctgaacgtacagaacgctgtcaaattcacaatgtaataaaagaagttggttataattatgcgagtcagacagttgaaaaatgcgaagagcttccttattacggaaaagttctttcaggttcaacaatgggagcgaaggcaaatcctaaaaacgatgaggaacgttttggaaaaataagcaatccgactgttcatattgcgcttaaccagacccgcgttgttgtaaacgctcttattaaagaatacggaaaaccaacgcaggttgtaatagaagtaagccgggagctaaaagccagtcgagaagctaaaaataaaatgcagcagaaaattgcggcaaaccaaaggcagaacgagattcttaacaagaaaataaaggacgcgaattcttctattctatttccaaaccgaactgaccgtctaaaatacaagctctgggaagaacttgatccggaaaacgcgctaaacagaagatgcgtttattgcggaaaactaatttcgggcgcagatattttcaatgacaacaccgttcagattgagcatattcttcctttcggacgcactttgtgggattctgaacacaacaagactattgcccatacaaaatgcaacgcattcaaaggcgaaaatacaccttacgaggctttctttaaaaatccaaaaggctacaactggaatgaaattcttgaaagagcttcgcatttaaaagatcctcagaaaaggcggcttttttcagaaaatgcgatggaaacttttgaaaaggaaagcggatttatttcgcgccagcttacggacaacgcttatctttcaaaaatggctttgaaatatttgaagtgcgttgttgaaaaagattcaaatgtctgggcggttagcggcggaatgacaaaacttttgcgcgataaatgggaaatagattcaatcttgaaaagaaaaatcggagaaaatgaaatttttcattttgaactgaaagatgagcagattggaacttacaaaaagaaccggtatgatcatcgccatcatgctcttgatgcaagcataatcgcattgattgaccgctcaatggttcagcaaatttcgcgtcttaatcagattggaaagaaaaacagaattgaagttccgcagatgcctgttataagaacagacctaatagaaaagacaaaaaatattgtcgtaagttttaagcctgaccacggcgcacaaggcaagctttctaaagaaactctgcttggaaaaataaaaatggcagagcaggttgtaatctcaaagattcgggaagaagatattgctttcataaagaatgagaaagtccgttcagagtttgaaaaaaaacttgcagaacttaaggatattaaaaaagttcaaaaggagcttaaggaactttatcctgttgtttgggtttttaaggaatattacgtttgcaaggaaaatattctagggctaaaagaaaaggattttgattcgataatcgataagaaaatccaaaaagagcttcgcgaatttacggaagcccacaaatctgaaaaaatagaagatgtaatgcagaagttcagcgagcaaacaaaaatcaaaaaagtccgctgcataaaccgtgttcaaactccgattgaaattaaaaataaagacggcacaatgcgttatctttgtcctgaagattattttgccgctgttgtctggcagatccctccaaaaaataaagattcgaagcctgcgtacaaggcaacgtttattcgccgtgaccaagttgatttagacggaaatccgaaaattatgactaagcctcatcctgccgcaaagaagatatgtgttctgcataaaaatgattatcttgaatttgaggacaagggaaactggtacaagtgcagaattgcgggatatgcagctacaagcaataagtttgatattcgtccgatttatgcagtttcaagttgtgcggattggattattgctacaaatgaggctgttcttgaaccatgctggaaacctgtgccgactcaaaactggatttcagtaaatgtactttttggagaaaaatcagctcggccgattactgtaaatcctataggccgcgtatttagaaaaaaataatattgagaactttgtttagtgtaccgataaataaagtatgctgaacagaatactagagatttatgaagaaaatcgctatgtttctctgaaccgtgggtttgtggttatccagcatggaactgagattttaggtcaggttccactggatgatgtttctgttcttttgctttctgcgcagggaattacgctcagtaaaaatattctaaatgctcttgctgaacgaggctgcgtaactgtcttgtgcggaaagaattttattccgcaaagcatggttttgcctgtcgcaaaccattgtctttttacaaaaatcataaaaaatcagataaatgcttccgagccgctaaagaaaagagtttggcagcaagttgtaatccgaaaaatagaaaatcaggcgaaagttttaaaattatacgaaaaagactattctcttgttgaaaagatttcaaaacttgtaaagtctggcgacagcgacaatcgggaagcttatgccgcaaaaatttattggacaacgttgtttggggaaaaatttagacgcgaccgcaatgaagatggaataaattcttttttgaattatggatacgcggtaatgcgagccgcaatggcaagagctgtctgcacttcgggtcttattccagctcttggagtgaaccatagcaacaatttgaatcagttttgtcttgccgatgatttttttgaaatctatcgtccgcttgttgattctgttgtttataaaatgtgtttggaggaagaagaagaacttacaccaaaaaacaaaaagcggctcacggattctttgtggctaaaagtccgtactacagaaggctgtgctccggcgtttcagagcatgcagtatatgacggcttcttatgtccatgcattggaagataaaaatcctgccattgagcttccgatttgggagcaaggtgaaaaagatgagtaatcttgaattaaacaggtacgagcttatgtggatgatggtcttgtttgatttaccggtaatcgaaaagaaagagcgcaaagctgcgacagattttagaaattttttattggataatggattttctatggttcaatattcgatttatacaaaacttttttctggaaaagatgcctgcgaaaaatactacaagctgattgtaaacaacttgccaccttctggaaaggttgatattcttacaataactgacaagcagtattctaatataatcagctattcatctggagataaaattgaaaaaaaacagtcggaacagcttatgttattctgaaattttgacaaaaaaaatacgcccaatgtattctaactctttaaaaagaaaagaattacattggacgtattataactgattaatttttccggtcaatctgcaacatgtcgttcgtgatgttgttgccgatgatgattataactgattaatttttccggtcaatctgcaactgaatacaatgacgatttcattgatttactattataactgattaatttttccggtcaatctgcaactattacttcaatgaatggttctcttggacaattataactgattaatttttccggtcaatctgcaactgaattcaatgacgcttatatcgaaatgctattataactgattaatttttccggtcaatctgcaacttaccgcctcttgatatggtaaatatactaattataactgattaatttttccggtcaatctgcaacgttatgttttgaagtaccttgataagcaacattataactgattaatttttccggtcaatctgcaaccggtaaattaagccgtcctcattatcacatattataactgattaatttttccggtcaatctgcaacaagctaaacagcttcaatcttctttagcttattataactgattaatttttccggtcaatctgcaacctattgatttgattcctgttattcccggtgattataactgattaatttttccggtcaatctgcaacctaacttggagcgacttaaaacttatcattattataactgattaatttttccggtcaatctgcaactatgaattacggtcttgattctgctgattcattataactgattaatttttccggtcaatctgcaactcaagattcttaagagcctcggcaataggaattataactgattaatttttccggtcaatctgcaactgatttatttaaggatgcaggtgtttacatattataactgattaatttttccggtcaatctgcaacaaagatggataacaattaacccttttgacgattataactgattaatttttccggtcaatctgcaactgtaactggtgttggtgatagcacttctttattataactgattaatttttccggtcaatctgcaaccgaatctcttcgcctgaactatcctcagagattataactgattaatttttccggtcaatctgcaacggttgcactgagtatggcgatagttttaacattataactgattaatttttccggtcaatctgcaacctaacatgttgtcgggtcttagtgacggaaattataactgattaatttttccggtcaatctgcaactgtacacacctgatattctatttttcatatattataactgattaatttttccggttaatctgcaacactgagaatgctcgcaagatgttcaaggtagaagttcttgtttgccttgaaagactagaaaaaaaatcttgcagggtaaagtatttactaggttataatatataataacggaggaaaaaaatgaaaaaaaatccatttttcttgattattttttcagttcttttttgtacaagtctgtccgcaaaacagatggtcttggaacgcaatgtaactaaccacgttcagcgttaccacgacgagaagtggtttgatgagtctggtcttgtacgcatttatttaaatgagtttacgaataagaatgaccctgaaaaaaaattcggttgggcttttgcaatcaagtccaacatgttagggggctataaaacactaaatggtgaagataaatgtcctttaatgtattacatagatggcgaccacttttacattggagaagtatggactaatggctatcaaaccgaagtaactaagactcacgtattctttgatttcaataaggaagacggttatggtgtgttattcatgtatgcatatgcgttggctgttaatagacttttaacttatggcaataacataacattctgcgtaccaattgacaaagatggacataacaagtttattaccaacgattccgagaatgatgtagatgtgtcttttaatactggcgacttcccagaatacagaaactactccaagttccgtatggaaaatggtgatgtagatggtgaaaaggtataccttgacggtgaatggcgtaacatactgaacaagaagtatgttgaccagtctggtatgacttggaaggctttttatgacgaaataggatttcacgtacagaaatcccgtaactgtataaactgggctgaacctgtcgttttccctgcgttccgaactgtccgtatgagactggttaaacccataactagagttgaaaccaagaatggagttgaaatcaagattggaagtagtcaagacgcaggcattgaaattgctgcaaatttaaaagagcatggactatggaaggcacgaacacctatgcgtcaaggtgatggtacactacttggagcaaatggtggtactgaaggcgttatcacttgttggtatgaaccatttactgacagtgaaggtccaagcaaaggtcttgaagaaaaagaacaaaaagaccaacttattaaatacgaaaaagtagttcctaaaaaattagattaaccttaaagttgtatcccctttaagaaaaaaaatcggggctgtcctagaagttattaacagacttcaaaaagggcggccttttttatgttaaatgaattttgtagattttcgtttattgttttttttcttaggtgttcattaatcgaatcagttgcttgaaatcatatcccagcatcagtaatccccattcaattccaactttttcttttccccgaatctgaataattctttccattccagtaagggcttccagaattgtctgtgcagaactttctacggttggtgtgcctttgttaagccaagctaagaacttatgaataagtcccgctttcttagcattagggttagcttctgcctgggcttctttaaggaatgcttcaaagaatctattctttgcaccatcactaacattaagtgattcgtaaagactctccaagtattctaaatcgaaattattttccatcgtcgttaaacctctttttaaacttttgtgcccctatacgttaaatagaggcacaaatgatttattaaagtaatcccatagaagccgcaacggaatcaatctggttttctgttgcatttccaatatagaagtcggatgtctttccttctgttggaacatattctacgctttcatcaagttgaccttgtgattcaagctcacgtgcaactgccatgaacattctctgagcttcacgaagtgagcgtgccttcaagaatgagctcttgtaaggcttaatagcttcgccatagcgggcttcaaggtcgttgtagtaagtgttcaataataggatttgcataacgatggacagtcttgtaaatagccaattgtttccattccattaaatgttgcttcctgttatttacaaaatcagaagaatggacttgtacattgttcttttggaatgagcattttgaatttaaactaacaggaaagttatcggcagcctgatgttagaaaactaatcaggtaatttaatattattttcccgattatagttattgaagaattctaatattgtcagtaaataattcaaattatttgaatcatctttatcaaaagaattccaataattgttttcatctccatcgtcaaaaagtttcatctgatgagtagcagcgtttcctgattttcgaattttatgcattgcattagcaattccaccagatattagttttcttgcttttaattcatttattatatttgctaatgaataattttgttcatatatatatttttgtacagtttcatggaatgtgcttttaatctgtaactccaatacagacctaaaatctactaaagaaagtggccattctgaatcagctctagaaattgcggataaacaaacatatcttacaaaatcatcaaggtatacatattcataaactttttgatatgtgtaccaaagtaaatctttaaaattattcttatcaaaaaaatcttctgcagtttgattttgtgaaactctatcaatagttttttgagcaacttctttccagtggtccacagggaataaatcttttgctaatttatatttttctaaagctttatctagttcatgtctatattcataagcctcagcaattgcataatgaatcattccatcttttttctttttttcatattcgtcttgcaattcagcaaatgcattatttccttttttaggatcaagggaatacaaacgatttgcttttaatgactttttccaaatatcacgccaagtagacataaagacctcattacacattattatacattgtttttctatatttttggaaactttctgcctgattattcccctactaatagatgtaacaaatggaggcaaatatgaaatattttaatataactgtaaaattcggacatgtaggaaaaagcaatttttataaaggctatttatatcttaaagcagaatccaaaaaagatgctgctgaaaaagcaagatattgtcctcgtgtaaaacatgaccataaggatgcaatcttaaatgtagaagaaattgataaagacttatactttgaaggcttagaaaagaaccgtgcaattaggtatttttcatgttataatgttcaagaacaaagagaatgtttttgtgaaattgaagattccatcttcaaagaaaatgacgttgaatgcaaacatgcaaggcattcaaaaaaacgttctctcagaaaaaactacaatgatgatcctgaatttgattattacaaacataataaaaactttgatttctttgtagcttaagaggcattcgtttatgactaaaatagtatttgttactttgatgatggcagatgacatgcatagacgtcattttccagttgatggtgattctttgattgaatatcctggtgagacttattatgcaatcaattctgttttggctcagaccttaaaaaaagaagataatgtaaaagtaattcttcttgaaacaaatgccggagaaaaagccggaaagaaaaatgccgaacttttcaaaaatgaattaaacgaattaaaccaagctggtgcctcaatctcttatcaggtaattacatctgagtttaccggcgataaatctaagtacaaagaattatataagtcccttgtaaaaaatcttacagaaggtgctgagttatatgcagatataacctttggaataaaaacattacctatcttaattcttaatgctctccagtttggagaaaagttttttgactgttctattggtaatgtaatctatctcaaaacagaattcaaagaaggtaaaatcgttgaaggctctcaatgcatttttgatataacacctttatatatgctctcaagctttacaaacaatattgaatgttcttctggagaacgagcaattgctgctcttgatgcattgtttgagaaataatcccaatggacaagcagcaggcctattccaaaatagatgaacttttttctcagtatataaattgcgaagaagctttcagaaaaaatacaattaagtctaagcttcttaaagtaatttgtgatgtagttaattctgattacaaatataaagcacatatcgaaaacggcgatttcgactatcttcctgtattaaatgcaacgaacgaagctcttaaatattttaagcaagaaaaagaaggtagttttcattcatatctttttacttgtatacataatgccgtaataaaagatattgaaggagctattgcccctattgtcttaaactatgcaaatattaaattaaaaaagaaaatcaagaaattacttaaagtctataaagaaaataaagaagctgtagcacaagctcttgatatatctgtagaaaaattaaatgcccttttggattccgaaaagaccacttcaaatgtaaggaaaaatgaagatggaacagaatcaaatgtctgggactatatcaaatcggaaatcattaacgaagatcaaaaaatagaaattgaaaaacaatatgacaaaatatttaataccattgatgatatttggaaagatataaaatcaattcatcaggttgttatttcagattggctcactgcaacatttctatcttatgttgagaccagtaaaagcctccctatatttaatgataaagaagaaatcattaaatatttcaaaagattttcatttgtcagccacaaaattataaatcagttttttaattataagaattacgaaccaccagtcacctatgatgccattgcagaaattcatggtataacaaaaagttctgtcagtaaaaaaatcgacttcttcttgaatgatataagaattaaaacactaaaagaaatttttgaagaaatgaaatattaattcaaattttggaaacaaacaaatctggcttatccctttatatgtgtagaaagcattaaaaggagtcagatttatgaagacaatttatttaatttcatgctgtaaagaaaaactctcacatcctgcaaaagctgtagacctttatcaaagtgaaggtttcaaaagaagactttcaatcgcacagacacataatccagatgcaattctcattctttctgcaaaacatcacatagtagaacttgaacaggtattagctccatatgatgtttgcctttcaaatcaaacaatcggtgaacaaaaaaaatgggcagaaatctgtattgattcccttagtaaaaaatttgatttaaagaaagacaaattctttattctcgctgcagaaaattactataaaaatctgattggccagttcagaattgaaaactatgaacttccagatgaagaaattaaaatcccagttccaagcaataattcaaattttgagctactcaaatcctttctcacaataaataacaaagcttattgtgatgactgcttgagtaaattaacaggaataagacctcgtcaacagattaaccagttatgtaataaacatcttaatgtaattcatcgcattgattacggcatgtgtactaactgctgtaaatataaaatcgttcgaagttgttaaaaatcttcttcaaaatggaaacatttagaagaaagttatcccttattttaatagagtaagatatgggcggattaatatttttgtttattgtaatttttctttttttaacttttttaccatcaatcattctttggtacaaaagaaaaaaatgtccaaagtgtggagcctggggaactcttaagtttgtaaaagaaattgtaaaagacaaagttgtcggacatgacagaaatcgttatggcggcggtggcggtcattacagatatggcggtctgggaggttttcattcttcccatacttcagatcagccttttatcaggtactgggttgaagaaagatatatctgccagaaatgtggacgtcatatatcaattcatacaaggaaggatatgagatgaaagaagagatttatccatcatcaaataaaatgcaagcaaaagtcatcttaggacgttgcccgtatgcaccaagcaagtcagaaaacttgtttggaatgagaatccagaaaatgggttcagattgggtcagaacatgggctttcaaaattgattctgagcgcgcccataacgaaggttatgacagagaaactacacaaggatcttttgttccagctagtgaatatcctggttgtccttattgcggttcagataatttctgtgtacttgcgggaaaacattctgctttaagaagccggagtttgaaacaaaaacaatcaggcttacttgtccctggtgtggtcaggtcggaatgtataacgcagcagaaaccttacaagttcaaggaggaggtttttaattatggaatttaagaatggacagattattccgcttgaaggcggtaaaaaagcaacaatcattaagaagctcggcgaaggtggtcagggaatagtttattcagtaaagattgacggcaaagactatgccctcaaatggtacactttccgctttcagaacaagaaaggcttcagaaagaatctgcaggaaaacatcaaaaatggtgctcctgattcaaagtttctctggcctttgtatctgacagaagaaattaataacagttttggttatgttatggagcttagaccagctaagttctctgatttctcagacatcttaaacgacaaagttcgttttaattctacagagaaactgattacagctgctttgaatattgtaaatgctttcagaactctgcacagaaaaggtttaagttatcaggatttgaatgacggtaacttcttcattgacgtaaatacaggcgatgttctcatttgtgataatgacaacgtaactccagatggaatgaagaatcctggcaatatcggcggaaagcctggatatatggcaccagaaattgtgtgtgcaaaatcctatcctaattcccttaccgatagtcattcacttgcagtaattcttttcaaacttttctgtagacatgatccattgatgggaaagctttatgtagacagtgtatgtattacagaaaaacgagaatgggaactttatggaaaagcccctgtgtttatcttcgaccctaacaataaatcaaacagaccggtacagggtgtacatccaaatcctataaagctctggccacgttatccaaagtttttgcaggatgcatttataaaatcattctgcgaaggattaaaaaatcctaatcagagattgcctgaaaatgaatggcagaaactccttataagatt

SEQ ID NO: 821 - DNA, 23312 bp, synthetic construct
  misc_feature 1..23312: note = Synthetic
  source 1..23312: mol_type = other DNA
  variation 20291..20362: note = n is a, c, g, or t
ggtctttttgtgggccgcggggttggccgggttgtcaaactggcttggaatgattgagcctggcgtggcctcgtgaagctcgttggccttggcgatggctcccttcattcccttggcgccttcggtcagaacgatttcggcgccgtaagccttgagcaaattgcggcgctcgacgctcatcgtgtcgggcaaggtcaaaatggcgtggtagccctttgcggcggccacggcggccaagccgattcctgtgtttccggatgtgggttcgatgattgtggcgccgggcttaaggaggcccttggcctccgcgtcctcgatcatcgcgagggcgattctgtcttttacgcttccggccgggttcaagtactcaagcttggcaaggatagtggcgttagcgactcccgccttttttgcgtatccgttaagctgcaagagtggagtttttccaatcagttccaacgcgctctgtttaatgtctgccataaaagcccccttgtttgttttatattacctagttttccgctaggttttctgataaatcaaatataccgcgctcctaacgtttttgtcaagcgcctttttaaaaatttttttcccttgacaataaagaaaaaaagtgaaaaatgaaaatgatggaaaatttatcggaaagcgccaagcagattcgcgacgtaataaactacataaagattttcaaggacgccttggcggtcatacacatcgacgaccaaataatcgactcgggccttttgcccagcttgattcacgacatagcgctgattcaccaagccggcctaaaagtcatcgtggccccgggcgcccgcaagcaaatcagcgaaattttggacggagccaaaatcgaatggaaaatccaaaacggctcgcgcgtcgcgcccgaatccgccatgccgcttatcaagaccgcggcctttgacgtggccaacacaatcatgaaccacttggccggcgaaaaccgaaccgctgtcatcggcaactgggtcaaggcccgcgccaagggagttcttgacggaacggattacggcaccgcaggcgaaatcgacaagcttaaaatcgacgtcataaagcaaactttggacgacggcttcattccgatttttccctgcatcggctggaacgatttgggaaagccctacaatatttccagcgcggagttggcccagcaaatcgcttgcggcctaaaggcgcaaaaacttttttacattctgcccgacccaaaaatttccaagcaggatttttcgcttcctgacagcgttcaccttagcgacgacggaaacattccggcgatgaatcttgcggaggcggaagagatgctgcgcatgaacggcgccgattgcggcggaacggcggcaagcccaaaaagcgcggcccccaaaaacgaacaccgcgcgcaaatactttcgctcttgcgcttggcaaaggacgcttgcaaaaaaggcgtggcccgcgttcacattctaaacggaaaggttgacggaattttgccctgcgaaattttcagcggcatcggaagcggaacgatggtctacaacaacggctacggcgacttgcgcgcgatgcagtcgcaggacataccgagcgttttgtctttgatgaacccttttgtgcaaaaaggaattttgttggagcgcacggccaagcaattaaaggccgacttggacaactatattgtttacaacgttgacgaaggaatacacgcctgcgccgcgctcaaagtttaccaagagccgggcgctccgacccaagcggagatttgcgctgtcgcggtagatcccgcttacggaaatatgggcgtcggccccaagattgtaaattacttattggacaaggcccgcgctcaaaaaataaaatcggtttttgttatgacaactcaaaccgccgacttttttgaaaagctgggattcgcgcccgactcaatcgactcgattcccgcagagcgcaaaaagctttggaaccccgagcgcggctccaaggtttaccgaatctccttgtagtacacttccttaaaacaatcgcaagccaaaaaaaacgccccgcctttcggcggggcgttttaatcttgctaactattatgttagcaaccgttcctattcaaacaaaatcaagaaggggccgtcgttgtcgcccttgtcggcgtaaaactcaagcctaatttttgaagcgtttttgttcaaaacaaattccacgggcacatcgatggcgccggccggaatgtctcctatttggactgactgcgacacgggcttatacgcgtatccgcctttaacttcctccgtaacactcgattgaagagtgtttacgccatagacattgtttccttttagcgcaaacttaatgacgtcgcctttttgcagctgggcgctcaaaatgtcgctgaggggaatgtggcaatagtaggaatccccgtcgttggccgcggcaaagcgagtctttgtcaagtcaacggtgacgacctttccaagcggctcgttggtggcggtgactttcttgatgtaaatcttgattccaggaagccagttccaatccttgtcggcgacggcgacgcctatgcgctcgcaaatcgttttgtcggcggggcgaatgtcgcactttccgtcaacatatccgtagtcgtagaatttgtttgtcgcgccgtaaacaaatgtttgataggctgagatttttttagaaatgtcgccgatgcaaactgtgctgcttttgggagcgttgtggttttcattttcttcgccgtagtaggtgttgatgtaaagatttgcgattttggcgccatcggggctggagcattcataggtgacatacttgtagcctgcaaagtcaacgggcttgtccaattccaacgaggcaaggccttcgccgtcagttgttaaaagagttccgttggcgtcgggcgaaacgtaaatgtcttttgttttgggagcggcgtaaaggctggccgcggcaaaggccaagcaaagcgcgcccaagaatattttattgttctttttcataattttctccttaagctttttctcttactttgaataaatcaagtaggggcctttgaactcgctttcgtcttcaaaggtgatgatttcgagcgtcatctttgaaccgttttttagaatcggcaagtcaatagtgtcgttgattttttgtcctttcgcgaatccgcgtccgttccagtcaagtgagacttgctgccattcgcctgaatcgtcaaaaacgttcgcgcggaaattgcccaagtcataggcgtttgttccttttagttttagctgaacgatgtcgccggctttgggagtcgttcccaatgtttgttgaaggtccgcccaataagcgtagtgcttgctgccgtcgtcccatgtgacttgattgttgattgcaaagaagcgcgctttggtaaagtcaataacatgcaattggccgatggcgttgtttgtggcagtcactttctttacgaaaatttttatgttcggaatgttcttccagtttgcgtcataaacgcctatgctaaaatggtcggcggcagccttttccgggtttctgtaaattttctttccgttttcccaatgctcgtaacacatgttggggccataaactatgccttggtaaagcgcgggctttttttggatatcgtaaattctaatttttgccgactcatcccaatcgtagtcttcgctgtcttccggaacaaagccaaagtttaattcaatgtgtgagagcttttttccgtccgggcttgaacattcaacttgcaagaatttgtagcctgaaagatccacttcctctccaaggtccactcggccccagccgttcgcgtcggttgtcacaagcgttccgcttttttctttggcaacccaaatgtcctttggcgccttggcttttggggcggcgtaaaggctggccgccaagagcgacaagcaagccgcgcaaaaaagagcgcgtccgatttttttcataaattcctccatagttaattatatatgaagaatgatataagcctatatctaaaaagtcaataaaaatatttttatatatgaaacataatacattgttatataatacattgttatatcaaatttagataatatagttatgcaagaattatgactttggaaaagactgtaatagacaacatcaagagaatccgcaaagaaaagggcatcacgcaggaacagctggctgaagcgtgcaacacggctaccagttacatagggcttatggaaatttacagaaatgttccaaaactttccacaattgagagaatcgccgcggcgcttggcgttgaacctcaggtcctttttcaaaaacgggaaaaggattcgccgacagaacgaaagataaaggctataaagaacaccgtcatgcagtcggtcgaaaaggaattgatgcgagccttgcgcgaggagctttattaagcgctccgttcgtttatagttaaaataatataattttatatcaaaatttattttttttctcttgcgcgttttgctcttgccgagttataattaaggcggagaaaatcgtggatcaaaaaattaaatttccaattgcgttaaagcatattttactgttttcatttcttatcattcttgtcttgggtttgacgacctttcttgtttccacgcttgttcgcggcgacgacaggcgcaaggccgaagaaaacaaccacacgattaacgccaggaccgcgcaaaccgttcagcaggctttttcaaacgctcaaaagaattcctacatactgtttgactcgatttcaaagttgcaggacgccaataaaaaggacgcaaagcaagtccaggccttgcgcgattctttggaaaacgattattttagggtcaacgacgacataatttttgtttccagccccgacacaaatttaaaggtgaacccatcgttcaaagaaaaagtcggaggagcggccggagaaaaaaaactttccgattttttgatcgcaaacaaaagcgcggccagcggaaaagtccgctactttaacgccaggaaaacgcttgacattgattcgattattttcacttttcaatacgggccgctgaacgccgtcaagaacgcggcggttggcgttgacacaaaagccttggccgcgcttatgagttccggcgccaacaacgcgacgattttggttgaccaagattccgccgttcttatcaatcctgactatgaaagcgagcaaaaaacttatgtggccgcgcaaagccttatcgacagcattaaaggcaaggaaggcgttgacaacactcaaagccttgcggagacggaagacggaaggaaattcatttcggtccacaagacaaaggacaacctttacgtcataacgagcgtttcagaaaattccgtttttgccgtaatcaatcgcaccacttacagaatcattttgttttcgctcgctattttgttcatcgcgattatggcgattcgtttgttcagtaaaaacattaccaatccaatcgccgacttggttgacgcttccgcaaaaatagagcggggcgaatttgaattggacatcgagcctcgcacgcatgacgaaatcggattgcttacttcctcattcattcaaatgggaaagggtcttgccgagcgggaaaaattgatggtgtcgttcagcaaattcaccaacaagacaatcgcgcaaaaggccgccagcggagagcttgcgcttggaggcgaaaaccgcaacgccacgattttctttagcgacatccgttcctttacagcgatgagcgaaacgatgcaaccaaaggaagtcgtagaatttttgaatgcctacatgacgcgaatggtcgagtgcgtcaacaagacaaacggcgtcgttgacaaatatatcggcgacgcgattatggctgtttggggagcgcctgagtccgccggaagtcccgcccttgacgcgctcaacgccgtcaccgccgctcttatgatgcgcgtttcgctttttcactttaaccagtcgcgcaaggaacgtggattggcgcctgtaaaaatcggttgcggaattaattccggcccggtcgttgccggccaaatcggctccaacgaaagaatggaatacaccgttataggcgacgcagtgaaccttgcaagccgcacggaggctttgaacaagccatttgccacagacattttgattacagaaaacacatacaatcttataaagaacgatgtgattgtagaagaaatgcccggcgttcacgtaaagggaaagacggacgcgataaaaatgttcgcggtcattaacctcgcgggaaaagaaaggccaagcacaattgaagaagtgcgaaaaattatcggaactaccgcgcctgatttggcaaaggtgaacactgatgacgaagaaaagaaatacaagatcgaaggctagcatagccgacattttgctttttattttgtgttctcttggagcggcgacggcgcttggactttattacaaggacataaactcttggtcgctaaagaacaacgaaaccgcggtggcgaaaatttattttaagaagaacgtagtccagcgcaaatttattgacaacgacatttgggagcgcgtgaaccaagaaagcccgatttacaacggcgacaaaataaggaccgcttccgattctgaaatccacgcacagtttgaaaagacgggaacgaaaatccagctaaaagaaaattcattgattcaaattttcagcaacaaaaaagaaaagtcgattgattttttaagcggagaaattttactggccagctctcaaaacgacgaagaggcggttattactgccgtaaagaaaaagatttccgccgcgccaaattcaaaagttaagattactatttcaaaagcggagaaaaacgagaaaaaagaaagccagcccaaagaggccgtcgttgaagtcatcgaaggcgaggccgtggtgacgaacgttccaaaggcggcgctttttcaaaagccggttgaggaagcgcaaacgataacggcgggcgaagaattcattgtcaccgaagagccgattgtcgaagccgagtcggaaccagagcagtttgagttcgctccgccagcagaggaagaaacgccgcaaatcgaggaagagacgcaagaggcggaaaccgttccagagacaaaagtcgagtctgcgaaaatcgaaaaaacggcgaacaaagaagaagatgaagaggaagaaacccccgccgcaagccaagcggccaaggctgagccaaaggagcctgttcaaattgaaaagaacgcggttgccgtcgttcaaagcccgtcgatgaaatttgcaaagaacgtttttaaccaaaaaacaggcgaatacaattacggctttggagtgattttgcgaaagctttttggaacaaagagaatcattcccgcaggctccgtaatcgaattgaaaattcgcggcgtgccaaacaaaaacctttcggcttttgggttggacgttaacggcgtcaattggcaaaaggtcagcgccactaccattgccgttccaaacgccggaaagggcttgttggcggggattccctttaacgaaagaatttgcgtttacattcaaaaagaaatttccagcacaaaccaaggaaacatttatttttcttacgacataaacaaacttgacgaagaagttgaaataaaagattttaaagttgaggcaaaaattctttcgcttgacgctgacgaaatcatcagccaaattccagtgggaaaaaaatcgcttgtaacaatagacaagattcaaatcaagcgcgttaagtgggaccacggcgacagcggctttactttgtatttgccgacgcaaagaattttgggctacacaaaatcgcttccaaaaggcgccaagataaaaatcaatctttccgcgcaaagcggcattccgctttcattcgtcggctttaacacaagcaattgcgacactgaacggtggacaagggcgcaagaagacactcttaacgacggaagcattggacaagagtttagccttgagaaaatcgtaaccttaaaggacagcgtaagaaattcagacgccgccgtaatggaaattagttttagcaacaacaaaaaagaagagttttgcgaattgaccaatttaaggcttgtgtttgagcgcgtagagtaaggtttgtaagcccaagactgcggccgcctagactgtttgcaagcctaagaagcggcccgccttgaaagtttccgccaaatgcgataatttgttgttactatgactatcattgacggaaactcacttacaatcgaagacgtaaacgacgtggcgatcaacggccaaaaagccgcccttcccacagacaaaaaattttgggagcgcatggaaaagtctcgcaaatttttgctggattatatttccaccggcgttccgacatacggagtcaccaccgactttggcgacagctgttacaagcaaatcagcgttgacaaggcgggtgaattgcagcgcacaatcgttgcctaccacggaatcggtttgggtccgtactttgaccatgaaacaggccgcgccgtgattctttgtcgcttgaacggaaatgtaaagggcggccactcggctattcgcccggaattggcaaagaaaatgctggagcttttgaacaaagacgtcattccatgcattccgcagcttggctcggttggcgcgagcggcgaccttacgcctttgagctaccttgcggccgtaatcatgggccagcgaaaagtttactacaagggaaaaatcgttccgacgatgaaggcctttaaggcggaaaagattgagccgcttttgattgaagccaaagaaggccttgcgattatgaatggaacgagcgttatgacagccgtcgcctcgcttgccataaaaaaagcggagcggcttgcgaacatctccgactttttgtcagccgtcacaagcgaaatcacgcgcggaaaggacacgccctttgtcgcaaaagtcagccagataaagaaccacgcgggccagtccgaaagcgcggcttacatttacaagatcatacaagtatgaggaattcttaaaaacgcaaatcgaaaagcttgaaggaagaacattcgtcaagcaggcgaataaaattcaagaccgctactcaatccgctgctcgccgcaaatcaacggcgtttaccgcgacacgctttccatcgcgcgaaaatggattacggaagaaataaattccgccaacgacaatccgcttgtcgacatcgacgcgggccgcatttacaacaccggaaacttttacggcggccacatatgcgcggcctgcgactacatgcggacggcgcttgcaaacatctcggacctttcggacaagcaggccgaagtcatcattgacggaaagttcagcggactcccggacaacttgactccgcgcataaaagacactgacccgcgctcaggcttgcgccttggctttaaggccgcccaaattacgattagcgcgattcgcggagaagtccaaagctactgctacccgatcagcgtcacaagcgctccgaccgaagccataaaccaagacaaggtgagcatgggaacaatcagcgcccgcaaattcgccgagcaaatcaacttggtttacttgcagttcgccacccacttgttggccgccatgcaagcggttgaccttgcgggctacgacgactttagccccttcacaaaagaagtccacgaccaagttcgcaaaatgagcaagttcgtaaaagacgaccgcccgcttgacgaggacgccacaaaggttgccgagtggctgaaggtgacggagatttttgggtaaatttttgaagatgtggaacaaattaaaaaaataaaatttactttaaaaacaaaaagagggccgtggccctcttttttcatgttctctatttacattctaggagaatgtaaaagcattttgcggagtcaaaagactccttgttagcaggttgacaagaaaaattaatcagtaagtaaactatacattattttttttattttgtcaaatttttttgcattttattgtatttgcgcgctatacttgttacatgaaatatcgtttaggacttgatttaggaacaaattccattggttgggcaatttattcacttgacaatgatagaaagcctttggaattaaaggatatgggtgttcgtattttttctgacggacgagatccaaaaacaaaagaacctcttgccgtcgcccgcagaatagcgcgaggacagcgaaagattatatacagaagaaaactcagaagaaaagcgacttttcggttgttgcaagagcaaggcctttttcctaaaacaaaagaagaaacccaaaagttgaagctgcttaatccatacgaattgcgtgtaaaagcattagacgaaaaattagaaccatttgagttggcccgcgtgctgtttaatttatctgttcgacgaggctttaaaagcaatcgcaaagatgcttctgcggcagaagcgacttcttccgcagggtcagataatctttcacaggctgaaaaatgcgctgaattatcgaaagcaatatctgaatcgggttgcagaacgctaggcgaatttttatggaaaaatcaaaataagaataaaggaattcgttttgtacctggacgaatgtcatattacccgctccgaaaaatgtacgaagatgaattcaatgtgattcgcgccgcgcaagaaaagcatttcaaaaacatcgattggaattcaatttataacgcaatattctttcaaaggccattaaaaccacaagagcgtggccgatgccaatatatgattgagaaagaaagaacttttaaatcaatgccaagcgctcaaaaagttagaattttgcaagagattcgcaatttgaagtatcaaaatgaagatggaaaaactatcccgatttcagaagagcaggaagacattcttctttctttgcttgattcaaaagaaaaggtggcgtttgacgcttttagaaaggctttgaaattgaattctgcttgtacatttaaccttgagaaaaatcgtgattttttgctgggaaattcaaccgcagtaaaaatgaggggcaaaaaccgttttggagatttatgggatacattttctctcgaggaacaagatgcaattgtagagaagctgataacggcagacgaagacggagagatttttgaaatgttaaaaaaatacaacctctctgatgaacaaaacgaatcgatagtaaaattacagttgccttctggcacgactatgctttgcaaggaagtgtctgagcaaattgtccataagatggaatcgcttggctgtgattactcaactgcaattcaaaccctcggatataagtacgcagaccaaagcgttgaaaaatatgacacgctcccatattacggaaaagttcttgtcggttcaacaatgggagccactccttccgcagatgaaagcaaccctgagaaaaaatacggaaaaataagcaatccaactgttcatgtcgctcttaatcaaacgcgtgttgttgttaacgcccttataaagcagtacggaaagccggcgcagattgccgttgagctttcccgcgacttaaaggcgagccgcgaggcaagaaacgccattcagaaaaaacaaaacgagaataaaaagcgaaatgaaatcacaaataaaaacattcgtgacgcgaacccaaacattccatatccaaatcgcactgaccgcttgaaatatcggctatgggaagaattgggagcggaaggccttcctagaaaatgcctttattgtggaaaaattatttctggaacagaacttttcagcaataataaaattattgaaatcgagcatattcttccttacagcagaactttgcttgacgctgaatcgaatcttaccgtagcgcatgtaagttgcaacgcttttaagaaagagcgttcgccctacgaggcttttggctccaatccaaaaggatacaattggcaagaaatattggagcgcgcaaaccaactaaaaagcccggcaaaacgaagccgctttgcagttgacgcaatggaatcgtttgaaaaagacagcggttttatcgcgcgacagctgacagacaacgcctatctttcaaaaatggctctcaagtatctaaagagcgtttgcgatgatatttggtctgtaaacggcggaatgacaaaattgctcagagataaatgggaaattgattcaatcttaaagagaaagattggcgacgaagaagttgcgcattttgaacttaaagatgatatgattggcgaatacaagaaaaaccgctacgaccaccgccatcatgctttggatgcctctgtaattgcattgatcgaccgttcgcttgtaaaagaaatctcaacgcttaacgcccgctcccttaaaaatcgcattgaggttccgcagatgtcagttccgcgattggaacttcaggaaaaagtaaaaaacattgttgtcagctttaagccagaccacggagcggaaggcaagctttcaaaagaaaccttgcttggaaaaattaagcgtgaggagttaattgacatttctaaaatggaagtcacagacattccgcttataaaaaacggcaaagttagaaaagattttgaaaatgcgcttgcggaaaaactcgacatcaagcttgtcagaaaagagcttaaagatgtttatccgcaggtaaaaatctacaaagaattctttgtggctcgcgcggcaatatcatctctaaaagaaaacaacattgaagacatcgtggatgcaaagattcgcgcaaaattgcaagaatttgtttccactcaaaagggccaaaaatttgaaagcctcttggaagattttagcgaccaaactggcattaagaaagttcgttgtttaaatcgcgtgcaaactcctattgtcatcaatggcgacgttccgcgctatcttgcgccggaagattattttgcggcgattatatggcagcttccgcctaaaaaggatggaggcaaaacaacttatgaagcccaatatatacgcagaacggaagtaggcaaagacaacaagccaaagacagaagtgatagaggcttggaaaagggaacatcatcctgccgcaaaaaatttaggtgttttgcataaaaacgattaccttgaatttagtgacggcggaaattggtataagtgcagggtggcaggatatgctgcaacaaataataaacttgatataagacctatttattccgtgacaaattgcgccgactggataatctcaactaatgattatcagcttgagccttgctggaaattgcaaaagactcaaaattgggtttcggtcaatgtcctttttggcgaaaaacaagctcgctttatcactgtaaatccaataggacgtgtctttagaaaataaaggcgcaaaagcctttggtttttgcttgacaattcagttgagtgttgtataatagtaatcacttgggctggtcgaaagacccgggtccaacctactaggcggggaaactccccgccattttttttggagaatgaatgaaaaaactaagcgtctttgttgacgaatcgggcgattttggtgaataccaactgcacagcccctattatatcgttactatggtcatccacgagcaagacaaagacattggatctcaaatagacaagcttaataattcattaggaaatatgaatcttcctaaccatacgattcatgccgaaccgttgattcgcagggaagaaaattacgcgaatgtgtctccaaatgagaggcggcgaattttttcttttttgtaccattttgttttaaattgcgaaatccgctataaagttttcatatttcaaaagaagaactatgattctacgttaaaaatgcaagctggcatgggacgcgaaatggattcattctttaaagagaacctttcgtattttcaaactttttctgaaattgttctttattatgacaacgggcagcacgagctgaattcattgctgaatgttttgtttgccacgaattttacaaattacgatattcggtatgtaaagccaagtgaatacaaattgttccaagtggcggatttaatttgcgctgttgaattgcttgcccacaaattgcaaactcaggatttcactcgctcagaaaaattgatttttcattcaaaacgcgactttaaaaaagattttttgcgcggggtaaggttgaaatctttttgacgtatttttgttagtaggttgacaggacaaattaatcagttataatcagcttgtgcctgagtagtggtcggtaagagttgcaggttgacaggacaaattaatcagttataatgcttcgtcgttgaggccgacgcggcttcgggttgcaggttgacaggacaaattaatcagttataattgtcgtctgttttctttgagtaggctttccgttgcaggttgacaggacaaattaatcagttataattgatttagctggaagaattaactgaggtttgttgcaggttgacaggacaaattaatcagttataatagtcgcgcatgtctgacggcttttgcgacagttgcaggttgacaggacaaattaatcagttataatgctgctcctcaaaatccgcagcaccagcgtgttgcaggttgacaggacaaattaatcagttataatggaatgttcataatcaagtcggacaatccggttgcaggttgacaggacaaattaatcagttataatgattaaaaagaacgcagacgctttttgccagttgcaggttgacaggacaaattaatcagttataataattacggcaatctttaacaagcccatcttgttgcaggttgacaggacaaattaatcagttataatatacacgtgaaaggaaagcgaaacttataagttgcaggttgacaggacaaattaatcagttataattattttgagcaatatcgttgtaaagcttaagttgcaggttgacaggacaaattaatcagttataatttgaaatagcgactgtcggagacttgtcagttgcaggttgacaggacaaattaatcagttataatcggaaacgccttaaaggattatcattgccagttgcaggttgacaggacaaattaatcagttataataggccgcctctagtgccgtattcgccgcaagttgcaggttgacaggacaaattaatcagttataatgaatgattgtaattcgacatggcggaatatgttgcaggttgacaggacaaattaatcagttataatctccaagagatgaaggagaaacgcctgaacgttgcaggttgacaggacaaattaatcagttataatgatttaaaacttcaaggtagcaagccaagtgttgcaggttgacaggacaaattaatcagttataatagaaagtgtcagggacaagagaagcaagagttgcaggttgacaggacaaattaatcagttataattgcaaactctgttcagttgttgggcggaaagttgcaggttgacaggacaaattaatcagttataatttccatttttcgctcctgatgaaattgacagttgcaggttgacaggacaaattaatcagttataatcaggaaaaacaaaacctatcacccacacttgttgcaggttgacaggacaaattaatcagttataatagattatgggaacgcaaagatagtgttcaagttgcaggttgacaggacaaattaatcagttataatttgtcgtcttcaattatttcaaacactttagttgcaggttgacaggacaaattaatcagttataattttcggtgctacttggcttgaaataatcctgttgcaggttgacaggacaaattaatcagttataatgcatttctagcggattcgcctgctggcggagttgcaggttgacaggacaaattaatcagttataatgagcgccaagaagacgaccacgatttttatgttgcaggttgacaggacaaattaatcagttataattataattttggttcttatcggcttggccgcgttgcaggttgacaggacaaattaatcagttataatcttgcctttgaacgccaatcagcaatttatgttgcaggttgacaggacaaattaatcagttataatgccgcctatctgctctgttttatcttcgttgttgcaggttgacaggacaaattaatcagttataataaattcatatcattcacggaggaaggcttggttgcaggttgacaggacaaattaatcagttataatctaccccgacgtttcacgcgaagaatacctgttgcaggttgacaggacaaattaatcagttataatccgtgtatgaagcaagcgtcgcctagcctggttgcaggttgacaggacaaattaatcagttataatacgtccggcgtaattctatttcgtacaaagagatagaacgcgtcggacgtgttattttaaaaagaaattcagaataaaagcagttgttgggattctttttttttgacttttttggtggccttaaagctgataatgttctcatattgcctgtccgttatggtgatgatatcaacttttccatcgtcgggcaagttattttgtatcaatttataatatttttcgcaagcgtcttttccagaaaagagttttgtataaattgaatactgaaccatggcaaaaccattgtccagtaaaaaatttctaaaatcggtcgccgctttgcgttccgctttctctacaaccggcaaatcgaacaaaacaagcatccacataagttcatacctattcaatgctggcgtcgccacagtcgtctcctttccatattggaatatcgatggccgcttttccttcttccagcgcgtgaacataggaagccgtcaaatattgcatgctttggaaggctggagaattgccttcagaagtatgaacttttacccataaacagtctgtcaatttctttttatgctctggagtcagttctgcctcgtcgtttatttcaagactgtacacaatgcaatctactatggggcggtaaatttcaaataagtcgtcagcgagacaaaattgatttaaatgattgtcgtggtgcagtccaagcgacggaagcaggccgcttgagcaaattgcgcgcgccatagacgctctcattaccgcgtatccataattcagaaaggaatttattccaggcaaatccctgtcacgaataaagctttcgccaaaaagactcttccaataaattctggcggcgtaagcttcgcgattgtcaggatcgcctgattttaccatcaatgcgattttttcaagaagttttatattgtctttttttttgcagagttttagacaaagcgcttgattttttattttttgaattactatttgctgccatattcttttcttaaatggttctgaagcgtcaatttgtttttttagaattttcgcaaacaagtagtgggaataaacaggaagaaccatgctttgcggcgaataattttttccgcacagcactgttacacagccgcgttccgcaagagcatttaaaacgttttttgaaagcgtcgctccttgcgcggagacaagcaagacgcctatgtcatcaagcggtacttttccaagttcctcagctccgctttgaatgacaataaagccgcgactaagagataaatagcgattttcttcgaaaatctccagtaccctgttcagcacgctttaattatcggcatgttgaacagaatttacaattattttctaaaggcgcggtcaaacaaaaatcttgacgcctctccccttactcccgttccgccacgcggtagtcccagttgtgcttggggtagcggcccttcatctccttgcaaatttccggccatgtgttttgccaaaagttttccaggtcgcttgtgatttgcaggggccgccgcgcgggcgaaagcagttttagcaagacaggaacgcccatcacttttggcgtctcaaagcagccgaatatttgttggattattatttctatcgtcggaacgactttttcgccgtcaacgtaaacgacttttaccgcgcggcctgtttgcaattccagttttgacggaacctttcgctccacctcggaaccgtcgtaaaaataatatagcgcgtcgtaaacgttttgcgcggtgattttgtttccggtcaaaaatggggccagccattccgcggcgttttgcgaaagccagtttttgtcaaagcgttttggcggaactgtgtcctggccaagattgccggcggcggaactagaatcgtttgcaagactaagattgccgccgcccgccgcggaagcctgctcgtaaaattttcgctttaccaaaaaggcttttgtcttttcgtccagggggagcgagtcaaagccgtttttttgaaccgaaaagcaaagcgcgctttttatgtcttcgtctccggccttaagcgccttttggctaagaattatttttccgtattgagtgaattccgtctttactacttttccgttttcaaaatcgcaaatgacatttttttgcgcgcggctataaatccattcttcaagttgaacggaatccagcgccttgtatgagtaaatcgcgccttgcgagcttcccgcgtccgcttccacggccacaatccattccgggccaaggccgcccttgtagtcctttagcgcggcaaggcggcccgacggaaactggtagacgcccgcgtccgccgtcctatgcgcgagcctgtcgggaaagcccgccaacagcgggtcgggaggcggcgaaaactccgcgcctttttgcaagcccaagacgcgagcgccgttttctgtcttgcccgcaattcgcgcgccggcttcttcgaggcgccgctctaaatttagaacaaactttttttgcaaggccggcgctgaatccttgtattgcgagtacggaaggacaaaggcggcgccgccgtaaatcgcagcgcatcccaagcgaggaccgattccaagcctaagagccgcccgccccaattgtgtaatctggccgtttttgtccaagcagttaagcagccgcaaaagctcgcgcgcggtctcccacgaagacggggcgggcgggtccagccattcaagcgcggcggggtcctggcttccccattcggcgcattccaaaagcagctcgcttaagtcgcttcttaaaatttccgggagcggatttttcgaccgcggctcgttctggctccacaagcggacgcaaacgccttcttgggtgcggccggcgcggcctgctcgctgcgcggcggaaaattccgattcgctcattgtgaccaagcgcgtcgcgccaacgttgttgtccatcacgctcacgcgcgaaaggccagagtcgattacgcaaacaacatcgggaatcgtaagcgacgtttcggcgattgaagaagaaagtattacgcgcgttgcgccgggctcggcgggcgacaaaatctttttttgctcgtcaaaggacacggaagaatgaaggcgctcgatttgaacggcgggcgcgccgccgatttgcgccgcgtccgatgcgaggccgcttagctcggaaaaggttttgtttatttcgtaaatgccggggagaaagacaaggattgagcggccggcagttttggtcttgcaatcagtatcagtcgcgccggcagttttaggcgtggaacaagttttggtattgccatcagcattggtcgcaagcccagaaagcgcccagcggacagcggcggaaaccgaaaggtccggcttgtaaaaaaattggacaggaaaagtccggcccggtatttccaggacgggcgcggcgcaaaattccgcgattctcctggcgtcaattgtggccgacatgatgattacaaacaagtcgtcgcgaagctgcatcgcttcctttaaaaacgcaagcgccaagtcggcgtttatcgacctctcgtgaaactcgtccagcacaacgacgctcgcgtcttccaaacttggatcggcttggagccgccgcgtcaaaatcgcttcggtcataacttctaggcgcgtggactcgcttgtcttgttttccaaaaacactttgtagcccgccgtttgcccaacttgctctccaagcaattccgccactcggcttgcgacgttcaccgcggcaaggcggcgtggctgcagcatcaatattttttttgggaactcttccaaaagcgcgagcggaacggcggtagactttcccgctcctgtttccgcggtcaaaaccaaaaagcgcgacggagacgattttagcgcccggcaaatttcttcaaggtgagaatagattggaagattttttattcgctccgtgccttttagttggccaagcgtttcaagtttctgcattttgtgccgttcaatatggtagcaaaaaaaaagccctgaatcaacttgctatagcaaaaaatcgcgaagcgtggtannnnnnnnnnnnnnnnnnnnnnnnnnnnnnnnnnnnnnnnnnnnnnnnnnnnnnnnnnnnnnnnnnnnnnnngcgagcggacagacaatatttcctctagcaaaaccacgcgaagcgtggtataataaacagcaaatgacacgcaatgcaaaaagcataaaaattgccgccgcgctggctcttttttttgccgcgcaaatttttttctcttgtggacggaacgcttccaacgcgctttacgactataaagaatttcctttggagcggaatggaatcgcgctgcatttggattgcgtccagcttgccaaaaaaagttccgccaaaagcgacaaaggccaaaagaacattttgcttgttcacggcgtgacatactcttcccacgaatttgacatcgactacaaagactacagccttgtccgcaaattggcgcgcgaaggctgggcggtttggcgcttggacatagcgggctttggccgctcgcaggaagtttccgacggctttatgcctgattccgactacgcagcgttggacataaacgccgccgtccaaaaaatcgtggagttgaccgggcaggacaaaatagacgtgcttggctggtcttggggaacggttacggtaagccgctttgccgccgcccacagcgaacatataaacaagcttgttttgtacgctccgattatgagcggcgttggcgatgtaaaggtgaacgagccgttccaccacaacacctgggagcacgcggcggacgactttgcgcgcgacaaaaaaggcgcttttgactattcgattgccgagcgcgagctgatagaaatatggtgctccagctgctggagatacgacggcgaaaaaagtcccaacggcggccggcgcgacatttgcgttccccaggcaaaagagctgattgacttgacaaaaataaaaaatcccacgcttgtgatttgcggcgacaaagacccttacttaaattacaagcttgtaaaaaagtcgctcaagaacttgcccaaaggctcaaggctagagatgataaagggcggctcgcacgtcgtttttgtcgaagcgccctactaccacgactttcaaaagcggcttatgaaatttttggagaaatgaaaaatgtacacgcgcgaaataacgccggctcccgaaaaattgattcaaaacggaaagccggtttttggaacgttcgacagccttcccaaaaaacttgacataaagggcgtgaccacgccttacgcgggaattccgtatccgccgattttgtcccgcctaagaatccgcgcgcgcgcggtttacgtttttagcgtgggcgattacgttggcgtggtccagttttttgacaacaaaattttgaacatggccgagttcgcgctgtggaacaccaagcggggaaccaaatacgtttaccgaaaatttttgggcgttcgccgcaagatgattccgacaaaattgggcgcgggccgttgttccaccagaacgcctggaaggcgcgtgcgattttcgtggaaccaccagagcggccgcttgcttttggcggttaacgtccgcggctttagccacaggccagagataaaagtattcgcagaaggaaatttcaacgacgcggcctcaaaggaaatcgtttcggtaaagcccgctccgacgacgcgccgctgttccgccacctggtacgcgtccgttccggttacgacaaagtttgaagtgaagggcgttgaaaaagtcgccgccgaaaacgcaaagggcaacagcctgctttttgtaaaccgcgcctactacaagtttgtaacgcgcggcgagtcgatcaccgcaagcggcgtgattgacggaaagaatgtttcgctcaggctttccaccacaagccttgacgctcccaacacaagcaaatacaacgacaatgcgctttttgttgacggcgccttcacaccgctcccgcccgtatgcataacccatccctttggaatcgcaaaagactggaacgcgcaagactacgaaagcatggtggacttgtccttcgttccgcaaaactcatattcgcgcaaagccaactttattttggtcaacgccagctatgacaccgtctttggctttttaaacggaagcgtcctccgcgccgacggaagcaaaatcgagctccgcgacttccccgccgtcgctcaaatcagcaggatacggctataggatgccagaaatcttaatcggaacaagcggctacgactacccagaatggcgcggcgtcttttatccagccgaattaaagcgagccgattttttgccatactacgccacaaggttcaacgcgctggagcttaacaacactttttacaatatgcccacggcggagcgcttgctaagtttttgggaacggagcgggggcgcgctaaagttcagcgtaaaggccaaccgccttttgacccacgaagttggccgcgactggcaaagcgccgcacaagattttcgctccgccctaaagccgctcgcccaaaacggaagcctggcctccgcgcttttccagtttccgcaaagctttcattacaccgaccaaaaccgcctttacctttccgcgctgctggcccagtttaggggccttcctgtggtggtggaattccgccacgccgaatggatccgcccgtccgtttttgaggggttttttgagcgcggcgcaagccttgccttttgcgatctgccggaattgaagaaccttccgaacaaaaactgtttgcaagcccaagaaggaggccttccctttgccggaaaaatcgcctacatcaggctgcacggccgcaacgcctccgcctggtacgcaaaagaaaacgacgcgcaagaaaaagaatgccttcaagaccataacgcgctgccgggactgcccgcaagccccaaaagcgccgcccatgaccgcaacggctccgcgcgctaccgctacgactacagcgacgacgagctttccgagtttgcgcccgtcatccagcaagccgccagccaaggccgccaagtccaagtgtttttcaacaatcaccccgacggcagc

SEQ ID NO: 822 - DNA, 23312 bp, synthetic construct
  source 1..23312: mol_type = other DNA
  variation 8567..8568: note = n is a, c, g, or t
  misc_feature 1..23312: note = Synthetic
tctgtgctgtacaaatctatggcgcgcttggcttttgatgcgagtacgctgtcagcgttccgcgaattcatataatcaaaaagaaatgcacagtttccttgcttgattgcattgcttacgtcagtttcgtcgtcagcaaaaactaagaagatgcaaaaaagcataaaaagtgctgtgtaaaatcttttcatcgataatccttaaaatccttagaaacgcgccggaagtttcaacatgctttttggctgatttcttccggctgaaatagtcttatgattatcgtcaagaagggcgtgtttcttaaaaagggcatgtctattttggattgccgtgccattcgtatcggagcttcaagatggcacggcaatatcagttaatcattagaaagctgcttgtgctgcaatctcagctttggctgtgtcaaagtcttgctgagaaggaaaccacggatagctttcagttttatcttcagacaagtcttgaatgaacttggctctgttgcatttcgattcaatgccgttcctttcaagcttggtgataatccatttgtctttcaagaaagtaagctcaaccgaatctttgtattcgagtatcgttatattttcagggtcttctgtcataacaacgtaatactcaacgttaaagctttcggcagcgcctttttcaacgtctgtaagcggaatcttctggttgttttcaagccagtctgcgtttgtagagctttcagcgccgtttatcttgaggtgcgtaatgccgtagatgcttgacctgtcaggcgttcctttgagaatccattgagccggtgtaagaaagctcaaaccctggttataagcagactgcatcttgcttgtaacataaagatttgtcgctatgttcttaatctgcttgccggcatctttggtgatgcactcttcgaggtcaactgtttcaagatgatgaagcgaagtatagaacgattcaacgacttgaacagaagttaagcctcttgttgttgggcggctaagctctgtgttgactatagaaattgtgattaccgccgcaatgacaactgacagaacagcaattgctatctgcgtaaaatggcggcggatatagcggcttctttttatgcgtgaaacaagctttgcgtctgccttgtctttggcttctttttttgcggtctttgtttcaggcagatagactgcggcaatgtcttcgccgaatatgcccaaaagccgcttgaggctagggcggaatttaatctttcctttaagcgctgtgtccaaaatttcagcgttttcttttgagatagaacaaacatattcagccggaacaaagtagcagtctaaaaagtcttctgtcaatgcttcaggcgaatctgcattaaaagggcggcggccggtgatgattgtgtaaatcattacggcagcagaaaatgacggcatctgctcaattggcagaataggctgccgccagctttctgtgtattcggctgcttctttttgcgagcgcattgcgattgagcgcgtaacgagcagctctggcaaaaacaagatgctgccgtcatcagcgtagattatgccgattgcgccgctgtctggcaacgtaatgtgctcaagctcggcagccttcattgcctttatgatgcggaaaatctttttccaggagtcaagctgtgtctggttaggctttgtgcaaatttcagtgtctttgcacgcatcttcaacttctttgagaatctgataagccgtaattccgctgaaaccggggccggaaagcgagaattcgccgctttcatctgtggcagtgtcttcaaagaaccatttggaaaattcaaaagaaccgccgtcagcttcttttgcgacgtatccttcagctttcatgtgctgcatcatgtttgcctgtgcaaattctctgtcggtcattgctgtatgcagaatgatgcggctgccggtttcaataatcttgttcatgtttatctgccttcagaagagtagagatacttgaaatattgcatgtctgtcgaataggttgtgtcaaacttcggcagtgtctctttataagattcaaggctcttccagaaagcgtagaattcagggtctttggcgtatgcttcagcataaatgcgcgtagcttctgcatcggcagcacctttcacttcttctgcagtcttatatgcttcagaaagaattgcgcgcttttcgttttcaaccttaccaagccattttgctttttcagcttcaccttgtgagcggtagaactgtgcaatctggttcctgtcttttatcatgcggctgtaaacgctttccgtcatttcatctgaatatttaatctgtctcggcacgatgtcgataagctcaatgccgtagtcagtaatgcctttgcgcgcttcttcagccatttcaagactgagctggcggcggcctttctgcacgttttctggcgttgttgaagttgcttcaagctcgcggatttcctgtgtttcggtttcgccgtcagacggaactgcatgatttgtgataatcaagtttgaagagcgcacaacttcgttcaatgtgttctggccgacaatcatgcgcgtggctgagtcgataatgtcgctcaagcggttatagcctgtgtcgagcgtcttgaaagactgatagaacaggcgtgggtcagagatgcgccaacgtgcggttgtatcaacaacgatgtactgcttttcttttgtcggaatcggctcagggtcgccgtcaagcgagagaatgagctttggatagacaatcacttcatcgatgaaaggcactttgaagtgcaggcctgcgtcttcatgtgatgtgatgaactgaccgaagcgcgtaacgacaacttgagttccttcttcgacaacgaagaatggtcccattgcaaggaaaattatgaccaaaacggcgattacgcccaatgttattatagtctttttcatttcttttccgccttgtctgttaagtttttgattggaagcatgttgtcaagcttgctgtctatcaaagtgctgttctgctgttcattgaagacagattccattgcttcaagataaagccgttcgcgcgtaactttcggcgattttctgtattcttcgtaaaccgcattgaaacgggcaacatcaccttgcgccctgttgatacgctccgaagcataaccttcagcaacaagcacctgctggtttgcttcaccttgcgcgcgcggaatttcggcgttgtagacttccttaccttcgttgataaagcggttcttgtcctgaattgccttgttcacatcgtcaaacgcctgctgaacgccttccggcggaacaatgttctggagctgaacaagaattacgttaatgccaagaccgagctgcttgaagttttcgttcataagctcaagcgcggaagtctgaatcgctgaacgttcagattccatcgtgtcaaaagccctgtcgccaacgagcgtgttgattacagactgcgaaatgtcgcggattgtctgcttgcgctcctgcacgttaaaaagccatgcaaccgggtcaacgattctgtattgaatgctccactcaacgtcaacgatgttgaggtcgcctgtaagcattgtagattcttttgtgatgccgttcttatattgattgacctgaccggctttgattgtctgaaagccgaactgctctgtctgaacgacttttatcggcacgttgtagcttttgtctatgccgaaaggtgctttcagatgaagacctgcaccaacagtcttgtagtatttgccgaagcgtgtaatgactgcctgttctgtgtcatcaactttgaacattgtcgttcctgctaatgcaagcaccagcacgatgatgaccgcaaaaatgagcgttgatgctccgaatttgcttttctttggtttgttttcagtttggtccatgtcgggctcctaaaaaatcaagatactttgataatgtaaatatacgaataaaagcataaaaagaaaaggtattttgcaatagatttatctacataataaagatgaatctagcaaaataccaagtttgtgctttcagcacaaacttgtaactggtgcacaacgatgggttgcaatagttttatcttccgaaaagtttaatctagcaaaataccaagttttccgggtttgcgattgagtttattctatgccaaaagcttttcttgcaaaccctgctagttttgcttgcgcaaaaactagcattggcttttgtatggtgtgccgtcatccgtcattgcgagccgaaggcgaagcaatccattggcgcattacgcttataatataaaagagcctcgtaatgacggggttgcgtttgagtttgttcaatggcaaggggcttatctgcaaacccggcaatctttacagaaaagcttaatctggcaaaataccaagttttgcttcgcaaaacttgtaactgatgcacaaatgggtgttgcacagcgtcattccgaacttgtttcggaatctgcgtttcgcaacggcttaatctaaattatttaagtgcagctggcgaaacgcgtagtttctgctttcgcgaaaactacaaagattaaatccagttttcgcatagtgaaaaggctgaaacttgtaaaacaacaattttgtgcttgcacaaaattgaaacatggggtattctagctttagacttataatctaatgtcttttgttataatgaaatgatattttttagccgttaaacatacaagtgagcttaaaaaggtttaatcggagagtattttgaaagatgataataaaccgaatttatttatatacattctcttaacagttgtatttgtagttctgattgcttcctgcggcggtggcggaggaggtggtggtggaatggtcgcctttgcaccggataataatatgccgaacaacggcggagatgcaggcggctggggcacaggcacagatactggcggtggcggtattggcggttcaagcgtacaagaagacaacgccacacttttaatcggccaggtagcggctcttgatgtaacgaatgtaaacattgtgctcttcgtcaatggtgagcgttttgagataaacaacgtaaatgaaacaacaacaacttcagtacttccaaaaatttcaataagcgatacagtttctggtacagcatatatttatgttgccggagaatcgtctcctcgtgaagcacaactagatccgacgacaatcggatttcacaacactctgaaatttaaagttccgtatagatatgaatgtattgaccgcggaacatctgaaaggcagggtacatacttttatgcagacggaattgacctgacagatttgacaggtgcgcgcgttgcaggctggcttgactcaaacggtgagatgcattacggcagctgcatcaacggcgtgcgcggcgacattacgcttacggctgtgtacaaagttgctgttacaagcaacgtaactgaaatatctaaagcgagcgcattgattacgtcgctcggcattacacaagattcagctggaacaccagtaaagcctgccacggcacaactttcagtattcggaagcgacaactacacatattctagcgacgcgccaagcaagattgacataagctcatctggtgttgtcagccttgcagctggttatacgccgccgcttgcaggtgaaaccgtaacaataactgtaactgacaacgatgattcaacgctctttgccactgtaaacataacgctaagcagtcagtctgtctgcgcgatttatatagataaagccacatgtgatgcaaacggaacgccgggctatacaaagattcttgacaacactgtaagcactgctgtgccgccaagcatgaatgttacgccttattctcttgttggtgcaacatttgaagcacagaaaggcaaaacaatttccgcatggcaatatcagtcgtctccatacgttccagttgccagaaacgcaagctggtcagttgatggtgacagaaaaatctatgcaggctggccgattgacggcattgctacaaccgaaatagttttgtggcgttttacagatactgctacagacagacaggctactttaacaagacctgccggttcttatagtgttgattggattggggctaatggaacatcgataagcagctgtcctatctcacatgctctttctggcacaagtgatgtaaaaattagtgtaactaacaatgctaatttatctgcacttgcagattcaaccgatgcgggcgtttatcatgcgacataccgtgtcaaacttcaaagtgaccctgcaagctttacagacgttcctgttacggtaaaagatgctatgtatgttgctgaagagaaggatgctaatggtaatgtaataggcggagaacttcgttttgccgcaggtcaaacaattccggctagccttacgataacacctgatttagtgccaggctatacaataacaaagattgcagccaacgctttcaagaataacagcacgataacaagcgtaacaataaacggtgctatagcgataggagaaaaagcatttgaaaactgtagcaatcttggatctgtaactattaatgatgtaacaggttttggatggggtgcattcagcggtacacatttgaattctgtaacaataacgagtttaggcacaactacttttggcggatttgattatgctgataccggcaccgcaggtgtgataattcctcatggtgtaacaactgtttctggttttgcagctgcaaaggttggaagtgttaccattccaacatcagtagatacaatagcaggatgggcttttgatgatgcaacctgtacaattaattatgcaggaacgataacacagtgggaagcaattaataagattaaaggaaattccagcgatacacctcctacaacggtaaattgttcaaatggcgcttgtcaatactggtctggcacggttggaagttattaggggctgtaatgtacacaagctgccggttttgcaaagcaaaagcggcacttttcgccagatagacttctatcgtggattaagctgctgcgaaaagaagattgcttcgtcgcttacgctcctcgcaatgacgcagtgcgccgggatggcgtacacaagctgccggttttgctctgcaaaagcggcacttttcgccgaacagcctccatttgtagattgtgcttttgcgaaaagagagatacttgcaaaaaactgaaaagttctatactatagtaatgcttatctttataagtgggagtgttttttaatgatttttccattggagcaattggttaaatttactggcgaagatcagaatatttacgagattacatgtgcagcaagccaccgcgcttatcagctttctaagcttgaagaccctgtgattgcacagaacgacggcaaagttgtttcaattgcggcacggcagcttttcacacagcagattaaatacattcgggaagaaaaataatctgaaatgacagtgcaagccgtacaacgtgcggcagcttatatctggagaatcttttgaaaattccagtgcttgtcttgttcgggccgactgcttccggcaagacttctttattggagcgtctgttttcaacggacgctcaatctatttttgcgggcaaggctgaaatcataagcgccgattcgatgcagatttacaagggcatgaacatcggcacagcaacgccttgcgaagatgagctgaaaaagcttccacacaatctgataaatctttataacccagacgagcagttcggcgcaggcgtgttcgtaagcagcgcggacgaagccgcaaagtcaatctacgcgcgcggcaagctgccggttcttgcaggcggaactgcgttctatatcaagaattttctttacgggctgcctgttacgcctgaatctgatgaaaaaatccgccttgaattgaaggaacaaataaaaacgctcggtgcagaagcaatgcataaaaagcttgagcttgccgaccctgtgagcgcggcgcggattcatgtgaacgacgaataccgcattgtgcgcgcgcttgaagtttatgctgcaaccggcaggccgctttcaagtttcgggctttctgaaaccttgcgcgagccttatgatttttgcgtgcttgccattgagagaagccgcgatgaactttatgagcgcataaacagccgcgtcattcagatgatgaacgacggcctgcatgatgaattttccgcacttgttgcgcaaggctataaggccgaagaccccggaatgcaggcaatcggctaccgcgagtttttcatcattgcggcaaagcatggcgtgcatcctgtagatgcgccgcttgacgaagtgactgcgcttattcagcacgactcaagaaaatacgcaaaacgccagatgacctttttcaagtccattccctgtgcaaagtggcttgccgccgatgatgcagccgcatttgagagagaagttgcgcagtttgttggaaagacaggatggaagccgaaataaagaaaaaaaagccgcagaacccttgcagattctgcggctatattttttttaagtcttttcaaaatgaacgaaccccgacgcagagcgtgcggggtatcgttcgttctgctaaggaattnngtattaaaccctcggcacgaatcaatttaccttaacaggtatgtcgtaaatcatttcttttatagtcttgtttatagttttgctgtggccagatgcagtcctgatgactataaaatatgacttaccgctttcaagcgtggcaggaagaattagttcctgataggtatgggtgttcttaaaaaagctagaatcatcgattttgatccattcggcttcattatcgttgattttgccgttgtcgttctgcggggcaaaatacaagccgacctgttcctcgtcaccagcaattctcagattgcggcctgtaatgcgcaccggctgaccggcggttatggtgcagtctgttttatgtgttgacaagtcttcaatgcggcttatctgcggcaatgtttcttctggctttgccattgagatatcagccttgcttattgctttcaaagcttcttgagaaggcgtgaatcctaatgataaattcggaatttcagaaatattagggttagaagacggaatgtttccttgagcgcaaggatacaaagttccaagttcaaaaaggttgatggctgctccaagagcgagcagttcaagaatggcttctttgaaaagcataacagttgctacaagcgatgcttcgtcaaagactttggtatggttaaggattgttgcaattacgttgtccatgccggcagttgtgcgctgcacttttgcgtaagagttgtctccttctttaagatagttcttatgtattgtaacgtttactgagccacccaatgtttgaattgtattcgtattcatattgaaacctccaaagtacaaaattcttaaagttattcaaaattgacatatttgtttttccttaaaagtaattcaaaaagtgctgaaataaagaatcaacgattccttgtgccagcaacaacttgcgtccgcacggattatctatatgatgcatccggacggacaatctgcaattgttttcatgtctgcgcctcctagcggtaattctgtatacatgaacaaacgttgaatagggcagttacatcaggcacatgcacttttcggagttttatatcaaattttaatcgaatattaatctacatcgatggtagcaagcgcatctacattggatgtagattggaatctaccatcgatgtagattagaagctaccacaattgaagattggaagcttcatcaattgaagattggcatgattgcatgatagaagaaattttagtgattctaggatttaaaaaaacaaaagagagccgtagctctctttttcatttgttctatttatatttcagagaaatataaaagcattttgcagagtcataagactccttgttagcaggttgaccagataaattaatcagtaacttaatagtaagttatgaagtttgatttgtcaattgcaaatttagatgctatcatagatttatgaattatcgtttaggtcttgatttaggaacaaactcaattggttgggctgtttattctttagataatgaaaaagagccacagaatcttatagatatgggcgtccgcatcttttctgatggccgcgacccaaaaacaaaagaaccgcttgccgtagccagaagaactgcaagagggcagagaaaatctatctaccgcagaaaactccgcagacgcgctgcttttagattgttgcagtctcaaggtttgttgccaaaagacaaagatgaagcaagaaaacttaagcttttgaacccatatttacttagaataaaagctttggacgaaaagcttgaaccttatgagctgggcagggcgttgttcaatttagcagtacgccgtggttttaagagcaacagaaaagactctgaaaacgaagaaaccgcagaaagcaaatcaacaggaaagaagctttctcaaaaagagatgtgcacagaattaagcaaagcaatctctgaatctggctgcagaacgcttggcgaatttttatggaagaagcaggaagagcataacggaatccgctttgtgccgggcagaatgagctattatccgcttagacagatgtatgttgatgagttcaatgcaatacgtgcaaaacaagaaattttttataaaactgtcgattggcaaactataagtgatgcactgttctttcagcgtccgctgaaaccacaacagcgcggcaaatgtcagtatatgccagataaagaacgcacttttaaggctatgccttgtgcgcagaaaatccgaatgttacaagaagtacggaacatgtattatcagaatgcattggggcagaaaattccgattggcgaagatgaagaaaagataattcttgaattgcttgatacaaaggataaagcaacatttgatgcttttagaaaagctttgaaacttgatgcttcttgcacttttaacctagaatcagaaaaccgtactttcttaaatggaaacacgacagctgtaaagttgcgcagcaaaaacaggtttggctctttatgggatgagctgccgcttgaagagcaggattttattgtagaaacgttaataactgctgatgaagacaagcaggttcttgatatgcttgcaaagtatcagctttctgatgaacaaaaagacgcaattgttaaagttgtgctgccttctggcacaacaatgctttgcaaagaagtgtcggagcagattgtcaataaaatgataaaaacaggctgttcttacacagaagttgtacagtcgctcggctataaatatgcagaccagtctgtagaaaaatgtgatttgctgccatattacggcaaagtacttgtcggttcaactatgggtggcgatgcttcaaaagcggaatctttgccggaacagaagtacggcaaaatcagcaatccgactgttcatgttgcgctaaaccagacaagggtggttgtaaatgcgcttataaagcaatacggcaagcctgctcaaattgtaatagagctttcgcgtgacttaaaagtaagccgcgaagcaaaagatgcaatgatgcgcaagcagaacgagaacaagaagcgcaatgagatcttgaataagaatattgctgatgcatataagattgaatatccaaatcgtaacgacagacttaaattccgcctatgggaagaattaggaagcgatacaatgagccggaaatgcttgtattgcggcaagaatatttctggttctgaattgttctctaagaacattgaaatagaacatattctgccttatagccggacattgcttgatgcagaatctaacctgacagttgcccatgcaagctgcaacgctttcaaaaaagaacgttcgccttatgaagcttttggaacaaacccaagcggctataattggcaggagattcttaacagggctaatcagcttaagaacccagccaaaagaagccgttttgctatagatgcaatggaaacttttgaaaaagaaagtagctttattgctaggcagcttacagataatgcatatctttcaaagactgccagaaaatatctgcacgctgtctgtgatgatatatggtctgtaaacggcggaatgacaaagctgctccgcgataaatgggagattgattcaatactaaagagaaaaatcggcaatcaagaaattgcacacttcggcttaaaagaagaacagatagggcaatataagaaaaaccgctatgaccacagacaccatgctttggatgcttctgtaatagcactgattgaccgttctatggtgcagcagatttcaactcttaatgcaaaatctcaaaagaacagaatagaagtgccgccgatggcagttgcacggcttgagcttgaagaaaaggtcaagaatattgttgtcagctttaagccagaccacggcgcagaaggcaagctttcaaaagaaaccctgcttggcaagataaagcgggaagagctggttgatattgccaaaatagaagaatctgatattccgcttataaaaagcgataaagtgcgtgctgattttgaaagcagcatggcggagcttaaagacattaaagcagtgcgtaaagctttaaaagatgtatatccacaagtaaaggtctacagggaattctttgtttcaagaacagctgttacaagccttaaagaaaataatatcaatgatattgttgatgcaaagatactcagcttgattcgcaattttattgatttacacaaaggcgaaaaaatagaggacgtgctgcaaaagtttacagaaacaaagcataatggcaaatatataaagaaagtgcgctgcatgaaccgtgtgcagacacctatcgtaataaatgataaaattccacgataccttgcgcctgaagattattttgctgctgttatctggcaattgccgcctaaaaaagaaggggcaaagccaacttatgaagcgcaatatatccgaaggaacgaagtcggcaaagacaacaagcctaagcctgattgcttgaaagcaccgcatcctgctgcaaagaatttgggaattctgcataagaatgattatctggaattcagtgacaacggcaattggtataaatgccgtgtagcaggtttttctgcaacacaaaataagcttgatataagacctgtttatgcagttacagattgcaacgactggattattgcaactaatgaaaatcagcttgaacattgttggaaaccgcaaaaagggcataatttcgtttcagtaaacgctcttttcggtgaaaagcgggcaaggtttataactgtaaatcctatagggcgggtttttagaaatcattgacaacttgttcagtatgccgataaaaaagtatgctgaacagagttcttgaaatttgcaaagaaaaccgttatttatctcttaaccgtggatttatcgttattaagcatgattctgaagaacttggaaaagtgccgcttgatgatattggtgtgcttttgctttctgctcaaggtgtgtctttttcaaaaaatatattgaatgctttggcagaaaaaggctgcatcacaattctttgcggcaaaaactatgctccgcaaagcatggttcttcctttatattctcattatcattttgcaaagataataaaaaatcaaattgatgcttctttgccattaaaaaagcgcatctggcagcagattgtaattcagaaaatcaaaaatcaagcaatgacattgagattatgcaaaaaagaagatgtagagcttcttgagaagattgcttctatggtaaaatctggtgacagcgaaaaccgcgaagcatatgctgcaagaatgtactggaaagctctatttgggaaagattttatacgggataaagatcttcctggcattaattcttttttgaactatggttatgcaatcatgcgttctgcaatggctcgtgccgtatgctcaagcggtctgattccgtctttagggattcatcacgataacaatcttaatcaatttgctcttgcagatgatttgtttgaaatatacagacctatgatagattgcattgtatatcgtatttattctgatgatttgcaggagctaacaccggaaataaaacgaaaattaactgatgctttgtggataaaggttcatacagccgaaggcgattcaccggcctttcaaagtatgcaatatatgacagcttcttatgttcatgcattggaagataaaaaagcggctattgatttgcctgtttggacaggagatgaatatgaggcagttggaacttaataggtatgagcttatgtggatgcttgttctttttgatttgccagtcattgaaaaagaagaacggaaagctgctacggcttttagaaattttcttttggataacggtttttctatgattcaatattcaatttacacaaagcttttttctggcaaagatgcatgtgaaaaatattataggcttattagcaaaaacttgccgagcgagggcaaagtcgatattataacaattacggataagcaatatggcaatatcatcagctatacagcaggctcaaaagttcagaaaaaacagcagaatcaactgctgcttttctaattttttgacaaaaaaaatacattctttctatttgaaatctttacaagtaaacaaattagaaagaatgtattataactgattaatttgtctggtcaacctgcaacttgatgaccagttaagcaaattaactcctaattataactgattaatttgtctggtcaacctgcaaccgaattattttttcattgttcttcgtatggattataactgattaatttgtctggtcaacctgcaacaggattatacgctcggcagagataccgtagattataactgattaatttgtctggtcaacctgcaacgaaaatcagacattgtaaaagaagatttgtattataactgattaatttgtctggtcaacctgcaacaataaacgcgtacgcgcgtgcgcgcgcaatattataactgattaatttgtctggtcaacctgcaaccggtacttgagtaattcggccctgaaatttattataactgattaatttgtctggtcaacctgcaactccgtaatatccggcagagctctgtctgcaattataactgattaatttgtctggtcaacctgcaacgaaaaagacagagtaaacaatttgattgaaattataactgattaatttgtctggtcaacctgcaacaggcttggttaagtacagacacattcgacaattataactgattaatttgtctggtcaacctgcaacgcttaaactcttggccgcaatgccatctgtattataactgattaatttgtctggtcaacctgcaacataatatcgttcatccagcgcgccaggtacattataactgattaatttgtctggtcaacctgcaaccgccatcgctatagccttttacgtcaacaaattataactgattaatttgtctggtcaacctgcaacaaagacaaagacacaatgcgaagtctcggtattataactgattaatttgtctggtcaacctgcaactgaaaacagcacaaagggtgcttgtatttcattataactgattaatttgtctggtcaacctgcaacctaatggaagcggagctgttaagatttctgattataactgattaatttgtctggtcaacctgcaactacttgcagctcttgaaactgtatcaattgattataactgattaatttgtctggtcaacctgcaaccaatttattttttccaataatagcagattcattataactgattaatttgtctggtcaacctgcaactcatcattgcttacaagagagcctttttcaattataactgattaatttgtctggtcaacctgcaactttaaattcttaacatttcctaccaaaccaattataactgattaatttgtctggtcaacctgcaacctctgtcatcggcaaggtgcttctgattatattataactgattaatttgtctggtcaacctgcaacatggtagatatggggtggattcttaaataaattataactgattaatttgtctggtcaacctgcaacgtgttggtgtttctaccgttcagatggaagattataactgattaatttgtctggtcaacctgcaactgtactggcttctaatactgatgacgaccaattataactgattaatttgtctggtcaacctgcaacagaggtcttttaatgaagtattacaaagttattataactgattaatttgtctggtcaacctgcaacccgattccttggcggattatcttggattgcattataactgattaatttgtctggtcaacctgcaacgtaaattataaaaagttttgtaaaatctgcaagaattttcacgaaaaagcacaaaaaaaataattttgctttgatattaatttgtacctcaaaagaaaggagcaaattgattatgcaaaatgctgaaaacaccacaacattcaaaccgtttgatgagcttgtctgttcagacaatttcatgttcgcaaaggttatggaagatccgaaactttgcaagcaagtgcttgaaacgctgctcgacatcaaaattgagaagttgtcttatccagaaggcgaaaagacgattcaggttgcgccagatgctaaagccgttcgattagatgtgcacacagccgacacccaccgcgatttcgatattgaaattcaaaccacgctttacaccgaattgcgacaacggagccgctattatcaagatatgatggacgtagattatcttaggaaagggcacacctattcagagctaaaagaaaactttgtgattttcatctgccttgaagatttgttcgggcaaggcctgccgatttatacgtttgagaacatctgtaatgaagataataccgtaaagcttgaagacaaaacttacaaagtgttttataattgttccaagtggaaggacgttactcagcagcagaaatctgagctgctcaagtttttcctcactgacgagggcgatacagacctctgttcaaagcttaagaaaaaggagcagcgcgtaaagatgacagaaagagccagaaaagaatacatggactattgcattctcgccgattcccttaaagaacaaggcaaacaacagggcatcgctatcggtgagaaacgcggtcgctctgaagccaagcttgaagctgcacggaatatgcttatgaaaaataaatttcttcaagaagatatagccgattgtacagggctgtctcttgaaactgtgcaaaaacttgccgagcaactgaaaactgaaccagttttacaatagctcaaatctcccagctcaatctcatgttgcccaaaattgaagcttccgctatactttttgtatgttcaacagcatctacggcacggtgagtgccaaaaagcctcaaatgcttatgttagagaccggcagcgaagaaaccggcatcgtggaatggtgcttttctataagcgattcttcgcttgatgctttgccgcatgtaggcgaaaaggcgcgcgtgtacacttggctgcagcacaaagaagacagcatgaaccttttcggctttgcttcagagggcgagcgcgacactttttttgatttgatgaaggttgaaggcgtggggccaaaggccgcgctgaagattctttctaatataacagcttctgggcttgcgtctgtgcttgatgaaggcgatttggcgcgccttgagaaaattcctggaatcggcaagaaaacagcccaaaagatgctgcttgcgcttaaaggcaagctttcaattcaagaagacactgtgcgcgtgccggtcaaggcgctttcgccgtggcaagacgtaatgaccgcgctttgcagcatgggctacgataagcgcgatgtagagccgcttatagcgcgcctttcagctgaaatcgatacaaacttaagccggaaagagcaggaagatgcgcttttccgccgcgcaatagtggagcttgcaaactgatatgtctgattttgatgattcgcacattgtacggccagatttgaatgtgcaagacgataaagaaagttcactccgcccgaaatttttgactgaatttcaggggcagagccacataaaggataatctttcagtgttcatagaagctgcgagagagcgcggcgaggctatggaccatctttttttgattggcccgccgggtttgggcaaaacaactcttgcacagattacggcgcatgagcttggtgtagactttaaggtgacaagtgcgcccgcgctcgacaagcctaaagaccttgccggaatcctttcgacaattacggaacgttcagtcttttttatagatgaaattcaccggcttaagccggccatcgaagagatgctttacattgcgatggaagactatgagcttgactggataatcgggcaggggccgaccgcgagaactgtgcgtgtgcctataccgaaatttacgctcgtcggcgcgacaacaaaagccggtgctgtttcaagcccgctcataagccgctttggcattgtgcagcgttttgaattctacaacgttcacgagctttctgacattgtttgccgctcggcttcaattctggcggttgacatcgacaaagacgccgccgagcttatagcttcgtgctcaagaggaacgccgcgcgttgcaaaccgtgttttgcggcgaatgcgcgattttgcccagttttataagaaagaatctgacgccgtgccgcacataactatcggaatcgtaaaatctggattgaacaagcttcagattgattcgctcggtcttgaacgctatgaccgcgaaatcttgcgcagtataatcgaaaatttcggcggtggcccggttggtgcagaaactcttgcaatttcaattggcgagtcaattgacacgcttgaagattattacgaaccatatttgattcagtgcggtcttttgcagcgcacgccgagaggacgcgttgttacgcccaaagcatacaagcatctcggtcttgaaggaaaaatgaaacatgaagacgaaggacttttattttgatttaccggaagagctaattgcgcagcatccttccggcatacgcggaaacgataaattgatgcggctcgacaggttttccggcgagacgcaagattttaagatgcaggatctgcctgacttaatcgaaagcggcacggtgatggttttcaacaattcgcgcgtgcgccgttcgcgtctttatgcaatgccgcttgcaggtagtaatgccccgaaaggtgcagaagcacccacaaaagaagttgaattcctcatcttgcagagccttgattttgcagaacatgcgccgcgcactgtctggaaggctatgacgcgaaacgccaagcggcagaagccgggcaagtctttccgttttaaagacggctctgtcgcaaagattattgaaaacccggctgatgacggcacagaattccgtactcttttgttcgataagccgctcggcgaagactggttcgaaaaaaacggccacattccgttaccgccctatattaagcgcgaagacgttgacgaagacgctgaacgttatcagacaatctacgcaaaagagacaggctcggcggcagcaccgacggcagggcttcactttacagaagaaatgctcgcaaagctgaaagccaagaacattgagattgtctatgtgacgctgcatgtggggcttggcacttttttgccggttcgcgcccagaatatcgaagaccacaagatgcatgaagagcatttttttgtttcagatgagactgcaaacgcaattgaaaaggctaaggctgaaaaacgccctgtgcttgcggttggcacaacatctatgcgcacgcttgaatctgcttggagcgaagacctgggcggtttgaagcgcggctggcagtcaacttcgattttcatttatccgggctacaaattcaaagcggtcgacaagctttttaccaactttcatacgcctgaatctacgcttttgatgctcgtctctgcttttgccggaaaagacaacatcatggcggcttatcaaaaagcggtgcaaaacgaataccgcttcttctcttacggcgacgccatgctaataagctagctgtatcattgccgggcgcgacccgacaatcttgtgtcatgctgaatttgaacttatgtcattccgattttaggcttatgtcattccgaactagtttcggaatctagtttcaccattcatgcagatgccgaactaaattcggcatgacatataataatgccttaatctgtcaacatttcgagagattcttttaccagattgatgaactgggcgcggagcacagggttgtaagtgccttcctttacgtccttgtcaaaataagcggccgccttttccgtgaacatctgcactgatttttgcgaaagcggcagcttgcttccgattaaaaggttttcaagctctctgcttctgaacgagaaagtgccgcaaaacgcaagccgcaaatctgctaaaaagtttttctgcgtgttagacaaaaacacataagacgccgaaagcggcgaaatttcatttctagggccggttctcttaaaaatcgaaacatcccattcttcaagcggaacacggattcttgtaaggatatagccggccggcacagcgtcaaactgcgaaagcggcagaatctgcgtttctgttgtcgggtggtgcttgtctatgtgcatacgttcagtgccagcgcgaagcacaagctttgcgttaagcgcaagcagcggcgcgaatgtggtcatcttcatcggctgtgtgcatacgttgccgccgattgtggcaatgttgcgcacttgcctgttggcgattgtgcatacagcgtcgtgcagcactttcggaaacttttgcggcaagttctcaatctgagaaagcgtaacgcccgccccgaattcgattgaacgctctgtcttgataatctgcttgaattcaacaatgcgccgaacgctcaagattgaatctgggtagctcaaaaaagcagggcacgcgctgtagtttacgccggtgcagcctgccgtaatcgaaagattttcgattgtgcgcaggtgataaagcgcttctggaatgtcttctgcatattttattgtagctgattcagtactcatttactcttgacctgcggtattttgctgccagaacaatgcccgacatcaatgtgtttacttcaacgcatttgcaaggcatagtcgatataaactgctcgatttcttcttttgtcggcattttcactttctcgatgaattcgttaatcgtaaagtattttgacgcttcgcaatagtcgcaatgctgaacaccaacttttttgaaagccttgctgatgtcttcatattccggcgtctttttgaaatattcgattgtgacaattgagctgtcttgcactgcataaaccggaagaatgcacgaaagcacaggcgttccgtcaagaagcaccgtgcaagagccgcatctgccttcgccgcagcgcatcttgctgccgcaaagcccgaacttgttgcgcagaatgtctaccatcttttctgtgccgagcatttcaagagtttcaagcttgtcattgattacgcagttaatcttcattttgagcctctttctttgataaaagcttgaagattgagtcagtcttcatgggcagctccgtaacttctatgccaagagcttgagaaactgccgagctgaatgcggctggcagcacgtcttctataattgtgccgatttcttttggcggttcgcctgatgagatgaactcaactttaggataaaccacgttaagcgaattcggctcgacaaagttgctgattattcttgaagcttcagtctttacgcttgaaacagcagatttttcgtctaaaagctcgccgcattcaagcgcaatgttcacgtcgcggagcgttacttcgtaagttgttgtgtctacttcaacttctacaacggccgccacgcaagaagcagcttgaaacggctgccccgaaaatttgtcgttgtcccaagtgctttttcttgacggcataaaagcttttttcgcataaatcggaagcggctgcctgaaccgcgatttctgcaaagacgtgcagcatttcttcagaagctgcgtcattatcgtaatgttgagcgacaatacatctggctcggccggctcttcggtgcttgaataatctgtgtcaaaatgcacgttctcaggcggaatctcaagaatcttttcgatgagcttctgccaaattaccttgagatggtctgtcggcgaatagattttcactgaaagcgaaccatctgtttcaagcgttgtttcaagcgaatattttgagcggatcatgtcttccgccagaaagcagttgccttcttgcgccactgcaagcccgattccgcgcaaccttttttgcggtgttttaggcggaaaggacgaaagaagctgataagcggtgttacgtcttttgtagtcgctcatttcggcggctttgcttatagttttttctataaataacggcttatacaaacaataaaagctcgaatcgctttctttgagcatgttcttcagtttaagctcgtcaatgtccaagccgagcttttcagcgatgcaatgcaagtggctttctattgcaaaagaagcttgcgagtcgccccagttaaaagagcagttgagcggcggataattcgattttatggcataagcgtcaatgcgcaagtttttcgtcttgtaaacgcctgttgccgcaatgacgaacctgtcaagaatatactgaatgaacggattgaatattcctgcatttataaggatgcaaatatccatagaagttatcgtgccgtcgtcgttgcacgaagttctgtatcttattgaagcaggctctatgcgctcaatgtaagtttcctgctctgaaagcgaatatacgattttaacaggcttgtgaagcaaaaacgaagcgaccgccgcctgtgccgcagtcacgctggaaatccatgtgtcgttgattcttgtgcgcacttgatgcgtcttgtgaatcataatctgctcgtcttttatgttgagcgtgtctgctacagtttttcttaagtggcttgcccactgcgaatttgtgtagacgtgaagctgcttgcccgtaaaagaaactacacagctgttgcgctcttcctttggcagcttaatgtcagacctataagtctgctcaaactggttcttagattcagcaaaaaccttgtcaggctcgccataaagaatagaacggtttgcaagcagctgttctgctgaaaaagactctgaaaattcaagcccgaacggaatattgagcgggtcaattgaaaagccaattgacgg

SEQ ID NO: 823 - DNA, 23309 bp, synthetic construct
  source 1..23309: mol_type = other DNA
  misc_feature 1..23309: note = Synthetic
ttgcgcgccttgctcaagctacacgctggaatatttgctgaaattttttgacatcacaatctactattataatcccaacattcacccggcggaggagtaccatcgccgccttggcgagcttaaaaattttttgccgcgctttttggaaaaacaagaaggcgcgcgggcgttcttgcaagaagcagcttatgagccgcgggaattttttgacgcggttcaggcggagcgcgacaatttgcagtccgagccggaacgaggcgagcgctgccgccgctgctaccagctgcgaatggaaaaggcctacgaatacgcgcggcaaaacggctttgactggttcaccaccactcttagcataagcccccacaaggacgcgcgaaagataaacgagattggccgcgtgctttacgagaatgcattgaaagaccaaaatgcggcggccgcgcccaaattcctttacagcgacttcaaaaaaaagaacggctacaagcgcagcctggagctttccaaggaatacggcctttaccgtcaagactactgcggctgcgtttattcaaagcaaaaccgcgaccttgacaagacccgcaaaaagtgaaaaattaaatcgatggaaaatttatcggaaagcgccaagcagattcgcgacgtgataaactacataaagatttttaaggacgccttggcggtcatacacattgacgaccaaatcatcgactcgggccttttgccaagcctgattcacgacatagcgctgattcaccaggccggcctaaaagtcatcgtggctccgggcgcgcgaaagcaaatcagcgaaattttggacggcgccaaaatcgaatggaaaattcaaaagggctcgcgcgtcgcgcccgaatccgccatgccgctaatcaagaccgcggcctttgacgtggccaacacaatcatgaaccacttggccggcgaaaaccgaaccgccgtcatcggcaactgggtcaaggcccgcgccaagggcgttcttgacggaaccgattacggaacggccggcgaaatcgacaagctcaaaatcgacgtcataaagcaaacattggacgacggcttcattccgatttttccctgcatcggctggaacgatttgggaaagccctacaatatttcaagcgcggagctggcccagcaaatcgcttgcggcctaaaggcgcaaaagcttttttacattcttcccgacccaaaaatttccaagaatgaattttcgcttcctgacagcgttcaccttagcggcgacggaaacattcccgcgatgaacctttcggaggcggaggaaatcttgcgcatgaacggcgattgcggaacggatgcaagcgaacatcgcgcgcaaatactttcgctcttgcgcttggcaaaggacgcgtgcaaaaaaggcgttgaccgcgttcacattctaaacggaaatgttgacggaattttgccttgcgaaattttcagcggcatcggaagcggaacgatggtttacaacaacggctacggcgacttgcgcgcgatgcagccgcaggacataccgagcgttttgtcgttgatgaatccttttgtccaaaaaggaattttgttggaacgcacggcaaagcagcttaaagccgaattggacaattacatcgtctacaacgttgacgaaggaatccacgcctgcgccgcgctcaaggtttaccaagaatcgggcgcttcatcccaagcggagatttgcgctgtcgccgtagaccccgcttacggaaacatgggcgtcggcccaaagattgtaaattacttattggacaaggcccgcgctcaaaaaataaaatcggtttttgttatgacaactcaaaccgccgacttttttgaaaagctgggattcgcgcccgactcaatagactcgattccgcctgagcgcaaaaagctttggaaccccgagcgaggttccaaagtttaccgaatgaagttttaaaaaagattgccgggtcaagcccggcaatgacgcgcaaattgtcattcccgcgcttgattgtccgcgctctgtcaagagcgcagttgaatcgcttcctatatcaaaatggagcggagcgacatacgcgggaatcttttactcaaacaaaattaggaagggtccgtcgttgtcgcccttgtaggcgtcaaactcaagcctaatatttgaaacgtttttgctcaaaacaaattccacgggcacatcgatggcgccggccggaatatctcctatttggactgactgcgacacgggcctatacgcgtatccgcctttaacttcctccgtaacactcgattgaagagtgtttatgccatagacattgtttcccttaagcgtaaactgaataacgtcgcctttttgcggcttggcgctcaaaatgtcgctgaggggaatgtggcaatagtaggaattgtccccgtcgttggccgcggcaaagcgaacctttgtcaagtcaacggtgacaacctttccaagcggctcgttggtggcggtgactttcttgatgtaaatcttgattccaggaagccagttccagtccttgtcggcgacggcgacacctaagcgctcgcaaatcgttttgtcggcggggcgaatgtcgcactttccgtcaacatatccgtagtcataacatttgtttacggcgccgtaaacaaaagtttgataggcggagatttttttagaaatgtcgccaatgcaaaccgtgctgctttttggagcgttgtggttttcgttttcttcgccgtagtaggtgttgatgtaaagatttgcgattttggctccgtcggggcttgagcattcgtaggtgacgtacttgtagcctgcaaagtcaacgggcttgtccaaatccaacgaggcaaggccttcgccgtcggtggtcaaaagagttccgttggcttcgggcgaaacataaatgtcttttgttttgggagcggcgtaaaggctggccgcggcaaaggccaagcaaagcgcgcccaagaatattttattgttctttttcataattttctccttaagctttttctcttactttgaataaatcaagtaggggcctttgaactcgctttcgtcttcaaaggtgatgatttcgagcgtcatctttgaaccgttttttagaatcggaaggtcaatcgtgtcgttgattttttgtcctttcgcgaatccgcgtccattccattcaactgaaacttgctgccattcgcctgaatcgtcaaaaacattcgcgcggaaattgcccaggtcataggcgtttgttccctttagcttaaactgaacgatgtcgccggctttgggagtcgttcccaatgtttgttgaaggtccgcccaataagcgtagtgcttgctgccgtcgtcccatgtgaccggctcattaatagtaaagaaacgagccttgctatagtcaatcacatgcaattggccaatcgcgttgtttgtggcggtcactttctttacgaaaatttttatgttcggaattgttttccagtttgcgtcataagcgcctatgtcaaaatggtcggcgacagccttttccgggtttctgtaaattttctttccgttttcccaatgctcgtagcacattatggaactgtaaatcacgccttgataaagagcggcttttttttggatgtcgtaaattctaatttttgccgactgatcccaatcatagtcttcgttttcttctggaacaaagccaaagtttaattcaatgtgcgagaatttttttccgtcggggcttgaacattcaacttgcaaatacttgtagccggaaagatcaacttcctctccaaagtccacttgggcccagccgtttgcgtctgttgtcaccaacattccgtttttttctttggcaacccaaatgtcttttggcgcctttgcttttggggcggcgtaaaggctggccgccaagagcgacaagcaagccgcgcaaaaaagggcgcgtccaatttttttcataaattcctccatagttaattatatataaaaaatgatatatgcttatatctgaaaagtcaataaaaatatttttatatatgaaatataatatattgttatatataatttagataatatagttatgcaagaattatgactttggaaaagactgtaatagacaacatcaagagaatccgcaaagaaaagggcatcacgcaggaacagctggcggaagcgtgcaacacggctaccagttacatagggcttatggaaatttacagaaatgttccaaaactttccacaattgagagaatcgccgcggcgcttggcgttgaaccgcaggttctttttcaaaaacgggaaaaggattcgccgacagaacgaaagataaaggctataaagaacacagtcatgcattcggtcgaaaaggaattgatgcgagccttgcgcgaggagctttattaagagctccgttcgtttatagttaaaataatataattttatatcaaaatttattttttttctcttgcgcgttttgctcttgccgagttataattaaggcggagaaaaacgtggatcaaaaaattaaatttccaattgcgttaaagcatattttactgttttcattccttatcattcttgtcttgggtttgacgacctttcttgtttccacgcttgttcgcggcgacgacaggcgcaaggccgaagaaaacaaccacacgattaacgccaggaccgcgcaaaccgttcagcagacttttacaaacgctcaaaagaattcctacatactgtttgacgctttttcaaaaattaaggacccggccaaaaaaggaggccaagcaagccaagaggtccgagcttcattgattgcggatttttttagggtcaacgacgacataatttttgtctttagccctgacacaaacttaaaagtgaacccatcgttcaaagaaaaaatcggaggagcggcgggacaaaaaaagctttcggattttttaatcgccaacaaaagcgcggccagcggaaaagtccgctactttaacgccagggaaacgcttggcattgattcgattattttcacttttcaatacgggccgctgaacgccgtcaagaacgcggcggttggcgttgacacaaaagccttggccgcgcttatgagttctggcgccaacaacgcgacgattttggttgaccaaaattccgccgtccttataaatcctgactatgaaagcgagcaaaaaacttacgttgccgcgcaaagccttatcgacagcattaaggacaaagaaggcgttgacaacactcaaagccttgcggagacggaagacggaaggaaattcatttcggttcacaagacaaaggataacctttacgtcataacgagcgtttcagaaaattccgtttttgccgtaatcaatcgcaccacttacagaatcatcttgttttcgctcgctattttgttcatcgcgattatggcgattcgtttgttcagcaaaaacattaccaatccaatcgccgacttggttgacgcttccgcaaaaatagagcggggcgaatttgaattggacatcaagcctcgcacgcatgacgaaatcggattgcttacttcctcattcattcaaatgggaaagggtcttgccgagcgggaaaaattgatggtgtcgttcagcaaatttaccaataagacaatcgcgcaaaaggccgccagcggagagcttgcgcttggaggcgaaaaccgcaacgcgacgattttctttagcgacatccgttcctttacagcgatgagcgaaacgatgcaaccaaaagaagtcgtagaatttttgaacgcctacatgacgcgaatggtcgagtgcgtcaacaagacaaacggcgtcgttgacaaatacatcggcgacgcgattatggcggtttggggagcgcctgagtccgcgggcagtcccgcccttgacgcgctcaacgccgtcaccgccgctcttatgatgcgcgtttcgctttttcactttaaccagtcgcgcaaggaacggggattggcgccggtaagaatcggctgcggaataaattcgggaccggtcgtcgccgggcaaatcggctccaacgaaagaatggaatacacggttatcggcgacgcggtgaatttggcgagccgcaccgaggctttgaacaagccatttgccaccgacattttgattaccgaaaacacatacaatcttatcaaggacaaagttattgtcgaggaaatgcccggcgttcacgtaaagggaaagactgacgcgataaaaatgttcgcggtcattaaccttgcgggaaaagaaagaccaagctcaattgaagaagtgcgaaaaattatcggaactaccgcgcctgatttggcaaaggtgaacactgatgacgaagaaaagaaatacaagattgaaggctagcctagccgacattttgatttttgttttgtgttctcttggagcggcgacggcgcttggcctttattacaaggacataaatttttggtcgttaaagaacaacgaagtcgcggtggcgaaaatttattttaagaagaacgtagtccagcgcaaatttattgacaacgacatttgggagcgcgtgaatcaagaaagcccgatttacaacggcgacaaaattcgcacggcgcaagactctgaaatccacgcccagtttgaaaagacaggaacgaaaatccagctaaaagaaaattcattgattcaaattttcagcaataaaaaagaaaaggccattgactttttaagcggagaaattttgctggccagcgcgcaagacggagaggaagcggtcgtcatggctgtaaagaaaaaaatttccgccgcgccaaattcaaaagtaaagattacgatttcaaaagcagagaaaaacgaaaaaaaagaaagccagcccaaagaggccgtcgttgaagtcatcgaaggcgaggccgtggtgacgaacgttccaaaggcggcgcttttccaaaagccggttgaggaagcgcaaacgataacggcgggcgaagaattcattgtcaccgaagagccggttgtcgaagccgagccggtagaagacaaccccgcgccggagcctgttgtggaagaaattgtcgcggaggaagaagctccggtagagcccgcgcaagaaaaaacaagcgccgccgcgccggacaaagcaacagccgaaatttcaaaggagcaagaaagctccgttccagcgcaaagcgcggaaacggaagaagaagaaagcgcgcaagagacggccgcggcgcaaaaagcggagccagccgagcctgtagagatagaagaaagcgcggccggcgctaccgaaagtccttcggtaaaattcgccaaaagcgtttacaaccaaaagaccggcgaatacaattacagttttggaattcccttgcgcaggctttttggcacaaagagaataattcccgccgggtcggttgtggaattgaaaatcagcggcgtctcagacaagagggctccgtattttggaatggcgttcagaagcggcaaaggcgagcagtttgacgcaagtccgtattgctatgcggttcctaacgccggaaaaggatttttcgcgggcgcttcgttcaaccaaagaattcgcgcgttcattgaaaaggaaatcgaaaacacaagttacgcgacgctttctttttcttacgactcgaacaagtttgacgaagagctttcgataagcggctttaaggttgaggcgaaaattgtttcgcttggcgcggaagaaattttggagccggtggctgtcggaagaaaatctgcggccgtgattgaaagcatttcgataaacaaggtccagtggaacagaaacaacggcggttttagcctctttcttccgccagaaagaattttaggctttacaaaatcacttccaaaaggcgccaagataaaagtgtcgtttatcggccagtcgtctttgccgcttgactatgctaatttaagtttgaacaattgttccaccgaaaaatgggataaattccaaacgataaaacttgacgacggaggaaaagccttccaagaatttgcgtttgaaaaaaccgctgtccttactggagagttgataaactccgacgcgtgcattttggaaataacttttgaaagcgcaagccgcgaaaaactttgccaattgtccaacgtaaaatttagttttgagcgcgttgaatagaggcgcgtttgcgcagactgttcgaacgcccaagactgcgcctcgccttgaaagtttccgccaaatgcgataatttgttgttactatgactatcatcgacggaaactcacttacaatcgaagacgtgaacgacgtcgcgatcaacggcaaaaaagccgcccttcccaccgacaaaaaattctgggaacgaatggaaaagtcccgcaaatttttgatggactacatttccaccggcgttccgacatacggagtcaccacagactttggcgacagctgctacaagcaaatcagcgttgacaaggcgggcgaattgcagcggacaatcgtggcctaccacggaatcggcttgggcccatactttgaccatgaaacaggccgcgccgtaattctttgccgcttgaacggaaacgtaaagggcggccactcggccatcaggccccagctcgcgcgcaaaatgctggagcttttgaacaaggacgtcattccatgcattccgcagcttggctcggttggcgcgagcggcgaccttacgcctttgagctaccttgcggctgtaattatgggccaacgcaaagtttactacaaaggaaaaatcgttccgacgatgaaagcctttaaggcggaaaagattgagccgcttttgattgaagccaaagaaggccttgcgattatgaacggaacgagcgttatgacagccgtcgccgcgctcgcgataaaaaaagcggaacggcttgcgaacatctcggacttcctttccgccgttacaagcgaaatcacgcgtggaaaagacacgccctttgtggccaaggtcagccagataaaaaatcacaagggccagtccgaaagcgcggcttacatttacaagatcataaaaaattcaaagcgcgtttacaagtatgaggaattcctaaagacgcaaatcgaaaagcttgacggaagaacttttgtaaagcaggcgaataaaattcaagaccgctactcaatccgctgctcgccgcaaatcaacggcgtttaccgcgacactttggcaatcgcgcgccagtggattggcgaggaaataaattccgccaacgacaacccgctcgtcgacatcgacgctggccgcatttacaacaccggaaacttttacggcggccacatttgcgcctcttgcgactacatgcggacggcgctcgcaaacatctcggacctttcggacaagcaggccgaagtcattatcgacggaaagttcagcgggcttcctgacaacttgactccgcgcataaaagacacagatccgcgctcaggcttgcggcttggctttaaggccgcgcaaataacaatcagcgcgattcgcggagaagtccaaagctactgctacccgatcagcgttaccagcgcccccaccgaagccatcaaccaagacaaggtcagcatgggaacaatcagcgcgcgaaaattcgccgaacaaatcgatttggttttcttgcagttcgccacccatttgcttgccgccatgcaagcggttgaccttgcaggctacgacgactttagccccttcaccaaaaaagtccacgaccaagtgcgcgcgatgagcaagttcgtaaaggacgaccgccctctggacgcggacgcgacaaaggttgccgactggcttaagacgacggagatttttgggtagagggaacgcggggcttgcaaaaattaaatgtcactttaaaaacaaaaagagagccgtggctctcttttttcatgttctctatttacattctaggagaatgtaaaagcattttgcggagtcaaaagactccttgttagcaggttgacaagaaaaattaatcagtaagtaaactatacattattttttttattttgtcaaatttttttgtatttacgcgctatacttgttatatgaaatatcgtttaggacttgatttaggaacaaattccattggttgggcaatttactcacttgacaatgataaaagaattgtgaaattagaggatattggcgttcgcattttttctgacggacgagatccaaaaaataaagaaccgctagctgttgcccgtagagtggctcgcggacagcgaaaaataatttatcgaaggaaactccgccgaaaagcaacatttcgtcttttgcaggaacagggacttttcccaaaaacaaaggaagaaagtcaaaaaataaaattattgaatccttatgagcttcgcgtaaaggcattggatgaaaagctggaagctgctgaacttgccagagttttgtttaatctttcggtgcgcaggggatttaaaagcaacagaaaagacgcttcaacagatgaaagcgcgaattcaaaatcagctgaaaaacttttgcagaatgaaatgtgcgcggaacttacaaaaacgataagcgaatcaaattgcagaacgctaggcgaatttttatggaaaaatcagaaaaagaatcatggcatccgttttgttccaggaagaatgagttattacccgctcagaaaaatgtacgaagacgaattcaatgcaatccgcagcgttcaggagcctttttacaaaaacatcgattggaattcaatttataacgcaatattctttcaaaggccgttaaaaccacaagagcgtggccgatgccaatacatgattgagaaagaaagaacttttaaatcaatgccaagcgctcaaaaagttagaattttgcaagagattcgcaatttgaagtatcaaaatgaagacggaaaaactatcccgatttcagaagagcaggaagacattcttctttctttgctcgattcaaaagaaaaggtggcgtttgacgcctttagaaaagctttgaaattgaattccgattgtacatttaaccttgagaaaaatcgtgattttttgcttggaaatgccaacgccgtaaaaatgagaagcaaaaaccgttttggagatttatgggatacattttctctcgaggaacaagatgcaattgtagagaagctgataacggcagacgaagacggagagatttttgaaatgttaaagaaatacagtctctccgatgagcaaaaagaatcaatagtaaaattacagttaccttctggcacgactatgctttgcaaggaagtgtctgagcaaattgtccataagatggaatcgcttgggtgcgattacttaactgcaattaaaaccctcggatataagtacgcagaccaaagcgttgaaaaatatgacacgctcccatattacggaaaagttcttgtcggttcaacaatgggagccacgccttccgcagatgaaagcagccctgagaaaaaatacggcaaaataagcaatccaactgttcatgtcgctcttaatcaaactaggacagttgtcaacgcaattatccgccaatatggaaaaccgactcaaattgcggttgaactttcgcgtgatttaaaggcaagccgcgacgcaaaagccgctatccaaaaaaagcaaaatgataataaaaagcgaaatgaaattttgaacaagaaaatttcagacgagtataaaatcacttatccaaatcgaaacgaccgtcttaagtttaggttgtgggaggaacttggtacagacgggcttcctagaaaatgtctttattgcggaaaaataatttctggggctgaattgttcagtaaaaacaaagaaatagaaatagagcatattttgccttttagcagaaccttgcttgacgctgaatcaaaccttactgtagtgcatgtaagctgcaacgcttttaagaaagagaggtcgccctacgaagcctttggctcaaatcccaaaggttacaattggcaagaaatattggagcgcgccaataaactgaaaaatcctgcaaaacgaagtcgattcgccattgacgcaatggagttgtttgaaaaggatgacgattttctcgcgcgccaacgtacagacaatgcttacctttcaaaaatggctctcaagtatttaaagagcgtttgcgacgatatttggtctgtaaacggcggaatgacaaaactgctccgcgaccaatgggaaatagattcaattttgaagcgaaagattggcgaacaagaaatagcgcattttaatctaaaagatgatatggtaggcgaatataaaaagaaccgctatgaccatagacaccatgctttggacgcttctgtaatcgcgcttatcgacaggtctcttgtaaaagaaatttcaacgcttaacgcccgctcgcttaaaaaccgaattgaagttcctcaaatggcagttcttcgtttggaacttcaagaaaaggtaaaaaacatcgtggttagttttaaacccgaccatggagcggaaggtaaactgtcaaaagaaactttacttggaaaaatcaaacgagaagaaatgattgacatttctaaaatcgaactcgaagacattccgcttataaaaaatgacaaagttcgcggcgattttgaaaaagcgcttgctgataagaatgacattaaactggttaggaaggagttgaaagatgtttatccgcaagtcaaagtttacaaagaattctttgtcgcccgtgcgatgatatcaaatcttaaagaaaacaatataaaagacattgtggacttaaaaatccgctccaagttgcaagaatttgttgccgctcacaaaggacaaaagttcgaaagcgttttggaagaatttagcgcgcaagaaaatattaaaaagattcgatgtctgaaccatgtgcaaacgccgattgaaatcaaaggtgacgttccgcgctatcttgcgccggaagattattttgcggctgtgatatggcaacttccgccaaaaaaggacggaggaaaagccacttatgaagcgcaatatatccgcaggacggaagttggaaaagacaacaagccaaaggcagaagtaatagaggcttggaaaaagcaacatcatcccgccacaaaaaatttgggtgttttgcataaaaatgattatctggaattttgctatagcggaaattggtacaaatgcagagtggcgggatacgccgcgacacaaaataaattagacattagacctatatatgcggttaacgatagctttgattggataatttcgactaatgactatcagcttgaaccctgctggaaaccacaaaagggacataattttatctctgttaatgttctttttggcgagaaacaagcgaaattcattacggtaaacccaataggacgcgtgtttagaaaataatggcaaattccatgtctcgcactgtttggttcaagcggcttgcttccttcgcttggacttcaccacggcaattttttgaatcaattccagatttccaaagcatgcaatatttggcggctctctttaaaaataacacgccggaagaattataactgattaatttgtcctgtcaacctgcaaccgcacatcctggcgaactctgattaacttaattataactgattaatttatcttgtcaacctgcaacaagagcggcgcatgatacagattcccaaagattatagctaattaatttgtcctgtcaaccctcaacatctctgcccgccaaggtctaactggttttattataattgattaatttttcttgttaacttgcaattccgctttgctgaaatgcactaggctgttgttgacaataggatgtcttagaattgtcaaacaatttcagcgacaggcttgtacataaatatgcagttttggctgtattcgctttgccaatcttcattaagccgttcgttaaaagattcgtcttcgacaggataaaagccccatgttttatagtattgggccaatttttgatttgccgcgaacaaatacaaaactttagttccgacttcctgggaaatatgctttacaataggctgaactatatcgtaaaaaatattgcgtcctacttttatgtcgaggccttttataattctaagcgaataatcgttcagagcgatatttacaagttccaagccaggcacaagctttgtttcttttgaaaatttcaagtctatggctttttcgttgtatggaattgagccgcattttaacgtaaaacaagcgataataacttccgttccctttagctttaccacataatttctgactgaataatcattttcgtcttttatggcttgtttttgaaaataatccgttatgcctgtcgctccgttgatggcggcaaaacgctttaaacaacgctcgttgccattgtctacaagccgctcgtaagagaagtattctgaattaatttctactggaataaaactcaagcggtctcattatcagagaggtcgttccaaattttaattatgtcgggaatgcgttttgaaaaggtcttattaaagttgtcgcgttctgtttttgtgtactgaggctctgaaagaggctttgcgctgcatattttgtcgtaagcaagctttccagaattgcctgacaaaatgaaaatgtccggttttcctaccatctcaaaacctccttgtacttataaatataataacgaaaagggcatattgtcaagcaaaaaattattccttttctgccacgcggtagtcccagttgtgcttggggtagcggcccttcatttccttgcaaatctccggccaagtgttttgccaaaagttttccaggtcgcttgtgatttgcaggggccgtcgcgcgggcgaaagcagttttagcaagacaggaacgcccatcacttttggcgtctcaaagcagccgaatatttgctggattattatttctatcgtgggaaccactttttcgccgtcaacgtaaactacttttaccgagcggtccgtttgcaattcaagctttgacggaacctttcgttccacctcggaaccgtcgtaaaaatagtaaagcgcgtcgtaaacgttttgcgcgctgattttgttcccggtcaaaaatggggccagccattcagccgcgttttgcgaaagccagtttttgtcaaactttttgggaacgtctgcaatgccggaattgttgccgcggccaagatttccggcggcggaactagaattgttggcaagactaagatttccgccgcctgttgcggaggcctgctcgtaaaattttcgctttaccaaaaaggcttttgtcttttcgtccagtggaagcgagtcaaagccgtttttttgaaccgaatagcaaagcgcgctttttatgtccgcgtcctcggccttgagcgccttttggctaagaacaatttttccatattgagtaaattccgtctttacgacttttccgttttcaaaatcgcaaacgacttttttttgcgcgcggcttaaaatccattcttcaagttgaacggaatccagcgccttgtatgagtaaatcgcgccttgcgagcttcccgcgtccgcttccacggccacaatccattccggaccaaggccgcccttgtagtcctttagcgcggcaaggcggcccgacggaaactggtagacgcccgcgtccgccgtcctatgcgcgattctgtccgggaagccagcgagcagcggatcgggaattttttgcaagccagcaattcgcgcgcttccatccgagccgacggtgtcttgcaggcgccgctctaaatttagaacaaactttttttgcaaggccggagctgaatctttgtattgcgagtacggaaggacaaaggcggcgccgccgtaaatcgcagcgcatcccaagcggggaccgattccaagcctaagagccgcccgccccaattgtgtaatctggccgtttttgtccaagcagttaagcagccgcaaaagctcgcgcgcggtctcccacgaagacggggcgggcgggtccagccattcaagcgcggcggggtcctggcttccccattcggcgcattccaaaagcagctcgcttaagtcgctgcgcaagatttccggcagcgggtttttcgaccgcggctcgttctggctccacaagcggacgcaaacgccttcttgggttcggccggcgcggcctgctcgctgcgcggcggaaaactccgattcgggcattgtgaccaagcgcgtcgcgccaacgttgttgtccatcacgctcacgcgcgaaaggccagagtcgattacgcaaacaacgtctggaatcgtaagcgacgtttcggcgattgaagaagaaagaattacgcgcgttacgccgggctcggcgggcgacaaaatctttttttgctcgtcaaaggacacggaggagtgaagccgctcgatttgaacggcgggcgaaatttcgccgcttagctcggaaaaggtcttgtttatttcgtaaatgcccggcaaaaatacgagaatcgagcggcccgcagtcttggttttgccagcagtttccgccgcgcccgcagtcttgggcgtggaacaagttccggtcgcgccggcagtcttggtcttgctagcagtctcggtgtcgcccgcagttttggtcttgccatcagtatcggtcgcaagcccagaaagcgcccagcggacggcggcggaaaccgaaagttcaggcttgtaaaaaaattggacagggaaagtccggcccggtatttccaaaactggcgccggctttatggccttggaatcagcctcggattggcccgcgtttttggtcttgcctccgttcgcggtttgcgcggcgttcccggtcttgctttcagtctcggtcgcgccgactgttccgcaaaaacgagcgattctcctggcgtcaatcgtggccgacatgatgattacaaacaagtcgtcgcgaagctgcatcgcttcctttaaaaaagcaagcgccaagtcggcgtttatcgacctctcgtgaaactcgtccaacacaacgacgctcgcgtcttccaaacttggatcggcttggagccgccgcgtcaaaattgcttcggtcataacttcaaggcgcgtggactcgcttgtcttgttttccaaaaaaaccttgtatcccgccgtctgcccgacccgctctccaagcaattcagaaacgcggctggccacgttcacggcggcaaggcggcgcggctgcagcatcaatattttttttgggaactcttccaaaagcgcgagcggaacggcggtggactttcccgcgccggtttccgcagtcaaaatcaaaaagcgcgacggagacgcttttagctccgcgcaaatttcccctaaatggggaaaaattgggagcgattttatttgcggcgactcaatcattttttacgtaaatttttacgccttgaattgatcgatttcttggccaatcttttcgatggaatccttgacctttgaagaaatgtcggaaaggctcgcgctggtttcgttcatgttcttggcgcccgcggacatttcctccatgctctgcttgattacaagcgttgtgtcctgcaagttatgaacctcgttgagaatcatctcgtttccttccttcatttctttggaagccgtgcgcacttccacagtgctgtcgttcataactttgatagagtcaagaatttgtctagagccttcgttctgttcttccatcgcggaacgaatgttttgaacaagctggtctgtgtcgctgatgaggtctgaaacagtgttgaagttttccttgctctttgcggaggcgctgacaacttgcgaaatagtttcgataatcttgttaagctcggcgccgattttctttgactcgcttgacgaagtttctgaaagctttctgatttcgtcggcgacaaccgcaaagccttttcccgcctcgcccgcgtgcgcggcctcaatcgctgcgttcatggccaaaaggtttgtctgctcggcgatgttggcgatggcgtggttggcgtcctgcaagctgttggactgctcggacacttccataatttgctggtcaacaaaatgctgctgctcgattcctgtctttgagctttgctccagacgttcaaaagattccgccattttttcaacggactggttgaccgacttgatgtttcctatcatttcttccacggcggaacttgcgcttgaaactccgtcagattgcttttgaatcatgttttccaagctgttgatgttttcggcaatctcggccacggcggcggaagtttgcgacaccgcgttgacttggtttgacacctggtttcctacgctctctatgttggaaagaatttcttcgatggaacttgacgcttcgtgaacgcttgtggacaattcgtcttccgcgtcgataaggccgttctttgagaattgaatttgcgaaactatgttctgcagcttttcgatgaacttgttgaagccgttctccaagtggccgatttcatccttgctgtcaaccttaagcctttgcgtaaggtcggcgctgcccgaagcgatttggttgaccgtagagtccacggtctttatcgggttcacgatttttatcgcaagaatcaacgatatagcgatggagacaaccactcccaaaacggccatggccacaaccataatcacgctgcgctgcaccgcggcgaacagttccgccgactttccgaccgtaacaaaaacccagccgctgttttcgctgatcagcgtggtcgcaaagtagtggccgcttcccgcggtcaagtctacataagcgtctttgcctatttgggctttttccgcagccagctctggatagtcgtcaaagaaattcctgttaagaattttttccggatcgctgtttgtaagatagtttccgtttttgtccaatatgaacgagtagccgctgttggaaagctttatgttttgtattatttccgtcaaggctgaaagcatgatgtcaattccggccacgccgtcgggatggattccgttcctgtagcagtatgaaatcgttgtgacaagcactcccgtgtcttcgtctacataaggctcggttatgatagcgtcgttgctggcaaccgcttctgtataccattcgcggcttgtttggtcgtagtcagggtcaggaacccattcgtcgctggaaatgaaatagccgccgtctttgaccggaagagttcccgtgtaataggcgcagtaaaaatagggggtgctttttatcaaggaattcaagtcgacttgtttttggtgaagtgtcgcgtcggcgcggcgggcgtaaattcctatgtcccgcacgatttgagcgggcgtgttaaggaagttgtttattgaaactttcgcttcggaaagctggccgctggcaatttgggaaacattcttttccaattctgaaacttggcttgcaatcgtaggaactgcgacaaggacgattgacaaaagggcgataagcgcgtagctcaatacaagtttatgctgaattttcttcattcaaaagctcctaaaagttactatctttctattttatatctgaattccgcattttgcaagaaaaaaaactgttattattgcttattttatggaaaataaataaaatttcgcgcctgtttttctcttgtcttgatttgagattcgcgctagaatggccaaagaggttaatataatgaaaaaaatatttgctgttttgtcaacattaatagttttgtcttgcttttcttgcgcaaaaaagaatgacgtggtgaagatgggcacaaacgccgcgtttccgccgtttgaatggatagagggttctgaagttgtcggctttgacatcgccgtgagccatttgatcgcgcgcgattacggccgcccgctcaaggtcgtggacatgaattttgacggcctcatcgccgcccttcaatccggctcaattgatttcatcgccgccggaatgaccgccacggacgagcgccgcaagtatgtcgatttttccgagccgtattattcttcacgacaaacaatcatcgcgcgcgccgacacaaatgacatcgcttccatcgcggacttgaagggacgtgtcgtcggcgttcaggccggaacgacaggcgaaggctatgtcaacgaggaaattgacggcgccaccgtcaagtcttttagaaccgttatcgacgcggcgctcgctttgaaaaacggagcgattgattcaatcgtaattgacgagcttccggcaaaggaaattgtaaagcgcaacgccgaactcaaaatcatcgacgacgattttttgaccgacgaatacgctatagccgtcagaaaaggcaattccgacttgcttgattcaataaacaagacaatcaagaccataaaggaaaacggagtttatcaaaaactttccgacgcgtatatgcccttggacggaaacgtaaagattctttccgctgacgagctataatattttatgccgaacgctttttacgacgtaatgattgcccacggccgctggaagttgattccagccggtttgggcgtcactctcttcattgccatttgcgccattcttatcggctctgtcttgggctgcgtttttgccatattcaaaatttccgaaaaaagatttttgcgcggcgtttctgaaacctacacaacgattattcgcggaattcctatggccacgcagcttatgattttttattttgtcgttttttctccgcttggagtgagcaacgccgttttagtggccgtcatcgcttttggaataaattcaggcgcgtattgcacggaaattttcagggccggaattcagggcgtggacaggggccagatggaagccgggcgctcgcttggcctttcttggtggcaaaccctggtgaagataattttgccgcaagcgtttaagacagcccttccaacctacacaagcgaattcatcacgcttataaaagaaacttcggtagccagttttatcgccgtcgtggacttgcaaaagacttgcgacaacattcgcaacgccacctacaacgcgtggattcctttgctgtcctgcgcccttatttatttgtgccttaccgttggccttacaaaacttttcgccgtttgcgagcgccgaatgtcaaagagcgccgcttgagcggacggtcaatatttccactagcaaaaccacgagaagcgtggtataataaaagttatgaaaatcgtaatcgtaggcgcgggctttacaggccgccaattggcgcgaaggcttatcaacgagcgcaacgaagtcactttgattgacaactctgaagaagtcgtccgccacgcttcaaattcgctggattgcgaagtcaaggaaatggacggaaacaatcttgaaaatttggaagaggttggaatcggaaaggccgacgctttggtttgcgtgacttccaacgacgaagtgaacatgatcacttgctcgctcgtcgattcggtttacccagacattttgaaaatcgcgcgcgtccgcaatttttcctattacatgaacacggcggccgccgtaaaaaagcacgccgaaacttttagcggaaagcaccgtcccctttacggaatcgactttatggtcaaccccgacatagaggccgccgacgcggttgttcacgccgttgaaagcggcgccgtgagcgacgtggtgacctttgaaaattccgaatacgaaataagccgaataacaatcgcgcaaggctcgccgctcgcaggccagcagctaaagaacgcgcgcaagttgacggacaagcctttcttgattgcctacgtagaaagcgccgaaaaaacttccttgccaagcggctcgaccattttaaatgccggcgacagcattggcgtcctttcgcgcaaggaagacattggcgacttgcttgtcctttgcggcgcctctgtggagtccttggacaaaattgctttggtgggagccggccgaatcggaacgctcatcgccgacaaattgatggcgaagcaaaaaaattcattgctgtcaaaattttttggcaagcgcgtgaaggttggaaaagactttgcgattgtggaccaagacgacgtgtttacaaaagaagccagcgagcgctatcccaacgcgcgcgtatttaaaggcgacatcacagacgaaagttttttgcgcgaggaaggccttaccgaatacgacttggtcatttgcgccacgcacaaccgcgagcttaacatggttgtggccgcgtacttggaatcccttggcgtgggccgctccgtcagcttggtagaaagctccacgttcgcgcagattgccagaaagcttggcgttgacgttcctgttcccttgcgcgatacggtcgttgactcaattctaagccatttgcgcggaaaaagcgtcaccggcattcacaccgtttccgaaggccagctggaaatcgtcgaatgcgccttgccgcccagctctaagtttgtcggaaaaactttgcttgacatagccaatcccggcgccttccttgtaatgcttgagaaaaaagccggcgcgcaaaattatgtcattccggttggaagcacaattttggacgccaacgaccagcttatcataattgcgcgcgccgaagagacgcaaaaaattctaaagctgtttggagcgcaagcctaatgacgctgttttctttttttaggatagaattttcaattttgggaattgtggccgcaacctatgtttttcctgtcatcgccgcgctctgctacaaggaatacagcgttctgccttcttttttgattccgatggcggccgcgatttttttcgcgcttgttttttttgtcgctggaagaaaaaagaaaatagcgctttccacgcgcggcgcttttgttgtcgtggccttcgcttggatttttgccagttcttttggggcgctcccgctttattttagccgagccattccgcgcttcatcgacgcgttgtgggaaagcgtttctggctttacgacgaccggcgccacgattttgggcgatgtcgagtcgcttcctaattccataaatctttggcgagccgaaacccactggcttggcggcatgggaattgtggcgcttaccgtggctctttttccgcttttgggcgtgggcggcttccagcttatcaaggccgaaacaaccggccccgaaaaaggaaagttcactccaaaaatcacaaataccgccaaggcgctttggacgatttacattttgttcacttgcttggagcttgttcttttaaaaatcgctggaatgagtttttttgacgcggccttacattctttttccactgtaggaaccggcggctttagcaacaagaacgccagcgtgggagcctacaattccgccgccatcgacgcgatttgcaccgtctttatgtttttggccggagtgaactttaccctttacttttatttgctttctggaaaaattcaagagattcgcgacaacacggaattcaaggtttacatagccttgatttttgtttttgtcttggg

SEQ ID NO: 824 - DNA, 19638 bp, synthetic construct
  misc_feature 1..19638: note = Synthetic
  source 1..19638: mol_type = other DNA
cctttaccgacgactttatgttcggcacggtcatgaaaaacaaaagaatttgtaaaggcgtattggagcgccttttgcatatcaaagtcggtaaaatcgaatatccctccctgcaaaaaacgatagcaccgttttacgaaagcaagggcatacgccttgacgtctatgtctcagaccccgatcgcgttttcgatatcgaaatacaaacgtcgattccgccttctcttcccaagcgcacgcgctattatcaaagccttatggatgtcgataacttcttgcgcggtcaaagctacgccgaactgaaagagagctatgtcatctttatctgtacgcaggatcccttcggcaaaggtttgcctgtgtatacgtttcgcaacgtatgcggtgaagacgacggtatttttcttgatgacaaaagcgttaaggtgttttataatgtgggtgcctacggtaaagaagatgagtctgaattgagcgctttgttggagtatctttgcgagaggcgggcgacgagcggttttacacagcagatcgatgagcttgtcgaaaaagcgaaacggaacgaaaagttcaggagctggtatatgtcgttgaatattcatgaagatgacttacgcagagaaagtttacagcagggtgaaaagatcggctttgagcggggcgttgctacgggaatacgcaaaggcaggagagacggactcttacaaggccgacgagacggcattgccgcgggatcgtatcaaaaagcacgagaaacggcaaagctgatggctgaacgcaagtacccgctctctgagatccaccttatgaccggtctctcggaagcggaaatcgaaaaactgtaatgttatttattttccaagctcaccgttcgatttattaattattctttttcgacggggcgatatattttattgccgccgcggccgcctaaacccgaacctttcatttcaaaatcgtcgtcgaggtaagcgatcaaatccgacagctttttaaatccgaaatcgcgcgtgtcgaaaccgggattttgccgcttaaacagcgaacccgccgcagcgacgggcgcccaaccggtatcgtcggcgtacttttcgtacgcgtttgtaagcagtttgtaaatctggcggaactgcttgtcggtcatcgtgtcgccgtccgcattgacgccgaccgtagcgccggctgcggccgtaccccctgcgggagccgctcgctttacttttgcacgccgcttgtgtgcggcatcgattttttccggcagcgacgaatcttcgacgccgtgcaaattttctatatagataaattcgtcgcacgcgtttacgaacgacaccggcgttttcttttcgccgacgccgaacacgtactcctgcgattcgcggaggcgcgatgcgagtttggtaaaatcgctgtcggaggaaacgagcacaaacgtatcgtatttttcggtatagagcaaatccatcgcgtcgataatcatcgccgaatcgctcgagttttttccctgcgtatagctgaactgctgtatcggcaaaacggcgttttcatttaaaacggttttccacgcgcgcagcttgtcgctcgaaaagtcgccgtacgcgcgcttggtgatgacatgcccgtgcaccgccatctcttcgaggatagccggcaatttattgtgcggaatattttccgcgtctatgagcactgcgatttttttttgttcgtctatatctaccatgacaacgagtatagcatattttccgccgattgcaactacggccgcgctgacggaaaatatgtgcgataaaaatagctgtattttgcagcggcttcgtttgcggtactcggtctatttccgcacggtcatatcggcgtcgatcaaaagcgtgtgcgtaaatccgtcttcttcatacgtgtaaaaggtcccctgcacggtgatgttcgtattcggttcggggtaatcggcggggtatgcatgttctccgcgcaatcggaattcgattccctgtgcgcagcacgcggtcgcatccataatgatacacgcaaaggtatacgtaccttttttttcatcgggatagacgtaaaacataccgttcatttttacggttttgccgacgtaattttccggctcgaccatcatattgaacacttcggcatacaccatcgtcgcgctcatccgcgtcaaatcgacgactcccgtgtttcgtttttgagaaaagagcgcatttttaatctgagccggcaaagcttttgcacagcctgagagcattccgacggcaagcaaaacgcataattttattcgtatggagggttcaatataccgacgcgctgcggcgagtttgtttattaattttttcatcaagcacatctccgcttcagattttcgatacaggaaaaaacaatgaatactataatgtgaccggcgacgattgtcgagccgacgggagttccggcgacgatcgaaatagcaagtccgaagaatgcacagccgaccgacagcagcaccgaacagatcgtaacggctttaaagcttttaaaaacccgcatagccgacagagcgggaaagatgatgagcgcggagatgagcaaagaaccgacgagattcatcgcgagcacgataacgatcgcggtaacgactgcgatgagcaaattgtatacgcccgcccgagtgccgactgcgcgcgcaaaactttcgtcgaaggtaacggcaaaaatcttttgataaaacagcatgaacagcgcaacgacaatgatcgacaacacgacgcatacgattacttccgattttgtcagcgttaaaatcgatgtcgaaccgaagagcgtgctgcatacgtcgccggtcaaatttgccgacgtcgaaaatatattcatcaagagatagccgatcgcaagcgcgccgacggaaatcatcgcaatcgcggcatctcctttgattttcgtattttgtccggtgcgcagcaaaaggatcgcgcagagaacggttaccggcagcataaggagcatattatttgaaaaacgcaaaacggttgcaacggccatagcaccgaatgcgacgtgggaaagcccgtcgccgataaacgaaaagcgcttgagcacgagggttacgccgagcagcgacgaacacagcgcgatcaaaataccgacgataaacgcatagcgcacaaaaggatagcctacataaaatgaaatttcttctatcatgccgttcatcgcattttgctcctcgattccggcggcaaaccgcccgctccgttttgcacgaacgcttccttcgtttgaaacgtcgctcgctccccccctatgtgcaggatatgcgtcgcataacgcaaggcagaagggatatcgtgcgaaatcataatgatcgtaacgccgtcgtcgtgcaattcctgtatcaatcgatacatatcttccgtcgcattcggatcgagtcccgataccggttcgtccaaaagcaaaagtttttgcgtggaacaaaatgcccgcgcaagcaacacgcgctgctgctgcccgccggaaagatcgcggtacgagcggcctgcaaaacgcgcgatgcccatccgttccatactttcggcggcaagacgcttttccgctttgttgtaaaacgggcgcataccgcaccttccctgacagccggaaagaacgatctcgtacacagacgcggggaagtcccgctgtacgagcgtctgctgcggcagatagcctatttcattccgtttcaaaccgtcgcccgtcacaatcgtaccgcttgaaggggcgtgaagtccgagcagcgtttttatcaatgtcgttttgcccgaaccgttttccccgacaacgcagaggtaatcgcctgagtttacggaaaaagtgatatcgcgcacgatcacgtttgcgtcgtatttcaacgatacgttttgacaagcgagcaatgccatacagcctccaaaaacgcgcgtttgcaaatgcaaaacgtcccgcagacggaacgcacccgcagggcattccgcctgaagcgctttactgcagcgccgatttcaacacgtcggcgtttttcgtcataatcgacagataggtgataccttttttgacatcattcgacgtcgtcgattgcatcgaatcgagtgtcaaaatcttttgatttttcgctttcgtatttttaataatcgtcttggcaatttttccgtccgacttttcgatcgtcagtacggcgggaatgcccaactcatcgactttttttgcgagaaataaaatcgttttaaaactcgcttccgtttccgcagaacagccgacaaaggccgcataatacgaaagaccgtaatcgtctacgagatagcggaacggaaagcggtcaccgaagagaaccgtttttttcgacgccgcatcgacgatcttttgatactgcgcatcgagcgccgaaagttttgcagtgtaagcggcggcgtttgcacgataggtttgcgcgtttttcggatcgatttccgcaattttttcggcaatcgtattgcacaagatttttgcatttttcacggacagccaaatgtgctcgtcgtattccggcccctcttcatcttcaccgtgttcatgatggtgttcgccggcgctttcgtgttcgtgatgatgctcatccgcgctttcgtgatcgtgatcggcttccatgccttcgacgacttcttcttccttcgccgcatctccgagcgaatcgaggagtttcagcacgacgctgtttttatttttgatctctttgcacgcatcatccatccacccttcggattcgccgccgacataaacaaaaaaattacattcggcaatcttcgcgacatcggcaaccgccggctgatagctgtgcagatcgacaccgttgtcgagcagcagtgtgagatcgattttcgccgcgctgtttttcgttatttcgcgaacccaatcgtacacggggaaaatatcggtaacgatttttaccgtaccgtccgacgcattttttttagcaggtgcggcaacagcgccccctgcaacgagcgctgcaaaaatcaatgcagacgcaatcttaataatattttttttcataataattttataacctctttcaatttatttttgttttttacaaaaccgcacagtcgacaagcaagggcggcatatcgattaaaagtccttgtcaattatttaatttaatcttttgcgagacgagcgtcaaacaaaatgccgagacacaaaaatatattaccgcttccacccgctcatacgagggagcagcgacatacgcagtttcggccaaatagattttcagctgcaataaattgttttttaccgaacggatacacgcgcatacggggcaatcctctccactgcaaacgtgaacgctttcgtgaactatgtacccgacggaaacgatcgttatcaaaaataatacggcataagcacatagcgctcgcttcgtttgcgccgcttttcgcgcataaacgtaactcaatctctgcatacgtttcgttttcccgccgaacaccgtgcgtgctttcgccccgaacattcgccgcaggttccgtagagcaccgtccggtacgaatcgattttaaatccgtgagatgccagcagatggctttgcatcgccgaaaatttcgaacagcacacgtggatcagcttgccgcagtctttgcatttgcagtgaaaatacggttccgcgtcgtgccgttttttgccgccggtgtattcgaaacaggcggggctgttggcgtcgatgatgtatttgttgacgatgccctcttcgaccatgtgttcgagccggcggtataccgtcgccgtaccgatcgctttgccgtgcgatttaaaatacgaacagaccgcatgcaccgtaatgtgcgtacctttcatcgattccaaaaatgcgagcaattcttcgtgttgttttgttttgtactgacttttcgtattcatacgcgcaattctcaaaatgagaacgattctcattttaccgaattccgcaagatgctgtcaaggagagggaaaggaggttttcgcacacggcggtattgtatgcacggcaatgtacgcatggcgacgtgcatgtttctaaaaaacaaaaaggaagccgaagcttccttttttcacgtgatgatttttacattttagtaaaatgtaaaaacattttgcggagtcaaagactccttgttagcaggttgatcaaaaaaattaatcagtaaccgtagtgtataacaaaattattttattgtcaaatatttttttcggccatattttttttacacagtttatatttttgtgctataattatcattatgaatgataaaaatcaaaagtaccgcttgggactcgatctgggtaccaattcaatcggctggtgtatatattcattggacgtcaacaataaacctgaaacgcttatcgatatgggcgttcgaatattttccgacgggcgtgacccgaagacaaaggaaccgcttgccgtggaacgcagaactgcacgcggattgcggcggattttgcatcgaagaaagctgcgcagaaggcagatgtttcgcctgctgcaggaacaaggcttgatgccgaacgatgcctctgaagcggcagcgcttaaatccttaaatccgtatgaactccgcgtaaaagcgctggatacaaaactcgaaccgtatgaactcggccgcgctttatttaatttatccgtccgccgcggatttaaaagcaatagaaaagaagcggtacaggaaaaagaaaaagacagtcaaaacgatgcaaaatcacaaaatgaaaaatgcgaacaccttgcaaaagcgataaaagattcgggctgcagaacacttggtgaatttttgtggaaacataaaaatacggaaacgcagcaaacagaaaacgatgcacgcaatatcggcatgcgctttgtgcccggccgttcgaattattatccgactcgccgaatgtatgtcgaagaattcgatgcaatccgcaaagcgcaggaaccctattacagcggcgtaaattgggatgcgcttcatgaaaaattgttttaccagcggccgctccgtgcgcaggaacgcggcaagtgccggtatatgcccgacaaagagcgcacctttaaagcgatgccctgctcgcaaaagatccgcattctacaagaagtatacaacatggattacatcgacgaatacgggaaaacgattccgctcgaagaagctcaaacggacagcttgatttcgctgctcgacaaaagagaaaagctttcatttaaggcaatgaaaaaagagctggggatcgatgaatcctgtacgtttaatttggaaagaggcggacgggaatatttacaaggaaatgcagccgccgttaaattgcgcaacaaaaaaagattcggcgaattatgggattctctttctttggcaaagcaagacgcgatcgttgaaaaactgattacggcagacgaagatgcggaaatcatctccatgcttgcgcagtataatttaacggacgagcagaagaaaaatattgccgttaccgtcctgccgtcgggaacggcgatgctgtgtaaagaagtgacggagatgctcgttcaaaaaatggaacaaaacaaaataccgctgaccgttgccgttcagatgctcggttatacatacgccgatcaatcggttcgtgaagaagatacgcttccctactacggtgcaattttaaccggttccactatgggagcgcatccggaggcggatgaatcggaacctgaattgaaatacggaaaaataagcaatccgaccgtacacgtagcgctgaatcaaacccgcaccgttgtaaacgcgctgataaaagcgtacggtaagccgcagcaaatagtcgtagagctttcacgcgatttgaaagcgagcagagaagcaaaagcacgaattcaaaaaacgatcactatgaaccaaaagcgcaatgagcgggacaataaaaatattacagatatcacaaagattccataccctaacagaaacgaccgattaaaataccgcttatgggaagaattaggcagcggcagcaattctttcagcagaaagtgtttgtattgcggaaagcccatcagcggatctgaaatttttacagaaaatattgaaatagaacatatccttccgttcggacgcacgctctttgacggcgaaacgaataaaacggtcgcgcatacggactgcaatagggataaaggcgaccgctcgccgtttgaagccttcggttcgagtccgaacgggtataattggcatgagatttgcgcaagagcaaattcgttaaaaaatcctgcaaagagaacgctgttcgcagaaaacgcgatggaaaaatttgaaaaagacaactcttttatacagcgtcagcttaccgacaatgcctacctctcacgttccgcgctgcggtatctgcgatgcatctgcaaagatgtgtggtcgatcaacggaggcatgacaaaactgttgcgcgacaagtggaatatagattcgattttaaaacggaaaatcgacgatcctgaaatagcgcatttcgaattaaaaaacgatcaaatcggacaatacaaaaagaaccgctacgaccatcgtcatcatgcccttgacgcttccgtcatcgcattgatcgaccgcgcaatggtgcaggagatttcacagctaaacaaaattcggctaaaaaacagaatcgaagcgccgcaaatgcccgtactccgcagcgaattgatcgaaaaagtaaagcatatcacggtcagtttcaaacccgatcacggtcggcagggaaagctttcaaaagaaacgcttctcggcaaaataaaaaagattgaaaaagtcgatatcgattccatacaaacggatgatattgcctcgataaaggacgatgcaatccgtactcggtttgaaacaaaacgccgcgaacttggcgatataacaaaagcaaaagccgcattaaaaaccgagtttccgaaattggacgtctttaaaacatactatgtttcgcgtacgccgatagtgtcgcttacggagaaaaacataaacagtatcgtcgatgaaaaaataaaagaaaaactgaaaacatttattaaagaacatgccgatttgtcttttgcggaacagctgcaaaaattcagcgaaacggaatggatcggaaaaccgagcgcggcaggtaaacccggcaaaaaataccgcatcgaaaaggtgcgctgtataaactggggacaaacaccgattacgattacgagttccgccgtcccccgttacctgtgtccggaagattatttagcggccgtcgtttggcaaataccgtccaaaaagaaagataccgaacccgaatacaaagcgacatttctccgacgtgatgaatttgacgtcaacaataaacctaaaaaattggaaaaaccgcatgatgcggcacagtatatctgtatgctctataaagacgactacctcgagttcactgaaagcggggcaacacatctttgcagaatagcagggcttccggcatcgcaaaataacaagatcgacatccgcccgatatatgcggtttctgactgtaaagattggattatcgcgacaaatgaaaatatgcttgagccctgctggaaaccgcaaaaagaagaaaagcgtatttcggtaaatgtgctgttcggaaagcacaaagcgcgcagcgtaacggttaatccgatcggacgtgttttccgaaaataataatttcccgtgtatatgccgataatacatacggcgtgatacacagagttttggaaatctatgaagaaaaccgttatcttgctctcagccgaggttttatagtcatcaagcatgaagatgaaacgctcggcgaagtgccgcttgacgatatcggcgtattgttgctttcggcacagagcgttgtcttgtcaaaaaatatattaaatgcgttgacggagcacggctgcattaccatactctgcggtaaaaactatgcaccgcaaagtatggttttgcccattgcttcgcattatctgtttgcaaaaattataaaaaatcaaatagaagcttcggctccgctcaaaaaacgaatctggcagcaaattgtcattcgtaaaataaaaaatcaggcacaaatattgcatttggacggaaaagaagaaaatgcaaagcttgtcgataaaatatcgtcgcttgtaaaatcgggcgatcctgataaccgtgaagcttatgccgcaaaactgtattggaaagctttattcgacaaagactttcttcgcgatagaaatgaggaaggcatcaattccctgctcaattacggatatgccgtaatgcgggcggccatggcgcgtgcggtatgttccgcaggtctttttccgtcgctcggcattcaccacgataataatttaaatcaattttgcctcgtcgatgatctctttgaaatatatcgcccgctcgtcgattttaccgtcgccaaattacaaaaagaaggaaatgaaatacttacaccggaaataaaaaagcggctctccgacgtactgtggataaaactccatacaactgaagggaattcaccggcttttcaaagtatgcaatatatggcaaatgcctatgcacgtgcgctggaaaataaaaaaccggatatcgaactgcccctatgggacggagatgaaaatgcgcgatttgattttgaataagtatgaacttatgtggatgatggtattatttgacctgccggtcattgaaaaaaaagaacgaaaagatgctacggaattcagaaaatttttgctggataacggtttttcaatggttcaatattcgatttatacaaaattattttcgggaaaagatgcttgcgaaaaatattacaaaatgatacacgacaacttgccgacaaaaggaaaagttgatattatcacgataacggacagacagtatggcaatatcatcagttataatgcgggcgaaaaacggcaaaaaaagcagccggaacagtttcttttattctgattttcgtttaaaaataacacgtccggcacaaaccatttctttgtattgtaacggtttacgccggacgtattataactgattaatttttctggtcaacctgcaacaggcacttatggattaagaaaacgaaaaggattataactgattaatttttctggtcaacctgcaactgaaaacacgggctatgtcgaaacgccgacattataactgattaatttttctggtcaacctgcaaccggcgatgcggatattagcaagatgattgtattataactgattaatttttctggtcaacctgcaacctctgcgcttgtcgtgtcactttttactccattataactgattaatttttctggtcaacctgcaacatacgcctgcataacagcgtttttatcataattataactgattaatttttctggtcaacctgcaacggacgagttaggtaataaaatgcccgttatattataactgattaatttttctggtcaacctgcaacaaaaagagctcgcaaagtacaatctgtctgattataactgattaatttttctggtcaacctgcaacgttttgtctgtagctttgttatagaaatctattataactgattaatttttctggtcaacctgcaacctaccgctaaatccacgacacctgacttcaattataactgattaatttttctggtcaacctgcaaccgttgcacaatcttttatagctataatatattataactgattaatttttctggtcaacctgcaactgcataggtatgtacaatggcaaggattacattataactgattaatttttctggtcaacctgcaaccaacggtagaatgtattaccctaagtccgtattataactgattaatttttctggtcaacctgcaactgggaaaacgtgtcgatatgtattttgacgattataactgattaatttttctggtcaacctgcaacatcgcgctgtttaaacagtatatcgacctcaattataactgattaatttttctggtcaacctgcaactcatctggaaacaagtatttaaaactactcattataactgattaatttttctggtcaacctgcaactatgaatggcgacatatcgtcctcaatgccattataactgattaatttttctggtcaacctgcaacagccaagctcgtacatctttgagagcgcatattataactgattaatttttctggtcaacctgcaactggggcgatatacgattagggacaaccgtcattataactgattaatttttctggtcaacctgcaacggctgaaaaaagattgagcgccgatgcggtattataactgattaatttttctggtcaacctgcaaccgttaaatgttgtgcatagcacaagccgacattataactgattaatttttctggtcaacctgcaactagactgtcaactgtaaatccgtacaatttattataactgattaatttttctggtcaacctgcaacaagcagttcgtactcaaaacactggtttacattataactgattaatttttctggtcaacctgcaacctgtgacttccgacatattatttacttttgattataactgattaattctcccggtcaagttacaaatccgtaacacagcgaccgcatgaattacccatagttaatttttttctaccaaccttaaactacgtcctcgtcaacatagtacacgcgacctatcgtaaactccgcagcgtcaaaaagcgcatgagctatccattcatcggagcattgtcgtaaaagcatcgccgctatctcgcactcattgtcgcctgtgaacagtaccacattagtcatcgtgtattccctgctgctctcgaagcctattccacaacacagcatcacccttaccgagcatcttatatgcactgagaataaagtccgtgaactcccagttatcgctttcacgataattgtaatcatgaagcgacggatgtcccataggtaagcacgtttcagcatctatgtaaaaccactcaccttctacattaacaccgacaaacgtatgacgaataacattattacaaaacaaccgtgcgcgcttcggctcagttccaccgttccacaggatataccagatcaacgcccaatcattacagtttatcttgtgctcgccatacggatttacaatatcatgaattttttcgtgaagttccttcttaaactcgtcatagtgcagaaagtcttctacatgtacctcttgtatagcgtagcttgacggagggggaggtgttgcacctgcacttgaaagcagtgcaacaaaaagaattgcgaaaaataattgtttcataaaaactcctaaaagaaaatagacaacgccggtacttcactttatcggtatagtttctttcctcaaaatattataaccgattaatttttccggtcaacctgcaatatagaaaaacgtataaaaaacttacgagaaattatacgtataataatttttggagtcagtaccggtttccgatcttttttctacagcgcaatccttccgcggaagctccgcattaaagtcagcttatcggtatattccaaatcgccgccgacaggaatgccggatgcaaggcgcgtcacttttacgccgccgatttttgcaaggagctgctgcacgtacaatgccgtcgtatcgccttctaccgtcgggttcgtcgcgatgattatctcttcgatgtgttcgtcttttacgcgggaaaggagagaggcgatacgcagctgatcggggccgatgccgtcgatcggagaaatcacaccgccgagcacgtgatacagaccggtgtattcgtgtgcgctttctatcgtctgcacgtcctgcggctgttcgacgacgcagatgagggttttgtcgcggagcggattcgagcagataggacagggatcgtcttccgtccacgaaccgcagaccgaacactgtttgattctatcttgaagaacggaaagctgttcggcaaaacgattcacataagcgcgatcggattttaataaataatgcacgatacgtgacgcgctctttttcccgatgcccggaagatgcgaaaacgaatcgacgagttcttcgagcgcgttcatacattcaatccggggatattgagtccctgcaagagcgaaccggttttcgctttaatccgttcctgtatattggcgatcgcatcgtgatgagcggcgacaatcaaatcttcgagcatcgcgacatcgcgcttgtcgacgcaaatgggatcgatgtgaatcgcagtcatctccatttttccgttcacggtaacggtaaccattttaccgccggacgaaccgtcgacggataacgcggcgagttcattctgcatcttttgcgcttcttctttgagctttgccgtattttgcaataattcgaacggattcatctatatttttccccctactatgcttcccttaaaaacactgcacaggatttttatttgctgcggcacttcggacggccccgccgcctcttcgatttcttttaaactcaccgaaaaatccatgcgccgctcacacactttttcaagcgtccgcaaaatcgcgtcgcgctgccgttcaagctgcgtcttttgatacgccgttgcagcctgcgtagaaatcgtatcgcctgaaatttgccacggagtcgtcgtcataagcgctgcggcagtcggcgcatcgtgtatgccgagctcggcgataacgctccctcgaagctgtgcaagggtaatcgtgcggccgccgcccgttacataggattgcgcttcatcttgcgcgtcgtccgcactctcggcgggaagcgatggaatgtatgccgttacgccggaaccgccgctttcatccgcatcgtccgaagtttcattcgcatcgtcagtatcgtcgaaatcgccgtcatcaaaatcgtcgaaagagaggttactttcccataaaggaacgctttgaggcgacgcctgtacttccggtcgatcctcgcttttcgctgccgcttgttcaggcggcacggccccgccgttataaaaagggctttcgttctccggcgcctgttccgcgagggctgaaaaacgcggcatagtcttgggcatttccgaagcggcacggctttgtgccgaagaggcaaaagcgttttgagccgtactttgcgaacttcctccgtttccgccggcaataccgtcaggcaccaagggagaggcagtttgcgtatacgccgcatcggttccgggtgattgcctagcagattgcgcatacgccgcattgcccccgatcgattgacgcgcagcccgtcctgccgccgcatcgttttgtgcagcgcgccccgcgtcttgcaccggcacgggagatcccgccgtcaacaatgaacgggcggaatcgatcgcggatttgacttcggcgggcgacacgtactcggaaagccagcacagacgcgaaaacgcaagttcgagctcatagcgcggcgaaagcgaataacggatatcgcggtagagctgcaaaaaaatcgaaagcgcgcgctcaacctgcaccgtattccacgcttcgatgacggcggaactgtaacgttcggctgaactgccgagcagcgattcttttgtaatgccgtttttaatcaataaaagacttcggatataattcgtactgtttgcgatcagttgttcgatcgaaatacccgattcgagatacgcgtcgagtacgccgatcgcgtcgtcggctttgcccgccgcacacttttcaaataattcattgagcctgtccacgccgacgagaccgagcttgtcgcggatcttatcgtacgtgatgacgccgtcgctgaacgccgcaacttgatcgaaaagcgtatacgcgtcgcggatcgagccggtcgcctctcgtgcaatccaatagagggcttcgtcgtcggcttgaatcgacaattcacgtaccgcatcggcaagcaaatcctttatcttttctgcggaaacgagacggaaattgaattgctgacaacggcttttaatcgtagccggaactttttgcagctccgtcgtcgcaaaaataaagacgacgtagggcggcggctcttcgatcgtttttaaaagcgcgttgaacgcactcgtcgaaagcatgtgcacttcgtcgatgatatagattttataacgagacgaattcggcgggaacatcacttcgtctttgatttggcgcacgtcgttgacgctcgtattcgacgcgccgtctatttcgataacgtcgagactcgcgcctttcgtgatttccgtacaatgcgcgcaggtgccgcacggagcaggcgtcggcccgttttcgcagttgagcgcttttgcgaggatgcgcgccgtagacgttttgccgcagccgcgcggaccggaaaacaaatacgcatgagcgatctgatgcgacgtgatcgaatttttcaaagtttccgcaacaaattcctgcccgaccaaatcggaaaattgctgcggccgccgccgcgtcgccgtaacttcgtaagccataaaatgagtgtaatataaaacgccgaaatcggcaacgggaaaggcgaagcgcgtcaatctaaacgctacgaatgtcgtcaatcgttcagccgtacggatcggtttaccagccgatgcgggactgcggtaaagaccgtcattttcccaagcgcggaagcaggtttttaatgtgtaatgggtaatgtgtaattaccactacccattatcaactacccgctgcccattaaattacattaaatttcttgcgcattcccgtccgcatcatacttatacatcgtccacttcttgtcggttttcgcggtttcaaaggcgtttttcagtgcatcaggtacggtaaagtctgcgtgattgccttcggtaacgccggggtcttcggagtaaagataacactttgcattatcgccggcatcccgcgtcggtaaatcgtcaaatagctttttaaatgcggctgcagcaagctgattgcagtcgcagtacagcgttttcaaagcggaacatccctgcacgttgagcgcggcaagctgattttcgtagcaatccagcctgttcaaagcggtcaagccctgcacgtttagagttgcaagctgattgtcgctgcagtacagagattgcaaagcggaacatccctgtacgttgaacatagcaagctgattgtcgtcgcaatccagatattccaaagcggaacatccccgcacgttaagcgcgataagcttattttcgcagcaggtcaactcggtgatcttgccttttagaatcacgagtgtgccgtttgcgtgcaggtcggtttcggtgccgcttgtaagcgtcgcttcattgcagccttctaccgtaatgtcgagaccatcggaaggcgttgccgtaactttgatgttgggtttatcggagcttaagatgagcgaagcaccgccttcgacaaagggtgcttgcggcgctcccgaaccgctgtcgttcgaacagcttgtaaagacgagcgctgcggcaaacaataaagcgccgatcgctgtaatcggtatcttttttaaaagggttttaccgagcccccccctatacaaatgtacgggctcgattttgttttgttcatgcgaacctcctataaaaacttttgcaggtacttgcagcgaagcttcaagcaaagttgcaactttcgaaaaaatttttagccgtgcgcgtgcgcgcacacgtcgaatagtcgaattcgcaaaatacagtgtatcgtactcatacgatttttatcgaaacgatacatatacacatctttcgcaaacatccgcgcaaactcgagatccaaagcgacggcgccatttcagacggcgctttggatcatccctcctataaaaacttttacaagatgcttcggcatcttatcaatatcataacatatttttcataattttcaacgtagttgcgcagcaaagcggggcatcgagcgaagttccccgcgcaaccttgcaacgagcgcgaagcgcgacatccgacttttccttccttaaaatgcggcattgtagcgtctcgcttaaacgttccagcctatgcccgcgtggagcgccgcgaagcgttcccgccgcattaaagaaagtattgaggcggcgggaatgagggttaccgaagcgcggaaggcgggatggcaaaacagtgtcatccggatgacgactttatgttcggcaaagattcatccgtgtacgagtttcgcaatatccgtacctttaaaaacaaaaaaaccgctccgccgcgttcgctttcggaacgttcggagcagctgtatttatcggcttctcgcgtttacgcacgtaacgattccgctcatcattccggcgatccttacgggtatatggacgaaccgctttcgaacctcgacgcaaagcttcggatccacatgcgtacggagatccgcagaattcaaaaagcgctcggaacgacgtgtctgtacgtcacgcacgatcaatcggaagcgctcaccgtttccgacagaatcgtcgttatgagccgcggcaaagtcgaacagatcggcactccgcttgaaatatacggcaaacccgaatcggatttttggaagttcgaaaaaataaaatcgaaaataaaatcgatttgcaaaatccaaacgaccggcacgcaacaagtgccggttaattttattgatcaattctttaagatattattcccgtcattttgtacatattgtagtattattttcctcaccgcttcgtgtaattttccgcaatccaggttttgtattcgccggagagaatgtgatcgatccagtcccgatgcgaaagataccacgacaccgtacggcgaagtccttcgtcgaacgaaactttacgctgccagccgagttcggttttgattttcgtgcagtcgatcgcgtagcggaggtcgtgtccggggcggtcttttacgtgaacgatcgtcttttcaacggcagcgacgtctttatgcagttcgcctgccgtaagctcgatgagtttttgcagcagttcgatattttgcagttcattttctccgccgatattgtatttttgtccggcctcgcctttttgcaaaatgaggtacaccgcacggttgtgatcttcgacgtaaatccaatcgcgcacgttcttaccctcgccgtataccggaagctcctttccgtctcggatatttgcgatcatgagggggatgagtttttcgggaaactgatagggcccgtaattattcgagcagttcgaaagcgtaagcggcaaaccgtacgtgtggctgtatgccgacgcgatgtgatcgctcgacgctttgctcgccgaatacggagagcgcggatcgtagggcgtcgtttcggtgaaagctcccgtcgctccgagcgagccgtacacttcgtcggtgcttatgtgatgaaagagcgcgtcttcgcgcatcgaaccgtccggcttttgccaaaaattgcgcgcggcgtcgagcagcgtaaaggttcccatcacgttcgttttgataaacgcttccggccccaaaatggaacggtcaacatggctttccgccgcaaagtgcacgatcgtgtcgatatcgtattgttttaaaatacgctcgatttccgccctgtcgcagatatcggccttttcaaaaaaatagcgcgacgagccgtactcggcttcgatgtcggaaaggctttcgaggttgcccgcataagtgagacaatcgacgttgacgacgcgcccggcaaaaccgctttcgtttcctagcaaaaagcgaataaaattacagccgataaaaccg

SEQ ID NO: 825 - DNA, 17466 bp, synthetic construct
  misc_feature 1..17466: note = Synthetic
  source 1..17466: mol_type = other DNA
gattcctcgccagcgtttgagggtgccgaaaacgattttaatgaaatattccatagtttgctgtggagtatttcattcatatctccctttttacctctctcctcctctttagtccacactacctagtgaaccgcaacgctgactgtgagcgcggcgcttgtgctgccccttgaaccggcggcatatacgccgatggttcgcgtttccggtctgtctgccgacatataatcgcccgtgcgtgtcatacctgcttccttgtttacctttccccggcggtttttgcgccgtccggagacatgtggcagcttccggaaaatgggttttatccctatgtcgagtttcttcaaggaactgccgcacgccgtagcgtactaccgagttttgcggagcaaactcgcggcatagaagctcactgaacaccgcatagtaccctgctgaacggttttagggaagccttcgcgggcttttgcgggcggattagaggcgcgccttaattcacttgccgggtttttcaagtcctcatacgcatttatgagcggttcggacacttttacgcgcagcccggaaagttgtatgagtcgctcggaggcttttatgagtggctcagaggtacctctaaatctctcagagatttttatgagcggctcataaagttgtccgagtcgcccggagacttttacgggcggcgcagaaagttgtatgagcggctcgtttgacgccgttttttgccaaaaccgcttgacaaaacgccaaacatgttttatatatagcatataataaaagaattcgtggaggattttatgaaaaagaatgcgtttgctttgactgtcggtgcatgcgccgcggcaggggcgctgattgcctgccaacaggatgtgtcgccgggcatatcatttgatgcagaagtagatgccaaccgtgaagccctcgaagcaacacaaggcgacggaacttatgagtttcattttaacaatggcgctcgcgtacgtggggactgtgatggaatacagtatatcgcgccacagaccatagtacgaaaagacgggagtacaggtgtaacattcgagcagacttatgtttatgagtattttgcagcagacgctcgagaatgggaaacaagatttcttcgagcaggaattgattgcacgatacatattacacactatccacacagacattgttgggtatcattctcatcaaacatcttggtagagccgccgaagaagatgtaagcaggaaacacatacgaagcggttttgacagcgcgcaagagcagggcgaaaagccctgctctttttttatgcccggcgcacaacctgccgggtttatcaagaaggcttgccgaggattttcacgcagttgcctgctgagattggtttctggagttttccgcatacgaggctgccgagcggtatgccgaagggcgggaataagctgccgccgaatgcgggcgtctcgcctgcgcgcaagagcttgtcataggcgcggagggctcgcgctcggcttgccgttccgctatacgcgcatttgtcttctatagtatatgcgcacgtattcggcgcgctactgcacaccggatacgtgcgaccgagtttcttgaggaaactcggcatacaggctttcgcctctcgatagcccgcagatgcttacctctacgccgagggtttgcggagcaaactcggtgcagtcccagtcggcgcgcctatgcgtcttacccgttccccgcagggggaacgggcaacgccaagttccacgacacggtgcggagcatgtccccgaacacgcccgccgccgtaaccgccgcgcccgcgccgtagccccgcacggaaagcggaatgggctggtagcgcgtcgtcgtgaacacgaaggcgttttcgccgcccttcaccgcgtagagcgggtggcttgccgccacttccagcgccccgactgagcaccgtccgtccgcaatagacgcgcccattcggagcgctttgccttcccgcctgagccgcgcgatatagcccgcgaaataggcgtcggctttgggcaggttccgcaggaacatttccacgtcgcccgaatcgtcgaagtccggcgggaacgccttgctgacggcgacctcgctcagctcaagcgaaagccccgcctcccgcgcgatgatgagcgctttccgcgccacgtccattcctgacaaatcctctcgggggtcaggctcagtgtagcgcttctcgcgcgcctcccgcaccgcctcgctgaacgccgccccctcgtctaaccgcccgaatatgtacgacagcgagcccgacatgattccctgaaacgaggtgagccggtcgccgctcttgaacaggttctgcagcgtgtcgattatcggcagcccagcgcccacgttcgtctcgtacagaaagcgccggcggcttccgttcgccgtctcgcggagcgcgcggtaataactcataggcattgaattggcgcgcttgttcggcgtggtgatatgcattccggctttgaatatgtcgaggtaccgttcgggcagcccgtccgacgcggtgcagtcgacgaacacggggttgagcggcttgtgcgtccgcacaaagttcagcacggcgtccagcgacgcgggggtctccgacgcgtccagcgcgtcccgccacgccgacaggtcgagcgcttccccgcccgcgctcagaagcatcctgccgctccgcgctattcccagcacccgcacgtcgatattctgcgcggcgagacccggaagctggctccgtatctggtcgacgaggcagccgccgattgcgcccacgccgaacacgaaagcctctatcgtctgcgccgtgtgaaagaagaaccggtgcgcgacacggaccgccgtgtccccttcctcgcccgcggtaaccgcgctgatagagcgctcggaggagccttgcgcaatggcgtgaatatttatgtcgctcgacgcgagcgcgctgaagaacgtcgccgccacgccgcgcttctgcttcatgttgtcgccgactatggacacgacggcgttgtccccgcgcacttcgaccgggttgacgagccgctcgcggatttcaagctcaaactcgccttcgagcgcggcgctcaccgcgcgggaatagcgctcgtctatgcagaacgacagcgtgtattcggaactcgactgcgtgataagcagcacggagatccccgcccgcgagaccgcgctgaaggtccgcgccgccattccgctccgtcccttcatgccgggaccggacacgctcaccacggcgacattcttcaggcaggatatgccccgcaccgcctccgccgcgtccttcccgctccccgccgtccgcttcccgattcgcgtgccgcggcaggacgggtcccggctgttcaggctccacgcctcgattcctttttcggcgagcggggcgagcgtcttggggtgcagcaccttcgagccgaagaacgacagctccatagcctcttcgtagctcaggtcgtccactatgacggcgtcgggcacgattcgggggtcggcggcgaatatgccgcccacgtccgtccaaaactcgacgcgccgcgcgtccagcgcccagccgatgagcgccgcggagaagtccgagccgttgcgtccgagcagtcccggttcgtcgcgcccccacgcgcagataaagccggggaacaggaggattcgcgcttcgccgcctttttcgcccctgcggtaaggcgcgagcgccgcacccgttttggcgtagtcgacgtcgccttccgtctgcctgccggtcgcgtagataaagtcccgcgagtcgagcgcgagcgcccgctgcccgcccggaagcagcgcggacagcgtcgcctccacgatagggacgcagagtcgctcgcccaaacccataatgcggcactgcaccgacgcggggcattcgcctatcgcgtgcaccgcttcgagcagtccgccgtattcggcgaacagcggcgcgagttttttcagcaccggttccgcccggaagccgccgaccgaccgttccagattccggcagatttcctcgtggacggcggcgagggcttccgcgtagcgcaggtgcgcggcgccgatatgcgcgttctcgattccggcgctcggggttacgcagcggtctatgctctgctgtaggctgttggaaacgcccgcgaccgccgacaccaccacgctgacgcggtcttccgccgcgcgccgtagcataatccgcgcggattcaaggatccgctccgcgctgcccagcgacgcgccgccgaatttaagtgtaatcatgtcgtcatgcctctctcgcggcaggataccacaccgaggggggaatatccagagccgcgcgctcggcgcacgccggactccgcttgcttgcgcgatttttgcgcttgtatgcgcagctttcgcgcttgcctgcggaaccttcgcgcacatgttctggactattgcgctcatgttcgcaactcttgcgcccgtgttctgaacctttgcgcccgtgttcgcaacctttgcgcccgtgttcgcaacctttgcgcccgtgttcgcaactcttgcgctcgtgttctgaatggttgcgcccgtgttcgcaactcttgcgctcgtgttcgcaacctttgcgctcgtgttctgaacctttgcgcccgtgttctgaatggttgcgctcatgttcgggactgttgcgcaagcaagcgcgagtcttgaatagacctattcaaaaccggcaagccgccgctctgttttgcctatacgccgcgagtttgcgataagcgaagcggcgcaaacgcggcagcgccttatacctttgcctacaggcaaagcctatatgccaccctatgcgccgagttttttcagaaaactcgaacgttccctacggcgaacgccggcggattctctaggaattactttcggcttgtggtataccggcgccggttacggaaggttcgggcgaaaaacaccgcgttttcggcacgggaggcgggcgaatgtccgctccctttgtgcatagaaagcggcaacatattcggtatcctaccggcaaaacaaggagcgcgcaaccatgccctgcaacgcagatttcgggataatcgacgattttgacaaacagaaagactatggaggatttgaaggaagctaccaagatacgctgaaaaaatatcattgcgtttcaatagacgacgacgttttgaatgactgggcagaagattttagagaagtcaaaacatactatcactgttttagccgtcccgaaacaggatttgcgcgttacgggataacgcttatcccgccggagtcgctcgcggcgcttatcggtatagtggagcgaaaaacttcggcgcactggcggacaggtttcaatatcgccgagctgctggaactgctcaaaaaggcaaaggatgagggaaaattcgtcatagtctacggcgtataggcaaagcatatcggcgaaaggacataaaaaaaggaagccgcagcttcctttttaaggtgagcctatttatattccttactaaaagaaatataaaaggattttgcggagcaaaagctccttgttagcaggttgaccagaacaattaaccagtgcgcgtagcgtatcatgcggggcagattgctgtcaagactcgcgcgcgggattttgccggttcgctggaaaacgcgcgcggagtatagtatgattcggcgcaaggagcggcacatgaattggcggcttggactcgatttaggaacgaattctatcggctggtcggttctcagcctgaacgggcggaacgaggcggaaaagctcgaggatatgggcgtccgcattttttccgacgggcgggagccgaaaaccggcaagccgcttgccgccgcgcggaggacggcgcggggtatcaggcgaaacctgctgcggcggaaaatcaggcggcgaacgctttttcgtctcttgcaaaaagacgggctgtttccgtctctgcgcggggaagcggcggagcttaaacagctcgacccgtatgcgctgcgcgcgaaagcgctcgacgagcggcttgagccgcacgaactggggcgcgcgctctttcatctgggcgtgcggcgcggctttaagagcaaccgcaaagatgctcaaaatgagcaggatgataagaaaaaagaaaaatcagaacaaaacgaaaagatacagtgttttaagcatgaacttaaaaatgggcagatgagaacgcttggagaatatttgttcgaaacaaaagaatttcgtttttcgtctaatgctaacctgaaaaacttttaccctgatcggcaaatgtatgaggatgaattcgcggcgattaaggcaaagcaagagccgttttatccggcgcttggctgggacgcgattcacgaggcgattttcaaacaagggaaactggaacctcagaagcgaggcaagtgccagtttatggatgaggagcggacgttcaaggcaacgccgtgctcgcagcagttccgtattttacaggaggtgtttaacctcacgtataccgatgttataacgaataaggctacagagctttctccggcacagcaagacgcattaatcgccgcattagacaacaaaaaagaaatgagtttttccagcatacgcaccttgctcaagattaacggcacatttaaccttgaaacgctcaaccgtgataaattaaacggcaacgctaccgcttgcgaaatgcgaaaagacacgcatttcggcaaactgtgggatgataaaatgaagcttgcagagcaggacgcgcttatcgaaacgctgattacgactgacgaagattccgaagcggagcggtttttgaaaaaatacccgctgacctcggagcagcgaaaagcgatactcaggttcccgtttccgtccggcaccgccagcttttgcagagaggctaccgaggcgctcgttgcaacgatgcgcgaaacacgactgcaatacgataaagcggcgctggtgcttgggtatgagcactccgaccagtcggtagagcaatacgatttgctgccctattacggcaaagcgctgagcggctccactatgggcgttaaagcgacgcccgggactaatccggacgagttacagtacggcaaaatcgcaaatcccaccgtgcacgtcgcgctcaaccagacgcgcgcggtggtgaacgcgctgattaaaaaatacgggaaaccggcgcagattgttgtggaaacatcaagggatttaaaagcaagtaaagagaaaagagaagaaatcacagaacaacaaaagcagcgagcacgtcaaaatgatattgacaatcagtctataacagacggatttagaatttcgtttccaaaccgaagcgatagattaaaatatcgcttgtgggttgaacttaatgcgagcaatgcttttgagcgtcaatgtctgtattgcggaaaacaaatcaacgcggcggaattgttttctgataatatcgaaattgaccacatattgccgttcagcaagacgttgcttgacgtggaatcgaataaaaccgtcgcacactggaagtgcaaccaaataaaaggaggacggacgccttacgaagcgtttcacgcgaatccggcgggctataagtgggaagctattcgtggacgcatagcgcaattaaaaaatccggcaaagcggaggcgtttctctgccgacgcgcttacagaatttgaggataaagaagcgtttatcgctcggcagttaaaagacacccagtatattgccagaatcaacctgcaatatctcaaaacactggttgacgacaccaatatttgggcaactaccggcagaatgacaggtttgcttcgtgaaaggtgggatctagactctattttgaaacgggataccgacggcattaagcaaaaaattgacgaactatccgacaacggtaaaaaaattgcagaggcagaaaaagcaaaattgcttcgtgaagcaaaaaagaaccggagagaccaccggcaccacgctcttgacgcggtagttatcggattagtcgaccatgcattggtaaaaaaaattatgacggaaaatgcaaggggaaatcttgacaaggttaaagtacctttgtttccactgtgggctgaaatcattgagaaaatgcggaatatcgtggtgagttttaagcccgaccacggcgcgcagggcaagctttcaaaagaaaccgcgcttggacgcatacggcaggaagcgttgctgccgatagaaaagcttacgaaggacgacgtccctcacataaaggatacgcgcgtccgcggcgcttttgaacagcggcttgccgaaacaaaggatttcaaagctgccgtgaaagaaatgcaaacggattatccccggatacgggtgtttcgtccttgctttgtcaaccgaataccgcttgccaacttgaaaaataaacaaaatattgctggcattgttgatatgggcattcaaaataagttgcgcgagtttgttgacgcgcacccaaatgagaagtttgacaaagcgttggtcaaattcagcgaacaaactggtatcaagcgcatacgatataagaaccatgatcaaaatccgtgggaaattaaaaccagaaagaataaatcattgccagaagaacaacggcgttattatggaactgaagattatttcgcggcgattatttgggaaattccgcccacaaaaaccggcgcaaaaccggaatacaaagcgcaatatgtgcgccggacggaaattgatacggacagtaatctaaaaccggaagcgcttgccaataaaccgcatccggcggctacaaaaatctgccagctccacaaaaacgattacattgagtttgcggaaaatggggtgtggaaaaaagcgagaattgcaggacttaagggttcagatggcaggctggatattcgaccaatttacgcaaccgatgacgcacgaagctggataatcgcaactgccgaacaaatgctcgaaaaaagttggaaaccggttgaaggacaaaactttgtttccgtaaacgtgttgttcggcaagtatgccgcgcacaagatacgcgtttcgccgattggtgcagtgagtcgaaaagcaacatagcgtttcttcggagcaaaccgatttctgaaaacataatccctgtctggattacgccgaaaaagaaccatgattcatcagattgtagagattcacgaggaaaaccgctatctgtcgctggaacgcggttttttgaagataagcaaaggcgaagaggcagttgcccgcgttccgcttgacgacgtcgcggttttgctaatcagcgcacagagcgtgtctttttcaaagcatattctgaacgagcttgccgaacgcggcggcatttcggtgctgtgcggaaagaactatgccccgcaatcaatggttatacctgtttcggggcactatatgcagtcgggcgtcataaaaacgcagatagacgcaagcgttccctttaagaagaatatttggaaacgcgtcatcgaagaaaaactggaaaatcaggcaaaatcgctcgcgctgtgcggaaaccacgacgccgcgctgcgcttgaaaagtatcgcaaaaacggtgaaatcaggcgattcggataatcgggaagcatacggcgcgaaagtatactggaaggcgctgttcggcggtgattttattcgggataaagacggcgaagacgtcaacgcgctgctcaattacggatatgccatagcgcgcgcgtctattgcccgcgctatttgcgccgccggtttgctcccgtcattcgggatttatcacaaaaatcagttaaaccccttttgcctcgccgacgattttcttgagccgttccgcccgcttatcgatatatccgtgtatcagttggcacagcaaaaacaagccgaactcaccccggaaatcaagcgccggctgacggatatcctttgggtacaggttaagacaacggaaggcaaatcaccgctgtttcagggaatgcactatatgtgttcggcgtatacaaaagcgctgaaagagaaaaagagcgattttgacattcctgtctgggaaggcaaacatgaaacggtatccgcttctgaataagtatgagcttatgtggatgatggttttatttgatttgccggtcgttgaaaaacaggaacgaaaagacgctgtcgatttcagaaactttctgcttgacaacgggttttccatggtgcagttttcgatatatataaaagtgctctccggaacggacgcctgccaaaagtactatgggcttattgagcggcatttgccggagcaagggaaagtcgacattgttacgataacggacaaacaatatggcaacattaagagttatgcggggaaaaacaaaaaccgcaaaaaaaatccttccccgcaacttctgttattctgaaaaacagagagaaaaaatatgcccgaccatttctatttctttgcagaaaaagaagttcggtcggacatattgtaactgattaattcttttggtcaacctgcaactgtttgggagccgtcctcgtttgatagtccattgtaactgattaattcttttggtcaacctgcaacaaattacgaaaaaggagtgtcttctccttcattgtaactgattaattcttttggtcaacctgcaactcaaggaagccggcgcaaaacgagctgttctattgtaactgattaattcttttggtcaacctgcaacaggttacgctcatagacagcggcgcgtttaattgtaactgattaattcttttggtcaacctgcaacacgtaataccttatgtcgtaccttgtaatgattgtaactgattaattcttttggtcaacctgcaaccccctttttgccgttgccaatgatgcccttattgtaactgattaattcttttggtcaacctgcaacttgtatgaattggatacttttattccatcaattgtaactgattaattcttttggtcaacctgcaacatacatgttttctttggtgctgagcgtattattgtaactgattaattcttttggtcaacctgcaacatgttgtgtaagtccccgttctatctggagattgtaactgattaattcttttggtcaacctgcaacgaccgacagcaacagacggatgggtacgacattgtaactgattaattcttttggtcaacctgcaacatgtcacaggtcaaagacgccagtgccgctattgtaactgattaattcttttggtcaacctgcaacggaaaatatcgctttattatataaattgatattgtaactgattaattcttttggtcaacctgcaacacgcgttaatcttatgcagaggaggaacggattgtaactgattaattcttttggtcaacctgcaacactaccatgccattgttttcggacttggcaattgtaactgattaattcttttggtcaacctgcaacttaacctgagccatcgaagaacgatagtttattgtaactgattaattcttttggtcaacctgcaactcgtttccacacggtagtgacacccctcccattgtaactgattaattcttttggtcaacctgcaacgatatttctcagactaagatgcagatggctattgtaactgattaattcttttggtcaacctgcaacaaaaaagctgaaggtctcgtttacgcaaacattgtaactgattaattcttttggtcaacctgcaacttgacctgagccatcgaagaacgatagtttattgtaactgattaattcttttggtcaacctgcaactattctgaaaagaagtgttttcttacgcttattgtaactgattaattcttttggtcaacctgcaacgtacaggctcgtgcgatagaacgagaagaaattgtaactgattaattcttttggtcaacctgcaacacagaggcagctgatgccgtctggggcattattgtaactgattaattcttttggtcaacctgcaacgtgttaatctccccactgatatggtcgaaaattgtaactgattaattcttttggtcaacctgcaaccctcccgtcctcgtggctggtacaccccggattgtaactgattaattcttttggtcaacctgcaaccagttcgttctgcataacccgccgcgtgtaattgtaactgattaattcttttggtcaacctgcaacccaaaagctggacgaggcgcgtgaccgtctattgtaactgattaattcttttggtcaacctgcaacagttcgtgccttcaagaagcggcgcccctaattgtaactgattaattcttttggtcaacctgcaacctgtttgcagtcattctacctccggggtcattgtaactgattaattcttttggtcaacctgcaacatcaagacgcgcagtttagcgtgctctttaattgtaactgattaattcttttggtcaacctgcaactaaagttcgtgaatggacacttcggctatcattgtaactgattaattcttttggtcaacctgcaacgtcgattggtattcgtctatgagaaataatattgtaactgattaattcttttggccaacctgcaacgatactaaggaacagcatgatacgcgtttcattgtaactgattaattcttttggtcaacctgcaacgtacagggcgcacggcgagtaagaaaaagaattgtaactgattaattcttttagtcaacctgcaacgggaatcttcgtgcacatgttctggactcttgcgctcatgttcgcaactgttgcgctcatgttctgaatgattgcgcacacgttcgggattgttgcgcccgtgttctgaacctttgcgctcatgttcgcaactgttgcgctcgtgttctgaatggttgcgcacgtgttctgaatggttgcgctcatgttcgggactgttgcgcaagcaagcgcgacttttgaatagacctgttcaacagttgccgcagcttcgccggcggaaagggcgcttgccgggtttgcttcgcaagctcgcgacggagagacaaagcctgtttgccgcgcataagcgaaaagcggcggggcaaaagcggcaacaaatgcgttgcgcgggcgcggaggtgtgcgctgattcaccggcgggcacaaaaaaacagggttgttgccctgcctctgccgtaaatgccggattccttcaaggaacccggaccttgcccataagaggaacgcttacgccgcttccccgcagtgcagttttttgcagacggcgcgttccgccgcttcgagcgccgtgttggcaaaaatcgccagtccggcggcgaggattgctccccagatgatttttgccatattcatcgtgcgcagcccgtcgaacagcagcgcgccgattccgcccgcgttgatgattgcggcaatcgtcccgattccgatagtggaaatcaccgcaaggcgaatccccgccatgattgcgggaaacgcgagcggcaccttgatttttgcgagcacctgcgccgggctcatgcctatgccgacggcggcttccacgacggcatcgtcgaccgcgctcagccccgcgaggaaattgcgcaccagcagaaactggttgtacagcaccagcacaaagaccgccgtctgcaagccgagtcccagaaccggaatcagcagtgaaaagagcgcgaggcttgggatagcgtacaccgcgccgagcgcgcggagcgcggccgccgtgcgtttcttcgcgccgagcagcaaaagcgtaatgacggacgcgaccagcaccgaaatcgcaacggatacgcccagaataacgcagtggcgcgacagcgcttcggtgaggcgcgagtggtgcacaaaatagttccgcattaggcgccgtccccgccgcgcgtctgcgcgctgaccgcgccggacgacgctatcagttccctgacgaagtcgtttgccggcttatggacgatagcgtccggcgtgtcgaactgctggactgtcccctggtgcatgataagcacgcggtttcccagtttgaatgcttcgccgacgtcatgcgtcacaaacagataggtgcgccgatatttttggtgtatctgtagcagttcgttctgtaggctggcgcggtttatcgcgtcgattgcgccgaacggctcgtcgagcagcattaccgcgggttccgccgccattgcgcgcgcaagccccacccgctgctgctgtccgcccgacagcgccgacgggtgccgtttctgaaactcggcggggtcgagcctgaccagcgtcaaaagctcttccacccgctttttgattcgcgccgcgtcccacttcaagatacggggaaccaccgcgatgttttcaaaaaccgtcatgtgcgggaacagccccgcctgctgaatcacgtagccgattccgtgccggagccgcaccgcgtccttcgtgctgatatcctcgccgaaaagccgcactgtgccgccgtccggctcgtaaaggcggtttaccattttgagaagcgtcgtcttcccgcagcccgacgtgccgacgagcgtgacgaactcgccttccgctatgctgagtgaaacgtggtcgaccgcgttgcgccgcgcgtccggaaagcgctttactacgtcgtcaaaaaccagcgcatgcacggcgctaccgcttcgtcgaaacgtaaaactcttttgcgacttctgcgtattcgcgtttgtccgcgtcgaccttcgcgttgagcgccgttatcgtcggcgtgtcgatttttgcgtcgacggcgttcaggatatccgcaatccgggggtatctgtccagcacattctgccggacaaccggcgcgatattgtacggcggccacgcctgcttgtcgtcgtccagaagcacgaattgggggtcggttaagtgtccgtcggtcgtccacgccggagccgcgtccgctttccccgacgacagcagcgggtatctgagcgagtccgcatacacgttgctcgatttccagcggaacggcccgtatatcttgataaggcgcggcagcgcgtcctcccgttcgtcaaactctccctgcgacgcgaagcgaatgttccgcgcgttccgctgcaggtcggaaatagtgcggattccgtacttgtccgacgccgccttgctcaccattaccccttgcccgtcatttgccttcgcgtaattgagccagactatgtcgaactgttttttgtatccctcctttacgaggcggtatacttcgtcagggtcggtctccaagccgagtttcagcacgacaagcaagcctgtcccggtgtattcggggtagaggtctatggaattattggtgagcgccgtatgcacgacggagcttgccaaatcaaacgtgcgctcgacggggattcccgcgtcttcaagcgcaagcgcgtagatttcggcaagaatcaggttttcggtgaaattttttgacccgattcgcaccttctgcgttttccctctgtctttttgcggggcggcaaaggcagcgcccgcaacaacagccgcaaacaaaagcgcggcggctgtttttgttgttcttttcatatataactccttattttccgaacaatgatagagatactctgttttccataaacgaaagcaaacagtccgcggcaacggaaaagagcgcgaccgagacgccgcctataagcagcagctcggttcgcattaagccgagaccggtaaagatgatagtgcccaagccgcccccgccgatatatgcggcaagcgtcgcgctcgcgataacctcaattgccgcggttttgaaccccgcaagcgtcagcggaagcgcaagcggcgcttttatcagaaaaaacacccgccgcgcgctcattcccattccccgcgccgtctccagcaccggaagcggaatcgaactaaacgcgacagtcgcgttgattaaaatcggcgggatagccagaaacgcgagcgcaataaccgccggctgcatgcctgttcccagcacgggtatgcagagaagcagcacggcgaggctcggaataatgcggagcgtcgcaaacacgccggtaatcgccgcgcggagccgttttgtccgcgcgcacacgattcccgccggaagcgcaacggcgcaggcaagcgcaagcgcggctatgcttataaaaaagtgctgcgccgccgccagtccgtatttcgtcccatttcgcgcaaaatagtcgataaacgcctgcgtcatgcggctccgtccgcccgaaagcgccccgcgtccggcacaatcgacccttcctgcggctgcgcaagctgcggtatccattcatagggaagacggtacgcacggtacaccatattcatgacgccgccgttcgcgctctcataatacgggtgaacatattcccacaccgtcttatagtctcgcgttacctcaaaaatcctcccgtcggaaccctcgtctatcagcgtgttgccgttcggaagccgctgcgccgaactgatataggggctgtaaaaccggtaattatccgcaaatcccgctttccgcgccgtatactcccacacgatttcaagcgttacggggttgaactcgacgacgcgcgagtagtcgcggtgtacgctgttgattccgtaacgcgacgtgctgcccggctgcccgtagccgccccagccgccgttgtcgaagaccaataggttgccctcgcccggaagcccgcggggtatcatgtgcaggtggtgctgcccgataatccagccgagttttttgagcgcttcagtttcgcggaagtccggtccgattcgccagacgattttgcccgttttcttgtcggtaatggcgaggatattggcgttccgcgcgtcccagataatgttgtcggggtgaaatcgttcgtcgcccgcgtcatgccatttgttcaaaccgagcgtggaagggctatacggtctttcagtcggcaaagggcgcgttgcttatcgacatgcgcgggaacgaggtgcagctttgggcggggctgcacggttttccgaacaaggtgttgccgggcggctttgtgttcggctcgtcgggcgcccgaaaccccaaatacgggtatcaggaccagaacgacctgctgcaggtcgactgggacggaaacgtcgtgtggaaatacgaccgcagcgagtttatcaaagacccggacacgactccggctttttcggcgcggcagcaccacgactttcagcgggaaggctcgtctaccggctactatgcgcccgggcaaaaaccgaaaaccgacagcggcaatacgctgattctgacgcacaaggacgttgtcaacccccggatatcggctcagccgcttctggacgaccgcatcgtcgaagtcgactgggacggcaataccgtgtgggagtggttgccgaacgagcattttgacgaactcggctttgacgaaacggcgaaaaacgtgttgttccgcgacccgtcgctcgtggcgaccggacggggggactggctgcacataaattgcatatccacgctcggttcgaacaaatggcatgacgcgggggacgaacgatttcaccccgacaaccttatctgggccgcgcggaacgccaatatcctcccccttaccgacaagaaaacgggccaaatcggctggccgatccg

SEQ ID NO: 826 - DNA, 15506 bp, synthetic construct
  source 1..15506: mol_type = other DNA
  misc_feature 1..15506: note = Synthetic
  variation 1335..1392: note = n is a, c, g, or t
ttggccgtttcatctgaataccagaaaggctcaaacttttattttgcagttccccaggatgccgtttcacaaaagacggtcggagaagcctatgcacctcttataaaagaagctctggcagacaaaaaaaatccttcggtaaaggacatagattcaagccttttccaaagaagcgaattctctgtcctctttgccacaaacgattctgcttcctttagcaaagatgcaaactttattgcaccggatgccaaggttcttgttgtggacgacaaccttgtgaacattcaggttgcagaaggaatgttgaaaaagttttccattgttccagacactgctttaagcggtttggaaagccttgaaatgctaagcgaaaaatcctacgaccttgtctttatggaccaccagatgcctgtcatggacggtgttgaaaccctaataaaaatccgcggttcagaaactaacagccacactgtcgtaatcgcccttagtgcaaatgccataaacggtgcaagggaaatgttcattcaaaaaggctttgacgattttctttccaagccggttcagataaaagactttgcaatggcgctaaaaaaatggctgccacaaaatctaatcaaaagcgtagatgaaaattcttctgatgcttcttccaagaatgaatgggcttgtccgccttccgtaataaaaacttttgtaaggctaatcgatcccacctctttggaaatagaagatgccctagccaagagtgaccttaaaaccttcacaataaaagttcatgcgctaaaaagttccgcaaagattgtcggtgcagatgagctttcaaaattggctgcagaacttgaagaattgggaagcaaatgcgattgccaagagacgctttcccttatccaaaaaaagacggaaaagcttcttgccctctacaaatcctgcaagcagctgtttgcaaaagagcacttgtccgaaaaagaaacagaaggctctgcaagtggcggagatgctttgtcaaatgagcctgatgccgcagtgcttaccgcaaaagatgcagaatcctttgcagacaaaatactttccgcctgtgaccaaaacaacctgaacgatttggaaagccttgtggcaaagcttcaaaacttttcgctaacaccttcccagaaaaaaatacttgaacagctaaaagatgccgcagaactaatagactttgaccgcgccaaagaaatagccgccaccctgattgcccagtaacttgccattccactcacagccccctgtcattcccatgcaccgcaatccgtcattctcatgcgcagcaccctgtcattcccgtgcttgacacgggannnnnnnnnnnnnnnnnnnnnnnnnnnnnnnnnnnnnnnnnnnnnnnnnnnnnnnnnnttcccgtgcttgacacgggaatccattcaacgccagcaacacaatctacattatagtgtatgtctgattgtccaccttggtaagcccaacccgctgccagaaaatctccgcattggtgtcctttgcatcaagaacaattttctttgcgccggtttctagcataagcctctccagtgcaagagtgccaagcccaatgttccggaattccttgttcacctcaaaaaggtcaatgcagagagtgtcgcccagcatcttgtaaacgcagaccgcctttaaaaaaccgctcgaaggcttgtagtcaaaaatcataaaagacgactgcttaagcacaaaagaaaattctccgcccttggtataagattttagcagcggaaaattgtcccatccctcaagcgccatataggattcaaaaatatcgctgtccacaatcctgtaattcaaattcataaacaccccgcgtgaatactaccacaattcgccttttttgtcatttggacggtgatttttaggacgaaatcctacttgctctaccattttactccttggcttaatccgaccgaacatgcctcgcgtcaccgcccttccaggcttcgctaacgctcatccccgcgcaagcgcgtggactaaaggccttccacggcggcgtaggcttgtctaaaaaaaacatccattcttttttgtttacacttgttttctgcatagttttatgccatacttaaggtgaggagaaaatgccatgaaagatatgctatttaggcgtatggctagggggtgctttcttcttgtgacattcctctttttgctccccggctgcaaacagtctgactcttgggaagagcctgtcgctgaatattttgacaaatacacaaacacagccgcaatagaaaagcacgaaatttcgtgtggatacgaaaaagatgcaggcggcacttcttgcatttcaagctacggaaataagaccgtaagtttctacttaaggaatccccgcaaatataaccttcggacctcattttcaactttgggggacgaaattaccgtctcgcaaagcacttccgacaaaagcgttatatatgtaacatatcctgaatcctaccttatagaaaatgactgcggtggaagcattggcggcacaataagtctgcaagaagaagaaaccctcagagaatttgaaagctatacctttagtctaaaatgcaacactccgccgcccagtgtaaaagggccaatggtaaacgcggcagaaggcaaatatatagtctgcttttatatgcctacgacagaactgggtagccaaagacactccgcaagcagccacaagctttttataaacaatgctttggtcagagaaggaagcccttctgaccttatggctgcatctgcttcgcgtcctccaaaccttgaggctctgcaaggcggctcactttttagtgctactacaccggccggctgtactgccttctattatgaaacaggtgtgaatgtgcaggggggaattttaagctggtctatacgcatagaagacggtgaagggctttcttcaaaaacgatgaaggcttcttctgacgttcgcgatgtaaaccttacccttacaggtggagaagtctttgcccaaggtgatgctagccaaacctttaccgcaagtacagacgaaggtgaagttgttgcatggagctgggtctcaagtgatgaaagtgttgtgacagtttctggcactaataatggcaattcaacttctggcaccgtgaacatcgtaggcggtggtattgcaactgttaccgtacaggcagagctctctgacggaagaatacttacaaggcaaaaagaagttcgcgtacttggcattagctttaacgagacacaaagggacttccttaaaggacagtcagatgtatctctatccgtagacattccgggattcccggactctcaaacctacacatggagttcaaataatacaagcgttgcaagcgtaaattctagcggaggcctctctctgaatgcaaagggcaaggctacaatcactgtaagtgcaacttatggcggtaaaacagtaacaaaggcaaaggaaattgttgtgcacgaagtaaaacttacgggaggcgactttgcctttacaggggcaggaaactacacgacactcacgcgctccgtagaaagcccttcaggtgagtcaagcccatccggcataacatacccaagctgtatttcaaacctaggatctgcaactttccagtcaggttcaaactacaagttcacttcaacatcaactggtactgcaaccgtaactctaactgcaagccttaacggaaagactacgaccgtaacaaaacaggttaaggtatactccgtatccataaacgacataaatccactgttttcaaaagatgctggagcaaagactctctccgcaaccataacacccacaccgccatctggttatttcacctacagttggacttccggcgctccttccaaagccgacttttctggctcgaccacaggcttgtctgtaagcgtaacccctaaagcagccggaaaggttcagattgccttccatgtaaaaaaagatggtgccgaagtcggaaacgcctatcaggacatttatgttatttccgtaacaggcctcaagaccttccttgtgggagatgctgatcgcgcactcacagttgcacctacaagtgatttaacatatacatggaggtctaacaccccctccacggcaagagtatatgaatctaacggtaagattatacctgtagcaagtggagaatgcactatcacgtgcagggcaaaacttgacagcacctatatcgatataccaatagacataaaagttgcatcaatcactcttggaggccttgctgatgagtctgccggaataacaattgcggtaggggaacgcttttcatatacatggcaagttcccgctgcatttggtaacggaaccggcatgattgaatatatctcagattcagatttggcggatgtgcgtattactagcaatgcaagctctaagtatcttaatgttgtaggaaaaaatgttggtactggatatgtgggcattgagctaagcaaggacggtggaagtgcatttaaaaaggtaaagctaacggttgtccaagcacatgatgttgaattctcaagcctgaacacgtaccttgcatcgcttccagccaacgacaaggatcatccgtacaggctcaatgttaaaaatctgacagaggataatctcaaacaaaacgaagataatcatgaagtccgttctgacaccctccgcgccgttctcaaagcctcaactaaatatgtggatttgtcaaaaacaacactgccaacctcactcacaagcatggataaagtattcgaaggctgctcctatcttgttaagtctccaacaattccaacttctgtagctacaatgaaatattgcttcggaggttgcactaacctaaaagaagcccctactttaccatcgggagttaccgacctatcaaattgttttcaaaactgtagcaatataacagaagcacctactttgccaaattctgttactaatctgagtttttgttttgatggatgttcaaagttagcaacaccacctactataccaaatacggtaaaaaatatgactcgtacattctcttcttgcactagtctaacttctgccccaaccataccagattctgttaatgcaattaacttttgcttctgtaactgtacatcccttacaggcaccgttacggtaaacacaattatcacgtacactccacctccaacaaaccaagatacatgggttagtactttttacaactgcacaggcattacaagcgtcattgtaaaatccgaagcggtaaaggatagaattctatcaacaaatacacctgatggctctaacgatagcgacaattctgctgtatattccaaaatagtggtagtgccttgaccaaaagccattattctgctagagttataccactatttgccaacttagctcatccggtagagcagctccctcgtaaagagcaggtgacccgttcaagtcgggtagttggctaaggcccttctttacagaggggcttttttgttttaaagaccagtaatttttagcaaagtaaggggcagcgcagcgagcgcaccgccaggtgaaaagggcgcaaggacgcgcccgacagcgagcgaagccgcccggaaggagcgaacaggaagttcgcgactgaagggacccgttcaagtcgggtagttggctaaagctccttgttatcagggagtttttttgttttaaagaccagtatttttagcaaataagggtcagcggagcgagcgcaccgccaggtgaaaagggcgcaagaacgcgcccgacagcgagcgaagccggcccggaaggagcgaacaggaagttcgcgactgaagggacccgttcaagtcgggtagttggctaaggcccttctttacagaggggtttttttgtttttaaagaccagtatttttagcaaagtaagggtcagcggagcgagcgcaccgccagatgaaaagggcgcgcccgacagcgagcgaagccggcccggagggagcaaacaggaagttcgcgactgaagggaacatgttttcaaagtggtgacggcccttcgagaacctcaggaaccgcctcatgtgcccgtcaccctgaactgctacgccacattcgcacgcacttgctacgaatgtggattcaggagctgtggaagtccaaaccgccagattccacagattccgggtctgagcccagaatgacggagaagctaatcgggggtacttgattttacgcctacccccgattgtaagggcggcgcagccgttaccgcagggcggtaatggagccggaaggcggaaccctggaaagcgggtaaaaaatgccttccttggcattttttacccgcaagttttcttacgaaaacttgcctgttttttatgctaccagatgacgcgccgtccatggcgctgcttgtttaataattggataaaagtgcaaatgcgactggccggtcagtagagacggacacggtaaaagatgtcatgccgtccagtgtttattaaagaaaaagaaaatcataaaaaaattactttcgtattgtttttgtgctggttttgcctgtggcttcgtttaccgtaacaagagcccattcctggttaaagagagtgtcaaagcaacgttcagtgtagtcgccaagttccttgctctggtggtggtgcacgtggcctgcgtaaacgtccgttacgccttccttttcaaagagggttataacgcgggtggattcctcttcgttctgcaggcagtagtagcttagtccgtacatgccgcttccgtatatgggataatgtgtgaatacaatttttgggcgggggtcgctttgcatggcactctttagttttttgaactgctttggcccaagtgagccgcttcccgtgtccagtgcgtagtagctgaatgcggaacttttaaagcggtagaatgaagtgtagggaaagcataggtcagaaaaatcgtcccagcctgaattaaaaaggtcgtggtttcctacgatgttcagcacaggtattccccggctttctattttttcaacaaagtcgcagtacttaagaaattccttgcgttcaccgcgctctgcaatgtctccaagacagacgcagaattttgggctttggtctgcggaaaggtcgtccagccattcaaggaattcatcttcgtctatgttttctgcgcgctggcttccgtagtggggatccgtaaaaataacgaaagtgtatgttcccgaaagagaagcaaaagttgggcctacgcgcccctggtaaagttccttcatctggtcggcgcgttcgtccacaaagtctccgtggtggaagagttcaaacgcaccgtaaccgcaggacgtgagttcaagtgcggtgagaagtataaatatgcggctaaaaaaagaaatgaactttttcaaaagaaccaccttagccttaatgcaaattcgcaggaatcaaacatggcggaatttgtaaagaagtccgtgtacctaacccttgcctctgcacctaattcctgaagtgcgctcaagtggaatacgcttccggcacaaagggcgggggagccaagcaggttgtagcggaaaagctcgtgagtcctgattgctgtgtagaattcataccagtaaaatggatagaaatgcagggaaaagtcaaagcccatggttaagtttgtgagcaccgggtttgtgtcgcggattgcaaatattgtgcgcatcttgtagagcgatactgtattcacctttaggctgaaccagcttacgggttgggtttccagccaaaagcctgcaagtatgttgttggttatgctaagttcttgaaagtaggtaaagttgtattttgccccaagacccatgcggcctttgctccacctgaatggccaccaaatgccctgggccgtaaactggtagtcttcttctcccaaaaatcctgctgccagagccgttgccttttccgactcgtaggtgtagccaaattcaaatgccagctggtaggggtcaaagccgtttcccgtgttgtagatgggtgtcataaaaacgctgtgcgtgggctgcgtgtcgttctgtgcctgggcaaaaagcagggctggagaaagaagtaaaactgcttgcaaaaggaaaaactttaacttcatttttttttctattatatcattctgaaaataatatggcaattggctttttcgtccgtttttttttgatggtactcttatggacgaagtccttcttgttctaccaattcaggcttctgctaattcgaccgaatatgccttggcgccaccgccgttccggggttccgcgggtcccttcccgctccattgccggggttcgacaaactcacccaacggcaacgcacttcgtgcgcccctccatggcggcgtaggtttcctgaaaatttgcaagatgcaataaaataggttagaatgaaaatatgaaaaacaatatgctttccaagcttgttgcatgttacaacagcacaagccttatcctgcgcatttttattggcattgtcattggtgcgctgctcggagttgtcattccctctcaggaatggattggtatttttggcgacacttttgttggtgcgctcaaggctgttgccccggtgctggtctttgcccttgttacaagttcacttgccaagggaggtacaaagcttgaccgccgctttggaacggtactggtgctttatatggttagcactttgcttgcatcgcttatcgctgttgcggcaagctttatttttccgcagacgattgcccttgcaaatgaagcttccgctgattcagctccggccggaattggacaggtgctaaagaaccttcttataaatgctgtttcaaatcccattgatgcccttgcccgtgccaactacattggcattcttgtatgggcatgtatttttggccttgcgctaaagtccattgcaggtgagggcacaaagcagatgctcaatgattttgcggaggcgctttccaaagttgtgcgctggattataaaccttgctccctttggaataatggggcttgtctttacgacggtttcttcaaacggcatgggtatattcaagaattacggaacactgcttgcagttcttgtaggctcaatgctctttatggcacttgtggtatctcccctcatcgttgccattacgctaaagtgcaacccttatccactggtgtggagatgcctaaagcagagcggcattacggctttctttacccgcagttccgccgccaacattcctgtgaacatggagctttgcgaagagcttggcctggacaaggaaatgtattctgtttccattccgctgggtgcaacaatcaacatggacggcgctgcaattacgattgcaatcatgacactggctgcggcccataccctgggcattgttgtggacataccaaccgcactaatcctctgtgtacttgccactttgggtgcttgcggtgcatccggcgttgcaggaggttccctgcttttgattccccttgcctgttcactctttggaatttccaacgatgctgcaatgcaggttgtaggagttggctttataatcggcgtggttcaggacagcctagaaaccgccctcaattccgcaggcgacgtactctttaccgccaccgcagaataccgtgcctggaaaaaacaaggcaagcctttgcctgacttccttgcaaaatagcttagctgatttttatgtgatgctttgcatgccgctctggggctctgttccggggcggatttttattggctgggaatgtgcgtaagatttacaaaacgccgaaaaattttattacaaaacgccgaaaaaggtgataataagagaatccacgtttttttatcttttatattttatttttgctttactaaaaacaaaaagagagccgtagccctcttttttcatgtgtactatttatattccataggaatataaaagcattttgcggagtcaaaagactccttgttagcaggttgacaagataaattaatcagtatcataagtatatgccaattaaaagaatttgtcaaatagcttgtggacgtggtataataattttatgaaatatcgccttggtcttgatttgggtactaattctattggttgggcagtttattctttggatagcgagaatgaaccaaatgagcttgttgatatgggtgtccgcatcttttctgatggccgcgaccctaagacaaaagagcctcttgctgtagcaagaaggacggcacgagggcagcgaaaactgatttaccgccgcaaactccgcagaaaatctgtattcaggcttttgcagcagcagaatctctttccaaaaacaaaagaagaaagtcaaaagctaaaagcactaaatccctatatgctaagggtaaaagctcttgatgaaaaattggagccttatgaacttgcccgcgtattattcaatctttctgtaagaagaggattcaagagcaaccgaaaggacggttctggggaagaagaggtaacttcaaagtctggcgaaaagctttcgcaaaaagacatgtgcaatgaacttgccaaagccataaaagaatctggctgcagaacaataggcgagtttttgtggaagaataaggataagaacaaggggctccgctttgttcccggaagaatgacgtattatccgttgcggcaaatgtatattgatgaattcaatgcaatacgtacagttcaggaagcattttacaagtctgtggactgggaagcgatttttgatgaaattttctttcagcggccactaaaagcacaggagcgtggacggtgccagtatatgcaagaaaaagagcgcacgttcaaagccatgccatgcgctcaaaagcttcgcatgctgcaggaagtacggaacatggactatcagaatgagcggggacaaaaaattccgctttcagaagaagatgaaaaaataatacttaacctgcttgatacaaaagataaggtgacgtttgatgctataagaaaggcattaaaactaaccggcgcatgtacattcaatcttgagtcaacaagccggacgagtctgaacggaaacacaactgctgtaaaacttcgcaataaaaacagattcggggaattgtgggacactctttctcttgaagagcaagactctattgtagaaaaacttattacggctgatgaagacaaagaaatttatgatttgcttgaaaaatacaatcttacggatgagcaaaaagaatctattgtaaaagtacagcttccagcaggcacaacaatgctttgcaaagaggtgtctgaaaagcttgtgcaaaaaatggaatctggctctgcctttacttatacggcggcggttgaatctctcggttataagtatgcagatcaaaccgtagagaaatatgacatgcttccgtattacggaaaggttctggttggctctaccatgggaattgacccttcaaaaccagaggacaaaccggagctcaagtatggaaaaataagcaatcctactgtccacgttgctttgaaccagacccgcactgttgtaaacgcacttataaagcaatacggtaagccaagtcagattgctcttgaactttcccgtgacttaaaagcaagccgtgaagcaaaagatgccatgcttaaaaagcagaatgaaaacaaaaagcggaatgaaattctgaataaaaatattaccgatgcctataaaattgcatatccaaaccgcaacgaccgtttaaagtaccgtttgtgggaagaattaggggctgaaggcttgccaagaaaatgcatttattgtggtaaaaatatttctggagcggaacttttttctaagagcatagagatagagcatattcttccttatagcagaaccttgcttgacgcagaatctaacttgactgtagcccatgcaagctgcaacgcttttaaaaaagaacgctctccttatgaagcttttggctctaatccaagcggttacaattggaatgagattcttgccagagctaatcaacttaaaaatcctgccaaacgcggaagattttcggtagatgccatggaaacttttgaaaaggaaagtggatttatagcccgccagcttacagacaactcatatctttctaagatggctcttaggtatttgaagagcgtttgtgataatatttggtctgtaaacggaggtatgacaaagcttttgcgcgacaaatgggaaattgattcaatcctgaagcgtaaaattgatgaaaaagagattgcttactttggcttgaaggatgagcaaataggtgaatacaagaaaaaccgttacgaccaccgccaccatgctttggatgcttctgtaatagccttgattgaccgttcccttgtaaaagagatttctactttaaatgcccgttctcagaaaaacagaatagaggttccaccaatggctgttccgagaattgaattgcaggaaaaagtaaagaacattgtcgtaagctttaagcctgaccacggagcggagggtaagctttccaaagaaacgcttcttggcaaaataaaaagggaagaggttgttgaactttccaagatagaagaaggtgatattccttttataaagaatgaaaaagtgcgtggtgattttgaaagcaaatttgcagaatcaaaggacataaaaagagtccgcaaggaatttaaagatatttatccgcaggtgaaaatttttagggaatgttttgtatctcgcagtcctatagcaagtcttaaggaaaacaatattgaagatattgttgatgtaaaaatccgctccagactgcaagatttttatgcattgcacaagggcgaaaagtttgaagaccttttgcagaaatttagcgaggaaacaaaaattaaaaaagttcgctgcctaaacagggttcaaacaccgattgttataaacagtgaagttccccgctaccttgccccggaagattattttgcggcaattatctggcagattccgccaaaaaaagacggtgctaagccaacttacgaagcgcaatatatccgcaggaatgaagttggtaaggataacaaaccaaaggcaggtgttgtaaaaacaccgcatccggcagccaagaatcttggaattctacacaagaatgattatttggaattctccgaaagcggaaaatggtataaatgccgggtggcgggattttctgcaactcaaaataagttggatattcgccctgtatttgcagttacggattgcaaggactggattattgctactaacgagactctgttagaatcttgctggaagcaacagaaaggtcagaatttctattctgtcaatgttctcttcggcgaaaagcaggcaagatttataaccgtaaatccaattggcagggtttttagaaaataatgtaaacctctgttcagtatgccgatacttaaaatatgctgaacagagtgttggagattcatgaagaaaatcgctatctgtctcttaaccgcggctttatcgtcattcagcacggctctgaggagcttggaagagtgccgcttgacgatgtaggtgtacttttgctttctgcacagagtgtttctttttctaaaaacattcttaatgcccttgcagaaaaaggctgtgtttctattttgtgtggaaaaaactatacgccacaaagcatggttcttcctgtttattcgcattatttgtttgcaaagatattgaagaatcagataaattcttcacttccattcaaaaaaagaatttggcagcaagttgttgttaaaaagattctgaaccaagctttgactttaaagctttgcggaaaggattctggatttttggaaaggattgcaactactgtaaaatctggcgatagtgacaacagggaagcttatgccgcaagactgtattggaagtctttgtttgggaaggaatttactagggataaggatcttgaaggagtcaattcatttttgaattatggctatgcaatcatgagggcatctatggcaagagctgtctgttccagcgggcttttaccttctcttggaattcatcacgagaatcatctgaatcagtttgcgcttgctgacgacttgtttgaaatttaccgcccgattgttgactacattgtctttaatttgaatcctgcagaagaaacagaattgaatcatgagtacaagacaaaacttgcagatgctttgtggataaaggttcatacttcgcaaggagattctcctgcttttcaaagtatgcaatatctgacggcttcttatgttcgagcattggaagatggaaaggctgtcattgatttgcctgaatgggaaggagaagaaagtgacggcggaactaaataggtatgagcttatgtggatgcttgttttatttgacttacccgttgttgaaaagaaggagcggaaagctgcgtctgattttaggaattttctgcttgatcacggatttgccatggtacaatattcaatttatacaaagctcttttctggaaaagatgcttgcgaaaagtattacaggttgatacagcaaaacttgccggaagaagggaaagttgatattattaccataacggacaagcagtatgaaaacattatcagctatgaagctacagaaaaagtcaaaaaaaatgagcctcaacagctccttatgttctagtttttctcaaaaaataatacatccgatgttctctatttctttgaaagaaaaagaattacaccggatgtattataactgattaatttgtcctgtcaacctgcaacatttgcaaaaagcaaaacatacgaattgtcattataactgattaatttgtcctgtcaacctgcaaccagaatgtacggacacgctctgtatcaatcattataactgattaatttgtcctgtcaacctgcaacatacaaggacttcacaagtccagaccttgaattataactgattaatttgtcctgtcaacctgcaactttgtcgcctaaaatggcttatgcccttgaattataactgattaatttgtcctgtcaacctgcaacgtaattcggattctgaaaaatacagtttttattataactgattaatttgtcctgtcaacctgcaacgtagatttaatgattatgaagataaaatacattataactgattaatttgtcctgtcaacctgcaacttgaagagggcggtagctctgacggtttaaattataactgattaatttgtcctgtcaacctgcaacttacaaccttgatttgtcacattcttttaaattataactgattaatttgtcctgtcaacctgcaacttgcgtggaaggttgcgactatgggtgcggattataactgattaatttgtcctgtcaacctgcaacaaatcgcttgtataactcgcataaatctttattataactgattaatttgtcctgtcaacctgcaacagctgatactgctgcaagccggaatgcactattataactgattaatttgtcctgtcaacctgcaaccctaaagtggggcgggagcgggtgtggggaattataactgattaatttgtcctgtcaacctgcaacttaaatctgcatataacatcattctcattatattataactgattaatttgtcc

SEQ ID NO: 827 - DNA, 14955 bp, synthetic construct
  misc_feature 1..14955: note = Synthetic
  source 1..14955: mol_type = other DNA
aaaacagcaaaggaaggcggatacgcacctaagactgttctcgtacttggatgttctacaggttatggtcttgcaagccgcatttctgccgcatttgaatttggcgcagataccatcggtgtttcttttgaaaaggaacctacagaaacaaaaggcggaactccgggatggtacaacaacaaggcttttgacacagaagctcagaaagccggtctcaaaacagtaacattcaacacagacgcattcagcgacgaatgccgccagactatcatcaaccaggttaaagaatggaatacaaaatttgaccttatcatttacagtctcgcaagccctgtccgcacagaccctgaaacaaaggttatgtaccgctctgtaatcaaacctgttggaaaagtttacggtggtccggccctggacatgatgactggaaaaatcagccagatgtctgctgaacctgcagaaggtgacgaacttgcaaacactatcaaagtaatgggtggtgaagactgggcacgctggattaaacagcttggtgatgccggtgttcttgcagaaggttgccgcacagtagcttactcatacatcggaccagaacttacacatgcaatctaccgcgacggtacaatcggtcacgctaaacaggatcttgaaaaaactgctcacgaaatcgacgcagttctcgctaaaaacggcggtgcagcttatgtttcagtaaacaaggctctcgtaacacgttcttcagcagtaattcctgtaatttccctctacatgagctgtctgtttaagattatgaagggaaagggaactcacgaaggctgtatcgaacagatggaacgcctttttgcagaacgtctctatacagcagacaaaaaagttccgacagatagcgaaggccgtatccgtgttgatgacctggaaatggatcctgctacacagaaagaagttaacgaacttatgtcaaaagttacagaagaaaacgttaacgacatcactgaccttgcaggaatccgtcacgacttccttgcaacaaacggctttgatattcagggcgttgactactcaaaagatgtagcacgcatggatgtcatctgctaattatttttgcgcccccctgtctgcagaggcagacagggtcgtagtactccgcactcggtaaccctcggtcctgcggactgcctgcggcatgctccgtgttactggcgcggtttaattttagaactctttctgttataatcaaagcatgttcaaattcaacagaaagacttttacagcgttttttacaattcttttaattcttcctgctttttcaaaagattttacttccagaaaatttttgtggcgcggggttcccgggatggaaactcaaatccgggacactgttttatattattgcccggctaaaactgaaagcccggccccggctgtaattatctgtccggggggctcctatcatcaccttggaatgaagcacgaaggttttgccagcgcccgctggttcaattcaatcggaataaacgcatttgtgcttcaataccgtgtagcatacaatgaacatcactatccggatcagctccaggatattcaaatggcaattcatgacgtaaggcgcaacgctcaggcctatcgtgttaacccggacaaggtgggcgtaatcggctacagtgcaggcggtcaccttgttacaatggcgggtgcattcagtaagcgtgacacgttaagcgctctcggtgtaagtgtaactgaaagtctgcggccggactttgtaattcctgtttatccggttgtaagcatgcaggatgacattgcacacagatggagccgtaagagcctgcttggccatcagtggaaccgtcccaacgcggtaaagggctggagcctgttgaatccatggggccacgcatacagtcaggaattaaaagacgccttttccatggaaaaacagattccttctgatatgccgcctgtttttctgcttgcctgccgcgatgacccggttgtaatgtacgaaaactccgtaagactggaccaggctctgacagaaaaagcggttcagcacatttttgtaagttacgataagggcggtcacggattcgggatgaaggaaaacagttcaatcatgctccgggaacactggaatcaaaaggatttgctgccgtggctgattcaaatcggggtggtggaacgatgaaattattttcaagagtgatgacaattgccggaatcctgattttgctgggcacctgcgtccttcttctgggagaggcaaatggtgcggttcaacttgggccggcaaaaagcagtgttgttttctgcgcccttggacttgcccttttgtgttacagcccgcgccggtaccttgcatacgacgaatcaattaaggccggggatgaaaaaaaagccccgcagtttcttgcaacttttatattgcagtctgccgcagggcttattatggttgtaatttctatcgtaaaatactttttaacggttaattcactcgcttaaaaattagactggtattgattccaccaaaagcaaagttgttattcattacatagtctgtctgaatgtttcgtccgtcgcctgtgatgtagtccaggggagcgcattcagggtcgaggtttacaagattcaaattcggcataaaccagccttccctcatcatatttatcgttaaccatgattcgattgcaccgcatgcgccgagcgtgtgaccaatgtagtttttaacagtagaaactggaacagcacgcttgaatacatcaaaagttgcgtttgtttctgtgatgtcgccggctgtagttccagttccgtgggtgtttacgtaaccaatctggtcaggagaaagacctgcgtcctccagcgccagctgaattgcgtgggcgattgtcggacggttagggcttgtgatgtgggttccgtcggttgtagttccaaaacctgcgatttctgcatagatttttgctccccgggcctttgcgtgttcgtattcttcaagaatcaaagttccgcttccctcgccgattaccagaccgtctctgtctttgtcgtaggcacttggagtcagttgcggggttgaattttttgtggaagttgaaaagagggtgtcaaaagttgcagtatccattgtacagaattcttctgcaccgcctgcaatcatgatgtcctgcttgccgtatttgattgcttcgtaggcgtaaccgattgaaagtgagcctgaggtgcaggctgtatttgtggtaatgattcgaccagttaagtggtagtaaacttccaggtttgcggcacatgtctgcggcattgccttgatataagttgttgaaccgaccttgcttgtgtcgtttgttacaagcattgaatacatttccatcagcgggtcaacacttccgattgatgaaccgtatgcaattcctgtgcggcctgcgctcaattccgggctgcctgcaagacctgcgtcttccagggcgccgtctgtggcaacgagagccatctgagcaacgcgccccattccgcggattgccttgcggggatatttttctttgtcgatttcaaaatcaacaggaacagcgagacgagtattcatcaaaggatatttttcatcccattccttcatgtaacggacaaaattcttttttgccttgagatttttgagagcggtctgccagtcattacccagcgcgctaaccatgcttccgcctgtaacaacaactcttcttgattccattaaataattcctccgtttaccgagataacctgacgtgtaatgtatgcggcaccctcgctgagtaagaatactgctgttgcggcaacttcttccggctttccggcgcgacccatcgggattgtcggaagaatgtgatcgagcggtgcgtccttgatcatatctgtttcgataagaccaggtgcgatgcagtttaccgtgattttgcggcttgcaagttcaacggccagagcttttgtggcaccgatgatgcctgccttgcttgcgctgtagttgacctgaccgcggtttcccataatgcctgacacgctggaaattgtaatgatgcggccctgctttttgcggcagagaggcattaccagcggtttgagcacattgtagaatccgtcaaggtttgtatgaattacgctgtcccagttttcatcgctcagggccgggaatgcgttgtcccggcagattcctgcgttgaggatgatgccccagaatgcgccgtttttttctgaccagtcttcaagttttttacggcagtcttcccggtctgaaatatcaaattgaattgaatcagccgaaccgccggattcaattatttcttttataagtgcgtcgattttttcttttccgtgattatagtggagcagaacttcgtagcctgagcgagcggcagcaagtgcgattgcgcgcccgattccgcctgatgcaccggttacgagaactttttttccgttactttccattattcagaagcctccattacagtaagatttccagagccagccggctttccgtcgagaaagagctctgccgtaaatgaataaacattatcaactgccgcttcgcgctgggcttgggctgttacaatctgcccttctttaattgaatcaaattcaaaatgaaggttactgacactcaaaataaaacccatgtttggcggaaggccgttttcccgggcgtatagacctgtcagcgcagaaatagtctgtgcaattatttcaaaacaggcataatttggagcggcatcgagtttttcgtcataaaacataaagtctctggtaatcttagtctggctttcgattttccacgcctttgcatctgcgtcggaaattctatcgatgataaacatcttaccactgtgaggaaccaaagttgaaagttcgtcatgttcaataatcatttttttatccggttaacattttagcatagaccggattttttttatagtcataaaacagggcgcacgccgttcgctacgctcacttctcgagttttcttttgctcaccaaagggtgagcattttgctacgcaaaaacaagaaaactcgccccatcgggctatcgcgagtttaccatcggtaaactcgttacgagaatggcaaagccattctcgctggttccgcctttcggctccatccgccacagaaactgtgccggacgcttcgcgccgctactatcccttgcgcttgtatgaggaaagcgaggaaaaaaaatagcccgtcctgtctcgtacacagaacgggcaaaagcttgagtaatcgagcttaaaccatgtgaggcgatccgcttcggagcgggtgcacctttcaatacctattttactagacttatcgtaaaagtcaatagaataaaaacaatttgagctttccgcattaatccccgtaacatagaaaaatattcagttttttacgaaatgacctcgttcaccagttcctggcctgattcaaatgcctggatattttgcagggtggtttcggcaaggtttttgagggcgtttgtggtcaaaaaagcctggtgggaagttatgattacattcgggaaagtcaaaagacgggccagaatatcgtctgtcattatgtctgtggaccagtcgctgaaaaagtaagcgctttcttcttcataaacgtccatgccgattccgcctatgtgaccgtgctttaaggcgtgtaccagggcttttgagtcgattaatgccccgcggccagtgtttatgatgacagcgtcatttttcatcattttcattgaatcgtgatttacgatgtgttttgtctgttctgtaagaggacaatgcaggcttaagacatcgcttcgtctaaaaatttcttccagacttacatattcagcatttttttcctttgcccaattctgatttggaaaaggatcgtaggcaatgatattcattccaaagccttttaaaatatctgccataatttgaccgatttttcctgtgcctaaaattccccctgtaagaccgtgaagatcccgtcctgtaagtccttcaatgttgaaatttgcagtttttgtgcgaagatatgcctgtggaatatggcgggtaagtgacataagaagagcggctccatgctcagcgacagcgtatggagagtaggctggaacacggacaacttttattccttttgaagcggctgcttttagatcaacattattataaccggcacatcgcagggcaatgagctttacaccgcagtcgcttagagtattgattacagtttcgttaacaaggtcatttacaaaaacacagacaacatcaaaaccttttgcagtaagggcagtattttcgttaagtttgtaatcgcgaaagtcaatatcgtagttaaatgcctcgtttgcagacaaaaaagattttttgtcataagagtgggtatcaaaaaaagcgattttcataaaagcccccttgtgaaagcgaaatccatattcgtgtcatcggaaaaaaaacaaaaagagagccgtagctcccttttttcatgtggcctgtttatattcaaaaagaatataaaagcattttgcggagtcaaaagactccttgttagcaggttgaccggataaattaatcagtaatttcatgataatgtaatatgagagtcctgtcaaactttaatttttacaaatcaaaagaggagtgttatactgattttatgaaatatagattaggtcttgatttgggaacgaattcaattggttgggcggtttattctttggattatgaaaatgaaccgcagaagcttgaagatatgggggtccgcatttttcctgatggacgggatccaaaaacaaaagaaccgcttgctgtttccagacgaattgcccgtgggcaaagaaaactaatctaccgtagaaaacttaggcgaaaagcaacattccgtcttttacaggagcaggggttatttccaaaaacaaaagatgaaactcaaaaattaaaaacacttaacccctatgaattgcgggtaaaggctttggacgaaaaacttgaacctgctgaacttgcccgtgttctgttcaacctttcagtgcgaaggggatttaaaagtaatagaaaagatacttcaaatgaagaaacagcggcttcttcaaattcggaaaaattatctcagaaagacatgagtgatatgctctcaaatgcaataaaagaggcaaattgcaggacactgggcgaattcttatggaaaaaccaggaaaagaatcatggaatccgttttgttccggggcgaatgagttattatcccttaagaaaaatgtatgaagacgagttctttgcaatcagagccgttcaagaaccatttttcaaaagtattgactgggaagggatttataattcaattttctttcaacgttccttgaaagctcaggaaagaggtcgctgccaatacatgccggaaaaagaaagaacatttaaagctcttccttgtgctcaaaaacttaggattctgcaggaaataagaaatttaaattatcagaacgaagaaggaaaaacacttccgatttctgaggaacaggaagatattcttctttctctgctggattcaaaagaaaaggtgacttttgacgcttttagaaaggctttgaaattaaattcagcttgtacattcaatttggagaagaatcgggattttttgcttggaaatgcgactgccgtaaaaatgcgtcacaaaaatcgtttcggtgatttgtgggatagcctttcccttgaggacgaggatttaattattgaaaagttgataacggcagacgaagattctgaaatccttgcacttcttgaaaaatacaatcttaccgaagaacaaaaagattccattttaaaattgcagcttcaaacaggtactaccatgctgtgtaaggaagtttcagaaaaacttgttcataaaatggagtctgatagcgcctatacttatacggctgctgttgaatcgcttggttataaatatgctgatcagcctgtggaaaagtttgatgagcttccttattacggaaaagtacttatcggttcaacaatgggcgtaaatccgactgccgatgaaagcaagccagaacagaaatatggaaaaatcagcaatccgactgttcatgttgcactgaaccagactcgagttgtagtgaatgcacttatcaagcagtatgggaaacctgctcaaatcgcaatagagctttctcgagacttaaaagcaagtcgggaagcaaaagatgcaattcagaaaaaacagaacgaaaataaaaagcgaaatgaaataacaaatattaacattcgtgatgcgaatcctaatatccaatatcctaatcgtaatgaccggttgaaatatcggctttgggaagaacttggggcagaaggattaccaagaaaatgtctttattgcggaaaaaccatttccggggctgaacttttcagtaaaaatattgaaattgagcacattctcccattcagccggactttgcttgatgcagaatcgaatctgactgtggcacattcaagctgcaatgcctttaagaaagaacgttctccttatgaagcatttggttcaaatccaaaaggctttaattgggaagaaatcctcatgagggcaaatcagcttaagaatcccgcaaaacgcagacggtttgccattgatgccatggaaagctttgaaaaagacagcggttttattgcgcggcagctgacagacaatgcctatctttcaaagatggcgatgaaatatctgaaatctgtctgcgatgatatctggtcggtaaacggcggaatgacaaaattgcttcgtgacaaatgggaaattgattctattttgaaaaggaaaattggggatacggaaattgtacattttgggctgaaagatgaacagatcggagaatacaaaaagaaccgctacgaccacagacatcatgccctggatgcttctgtaattgctctgattgaccggtcaattgtaaaagaaatttctacgcttaatgcacgctctcaaaagaatcggattgaagttcctcctatggcagttccacgactggaattgcaggaaaaggttaagaatattgtggtaagttttaagccggaccacggtgcggaaggcaaactgtcaaaagaaacgctacttggtaaaatcaagcgtgaagaattgctggaaatttcaaaaattgaggaatctgatatactgcttataaaaagtgataaggttcgcaaagattttgaagagaaatttacggaaacaaaggatataaaacaagttcgtaaggcgcttaaagatgtctatccgcagataaaagtttttaaggaattctttgtatcccgtactgtaatatcaagtttgaaagaaagcaatatcgaagatattgtggatgataaaatccgtaacaagttgcaagattttgttgcactccacaaaggagaaaaatttgaagaactgctggaacgttttagcgagcaaacaggtataaagaaagtacgttgtatcaaccgtgtccagacacctattgtaataaatggtgatgttccacgctatcttgcaccggaagattattttgctgcgattatctggcagattccaccaaaaaaagaaggagcaaaaccaacttttgaagcacagtatatccgcagaacggaagtgggaaaggataatagacctaaagctgcggtgatagaagcatggaaaaaggaacatcattctgctgcaaaaaatttaggaattctgcacaagaatgattatcttgaatttagcgacaatggaaagtggtataaatgtcgtgtagctggactacaagccgctgcaaatcgattagatattcggcctttgtgtgccgttactgattgcaaagattggttgatttcaacaaatgaaaatcaacttgaacggtattggaaaccacaaaaaggacagaatttcatctccgttaatgttctgtttggcgaaaagcaggcccgcttcatcacggtaaatcctattggcagagttttcagaaaataatggcgaactctgttcggtctgccgatacatagaatatgctgaacagagttttagagatttatgaagaaaatcgatatctgtctcttagccgcggctttatcgtcattcagcatggttcggaagaactggggcgtgtaccacttgacgatattggtgtgctcttactttctgctcaaagcgtaactttttcaaaaaatattctaaatgcacttgccgagcgaggctgcgttacagtgctttgcggaaaaaactattcgccgcaaagcatggttcttcctgtttattcacattatctttttgcaaaaatccttaaaaagcagatagaagcttctgttccgcttaaaaaaagaatctggcagcagattgtcatccagaaaattaagaatcaggcccttaatttgcagatctgcggaaaagaaaaagattcaaagcttattgaaaaaatagcaacaatggtaaaatcaggagaccctgataatagagaagcttatgctgcgagaatgtactggaaatcactttttggaaaagaatttattcgtgataaagagcaggaaggtataaatgcatttttgaactacggctacgcaatcatgcgctcttctatggcccgggcggtttgtgccagcggacttcttccttcgcttggacttcaccatgacaataatcttaatcagttttgtcttgctgacgacttatttgagatttaccgccctttagttgactgcgttgtatttcatctcggaataaataatgattctgaattaactcccgaatataaaacaaaacttacggaaaccttgtggataaaggttcgtacttcggaaggcaattctcctgcatttcaaagtatgcaatatttgacggcttcttatgttcatgcattggaagatggaaaacctgtcattgatttgcctgtgtgggcaggagatgaatatggtaatgccggaattgaacaggtatgagcttatgtggatgcttgttttatttgatttaccagtggttgaaaagaaagaacgaaaggcagcaacagatttcaggaatttattgctagatcacggttttgcaatggttcaatattcaatttatactaaacttttttccgggaaggatgcctgtgaaaaatattatcggcttatacagcaaaacttgccggatgaaggtaaagttgatattattacgataacggataagcagtatgagaacattatcagttattctgcaagcaaaagaattgaaaaaaaagagacaaaacaactgcttttgttttagttttttctcaaaaaaaatacatccgatgcactctatttctatatataaaataaaattacatcggatgtattataactgattaatttgtccggtcaatctgcaaccaggaatttccttcatcaattctaaacaatattataactgattaatttgtccggtcaatctgcaactattctccagaatttgctcatctcggagagattataactgattaatttgtccggtcaatctgcaacattcgagctggttatactgatgttgatattattataactgattaatttgtccggtcaatctgcaacttagccggtctttttttcttctgttccggaattataactgattaatttgtccggtcaatctgcaacagtgaggtaagtgttctttttgaacaattcattataactgattaatttgtccggtcaatctgcaacagatattacgaagcggggacgaacgctataattataactgattaatttgtccggtcaatctgcaaccttggctccagcgtggtaatacttccacctattataactgattaatttgtccggtcaatctgcaacaagctcgtcgagaatgcgctgccattgcgtattataactgattaatttgtccggtcaatctgcaacaataaggttcaaaaattgatgtttactgcgattataactgattaatttgtccggtcaatctgcaactgtttgaaacaatttgtgatacattatcaaattataactgattaatttgtccggtcaatctgcaactgtaaagacaaggtgtgttttcttcaatgcattataactgattaatttgtccggtcaatctgcaacttactcagtcgaagataatcttgtcaattaattataactgattaatttgtccggtcaatctgcaacggttatattatgggtatcatgataattactattataactgattaatttgtccggtcaatctgcaacgattcccgtgaagagcgtattgcaaaagttattataactgattaatttgtccggtcaatctgcaaccgttagtgattatatcaccgattttcaaatattataactgattaatttgtccggtcaatctgcaactgcagggctttcaacgattcatcatcaatattataactgattaatttgtccggtcaatctgcaacaaaacttctcgccgtgctctgcttactcaattataactgattaatttgtccggtcaatctgcaacaagaagttgcagtttttcaaattataacaaattataactgattaatttgtccggtcaatctgcaacaacgccgcacgtttccttaacgcgcattgaattataactgattaatttgtccggtcaatctgcaacatgaatccaagtttccaacatctttcagagattataactgattaatttgtccggtcaatctgcaaccttaaaatcatagacaagctccttataacgattataactgattaatttgtccggtcaatctgcaacgaacttgctatacgttccggaaaacttgatattataactgattaatttgtccggtcaatctgcaacgtcttatgtggacgcttccagtagcgaaaattataactgattaatttgtccggtcaatctgcaacaaaatagcctgaataggagctgcaatcatcattataactgattaatttgtccggtcaatctgcaaccttcgggtgaagcattgaccactcgcgcatattataactgattaatttgtccggtcaatctgcaacttgtctggcgtttctggtgtcagttccttttattataactgattaatttgtccggtcaatctgcaacaccataagacatcactgttgttgattgcatattataactgattaatttgtccggtcaatctgcaacaatttaaatcttcaggtaaacggtacagcaattataactgattaatttgtccggtcaatctgcaacaacccccgggttttaccgccacgtccgcaaattataactgattaatttgtccggtcaatctgcaacgtacggcctgcgcttgaacgcttgcgtcctattataactgattaatttgtccggtcaatctgcaactatgggattcataaggccgttctgtctgatattataactgattaatttgtccggtcaatctgcaacggttttgctatcctggatacgctcggctctattataactgattaatttgtccggtcaatctgcaacggttacacgccttaaaagaaacaataatcgattataactgattaatttgtccggtcaatctgcaaccgttaaactgtttgaagattgacttgtaacattataactgattaatttgtccggtcaacctgcaactcgcgctggtgttgactttgggaggaaggggggaagattgaactgtgaggcgatccgcttcgtgcgggtacagttattcttttacaccccaacgggtataatatatagtttttaacgtaaattacacccgtaagggtatagatacagtattttttatggacattacacccgttagggtatataattattttcgtaatgaaaaaaaacagccggaattcaataggattttttcttaagcaaaaacgtaaggccacagggcttacgcaggaagaatttgcaatcagaagcgggctcggacttcgttttgttcgtgagcttgagcaggggaaacagactgttcgtttggacaaggtgaatcaggctctggctatgtttggctatgaggctgctccggtaaaaattgcaagagatgaactggaggtagaagatgacaaatagatgcggcctggtttattatcagaaagagctttgcggcaagatttctgaaacagatgaagggtattcatttgaatatgattctgcatggcttaaaaatcctgatgcatgtgagataagtcatactctaccgttgtctgatgaaccttacttatccaaaacgcttttttcgttttttgatggattaattcccgaaggctggcttttggaggttgcggtaaaaaactggaaactcaatccgcgggacagaatggggcttttgcttgcaacttgtcaggactgtattggggctgtaagtgtaaaaggccttgttacggagaataaggaatgataaaaaagtattgtctttgctgtctaaacgaattaggtgatgaagaaaaagatctggattttcataagaaatgcctgaaaaaattttttggaacagtgcaggccccgcaaattgaattaaacgatgatgttctggaagttcttgcggaaaaatcaagtgctatgggagtaagtgtcgcaggcgttcaaaaaaaattgtcacttcatctgctttctgaaaaaaatgaacagcctcgcttaactttgattggatttccccagggctatattttaaagccgcagagtgcagattaccaatttctccctgaaactgaacagataacaatggttatggcagaaaaagttggggttcaggttgttccacattcatttatttatatttctaatcattctctttcatatataacaaagcgaatagacagacttgaaaatggagataaaatccatatggaagatttttgtcagttgtctggccgcttaacagaagataaatacaaaggctcgtatgagcagtgtgccaaaataattcagaagtattctgccaggcctggtattgatttaactgattttttttacaggctgcttttttgttttgttaccggcaactccgatatgcatttaaaaa

SEQ ID NO: 828 - DNA, 14397 bp, synthetic construct
  source 1..14397: mol_type = other DNA
  misc_feature 1..14397: note = Synthetic
gttcgggcattaatcagctgatcttttctaaaagcaaaacgaggctctgcatgcgaaattacacagttaccggttacggcaattaaaggaagaacgttttcaacacaggaaataagataaaggacatcttctccgtaatattccgtaataaactcgcgaaccatacggccttcatctgcaaattttacaaagccgtaatctccatcacccgtgcggttcaaaatattctcatgatttccctttaaaaagtgaacatactcaggaaaaagagtttttaatttcataagggcgccaagaactgcaaaaccgtctttcatttcgttgcttatggcaggccccgtgtaaatattacttgcaaattcaatttccgccgcaatccagcggtcgcgggtatctacttcggtatgaagggcatcgccaacacaaacaattcgggcaagccccttgctcaaggcatcaaaaaccctttctcccccgctcacaaaatcttccggaagcctgtaattaagaatattttccataaaatgcggacgggcgtgaatgtcaggaacgacaataagaggcagcggtgatttttgaaaatccagaagacttcccggctttccactctcgctttcaggcctgtaaacagaactttctgtttcaagcacagtagaagcagcatcagcaagattaaaaatctcatcatgagatggaagcacatttgtcctaaggatattttttacttcaggaagcatttaaaaaaaattaagaaacgaccaggctcatatttcctattgtaattttgtcgccgggattcatttttacatatttatcattaggaatgcgaactccgttaataaaagttccgtttgtagatcccatatctttgataaaatatgcatttttgattttctgaatcatagcgtgatgacggcttgcaagtttgttatcaacaacaacgtcattgtctgtatcgcgtccgattgtaatttttgcaacaaggtcaattttctgcttgttgaacataaggtaagaagccggctttgcatctccaaaagattcaagatgtttgccaaccgggctgtcggtaactatagttttatcactcataacttttattatagtatggaaaaaggctcggtgcaaatgaattattaaagactaattcttattcaaaagctttaaaagaggaatttcggcacgtacaacttttgaaagttcgcggatagaattaaaaattgcgtccctcatatcaggctccattcctctaaggcattttatcatgcgggcagatgcaggtactacattttttgtaagctcggaaaaacgctcataaccggatgcatttattacaataaaaagcgaagatatgaatttttctttctgccctacgctcattgtttctatccagttattcagtgatttatgaaagattttactttcgcggctgacatcgtttgcattttcaaaattgcagcctgtaacatgccagttaaaagggtcatgctgataaacggcaaatttatcactttttataacctcaaaatggcggggacgatggaagatcattccaacgattgtctgttcgggataaacaatggtaagacggtcttttatttctatatattccggcttattgtaaaaatcctgactaaagcctggaccgtcaaaatcataaatattagtaatcttttttctgatttttgaatcggcataaaccgctgtatgaagggcaaggtttccgccctttgaatggcctgtaagaatatattttgatttaagggctttatgagccgccctgatgtattcgagggcctgaacctgagaaggaatcttaggcagataaccaagattaaagttttccctccagcctacaacagtatcatctgttccgcggaaggcaaaaaccgcctgtttatctggaagaataaaagtaaccgcagcaaactgctcgtttctctgtctgtcaaaaagctctgaataagcgcagactttcagagaagaaaaccttgcagttttagaagcagactccagaagttccggtgtatgcgcgcttaccataggccccatatcacagcgggcagtaaaatctctggcagatttaagtgagtcccagaggcgtgaaagttcaatctgacttttaaaatcagatgaaacaagacctgtgtaatttatataaaccagctgagcaagtattattccgtcaattttacagaaaggtgcctgctcaaaagttaaatcaccacgccagttaagataatcaaataaatctgccataaagtgtccttactgtgcaggttctgcaggagttttaggaattacgatattaagaacgataccgatgatagttgcaagtgcaacaccaccaagactgaacttaaagtcgtttccgatattgagctggaatacaccaccaccaataccaattaccataattacagaagaaattgtaaggtttctcttatcctgataatcaacgccggcatcaacgattgtgcggagaccgcttgaagcaatcaaaccgtaaagaagagtacagataccgcccaaaaccggagtcggaattgtctgaatcaaagcaccgaatttctggcagaaagacaaaattacagcaataacggcagcgccaccaattacccaaaccgagtaaacctttgtgattgccataacaccgatgttttcaccgtaagttgtgttcggaggtccgccccaaactgctgcccaggcggttgcaaaaccatcacctaccagagttctgtgcaaaccaggatctttatagaaatctttacctacaaccttagaagttgtaagagtatcaccaaggtgttcacagattgtagaaattgaaacgattacaaaggtaaggctggcaacaagattgaacttaggagccatccagaaaagtgaaccgtcagcattttccttcaagaaaggaatagcaaaccactttgcagcctgaactccgctgaaatcaatcaggcggtaagccgggaagaagaatcccataatcaaagtgaaaaggtaacctgcaacaagaccaatcagaattgaaagggtgttgaaaaagttcttaaagaaaattgtagcgattattgcaacaataagagttacagcagcaatagaaagggctacaagtgaatattcattattaaaatagaaggcttcgttaattgcagttggagcaagacaaagaccaattacaataattaccgaaccgattacaaccggaggaagagcgcggtctatccagcctttaccagtaaagcggataatcacggcaataatacagtagaaaataccggcacaaattgcaccacccatggcgtaaggaactccgtacgcatgcccgattccgatcaaagccggaataaaagcaaatgaagaacccagaaatgctggaacctttgcttttgtgataaggatgtagaagagagtacctgttcccgcagtaaaaagcgctgttgaagtgcttaaacctgtaaggagaggaaccaaaactgttgcgccgaacatggcgaacacgtgctgaaaactgagcggaatccatttttttaatggaggtctgtcgctcggtccgtagaattgtgcagacatttttaactcctgtgagaggcggccggtcagagccgccggtgttctatagcaaagcgttaaaaaaaattgcgatgcagcaattttttagctttacctactttaaaggccgccggtcagagccgccggtgttatttttaatattttagcacacctgaaagattaaataaatggcagatcaggctgtcatgaaaaatgcctattataatgaagaataaaaaatcaaaatatcttttctttaacctatctttttagtatatttatgctatgttacttgatatccaacatttaaacgcaggtcttgaggacggaaaacagatccttaatgatctgaaccttactataaacgccggcgaaactcatgttcttatgggaccaaacggggccggaaaatcatctttaggaaacacccttttgggtaacccggtttacaaaatcacaggcggaaagattcttttcaaagatactgatattacaaaagaaagtactgacaagcgcgcaaaaatgggaatgtttatgtctttccaggcgccgcttgaagttcctggcatttcgcttgaaacttttatccgctctgcccttcagcagaaaaccggcgagcgcgtaaagcttttccagttccagaaggaattacagcgctgcatggaacttttgaacatgaatccagactatgcaaagcgcgatctgaacgtaggattttctggtggagaacgcaagaagtctgaaatcctgcagcttttgatgctcaaacctgattttgcaattcttgatgaaactgattctggacttgatgttgatgcagttcgctttgttgcaaaaggtcttgaagaataccgccgtcttacaaacggttcacttttgattatcacccacacaacaaagattctcgacggcctgaacgtagataaaactcacatccttgtaaaaggccacattgcaaaaaccggtgacggagaattgtttaagaagattaatgaagaaggattcgaagagttcttaaaataatatggaagaaaagacacagataaacgacataaaccgcgatttttatgacttccgctacgaagagtctgaaaaggacttttaccgaatcgaaagcggactgacagcagaaatcgtaacaaaactcagcgaagaaaagggcgaccctgaatggatgagggaattccgccttaaatcgctggaaatatataatcagctcaaggtgcctgactggggtccttcaatcgaaggccttcatatggaagatattgcaacttacgttcgcccgaaaactcagatgagcggaagctgggaagacgtccctcaggacattaaagacacttttgaaaagcttggcattcctgaagctgaaagaaaatctcttgccggtgtaggcgctcagtatgactcggaacttgtttatcacaatgttcaggatgaagttgcaaagcagggcgtagtttacctgggctttgaagatgcccttaaatctcctgaatggggaccaatggtaaaagaatattttatgaccctgattacgccaaaagaccacaaatttgcggctttgcacggtgcagtctggtcgggcggttcttttgtttacgttccaaagggtgttcacctcagcttccctcttcagtcttacttccgcttgaacgcaaagggtgccggtcagtttgaacacactctgattattgttgatgaaggcgcagatctccactttattgaaggctgttctgctccaaaatataacgaagcaaacttacacgccggtgcggttgaactttttgtaaaaaaaggcgctcacctgcgctattcaactatcgaaaactggtcaaaaaatatgtacaacctgaacacaaagcgtgccaaggttgaagaagacgcaagcattgaatgggtttcgggctcatttggttctcacgtttcttatttgtacccggaaagtgatttggttggccgcaatgcaaaggctgattttacaggaattacttttgcgggtaacggtcagaatcttgatacaggtgcaaagatggttcatctggcaccaaaaacttcaagtctgattactacaaagtcaatttctaagggcggcggaatgagtacctaccgttctgcaatctacatttcaaaggatgcagaagaaagtaaggcaagcgtttcctgccagtctttgatgctggacagcgacagccgttctgatacagttcctgcaatggaaatcttcaacgattctagcgacgtaggacacgaagcaaaaatcggaagaatcagcagtgacgcaattttctatcttatgagccgcggaatcagcgaagaagaagcgcgcagtatgatagtaagcggttttgcgaacccggtaagtaaagaattgccgctggaatatgcggttgaaatgaataacctcattaagttggaaatgaagggaactatgtaggggcaagggggaaagaaaaacatggaaaaacttgaaaacatgacagtaaacgaaatcccttcccttacatggaacttgcttaaaatcgaaaatccgttaaaaaacgagctgcgtcagcgggtcgttttaggattatcgagtaatcagctcacaaatcagctatgctgatttgttcggatacgtaggaaatatatatggataatatacagacattcataaatgaaatcccaggattaacttggaattggctcaaactcaaccgcgacaaaatcactcttgaggcagcctttaacgccgcaaaagcagagattttgaatgcggaagacggcataaaaattgaagaaggcattccttcagaagccgcaggactgaactttgccagcggagtttttaatgctaaaaatccaaagcttgtagacggtcatcctcactttgattttgtaacagaagataaaaatcaccctgtggaagcaatttttgcagacagcaaatattctaaaactgtaagaattagtggcaaggttgaaaagccgcttatcatcaatttttctgatgatgaaagccaggcaaatcttacatacatcattgcagaagaaaattcagaatccactgtagtatttgtttacgaaggaaaagcttctgaatctatcttccgcgcaaagattcttgccaaagaaaacgcaaaaatccacattgctaaggttcagcttttgggcaaagaaagccttcagctggatgatacggcagtaatcgcaaaggacggagcagaagttcagttcacacagattgagcttggcggccgccacgttgattcaggtcttggcgtaattcttgaaggctataagtcacgcttcacaagcgaagtggcttacacctgtaaaaaagaccagatgcttgatatgaaccacatcgtttatcacacaggcaaaaaatcagaatgtctgatgaacgtaaacggtacacttttggaaaacgctttcaaaacttaccggggaacaatcgattttaagaacggctgtgcaggctcaaaaggcaatgaaatggaagaagttctccttctttctccaaaagccgtgaataaatcaattcctgtaattttgtgtgatgaagaagacgtagaaggcgaacacggttctacaatcggccgtctttctaaagaagttcttttttacatgcagagccgcggaatttcagaagcagaggcagaaaaaatcatgtctcgcgccaagattcaggctgccgcatctttgattccaagcgaagaggtaaaagaaaaaatcaacgcttatttggataaataaattaaaaaatataagggcaaaattatgaataaatacagaaaagactttccgtttttcaaagcgattgatgaaaaatcttccgtagaaaacaaggacctgatatattttgatactgcggcaactgcccagcgtcccttcatcgtattaaatgcgatgacccacttttatgcaacagaaaacgcaaacccactccgtggcctttattcactgagcgagcgcgctacccttgcctacgaaaatgcccgcgaaacaaccgcaaagttcatcaacgcaaaggaagcctcagaaatcgtatttacccgtaatgcctctgaaagcctgaatctggttgcctacagctggggtctcaataagctcaaagcaggcgacgaaatctgcgttacaatcatggagcaccactcaaacatcgttccatggcagatggtttgccagaaaaccggcgcaaaactcgtattcatggaatgcgataaagaaaccgggataatcagcgacgaagaaattaattctaaaatcaacaaaaatacaaaaatcgtttctgtagttcacgtaagcaacgtactgggcgttacaaacccggtaaaaaagattgctgaaatagctcacaaaaacggtgcaatcatgattgtagacggagctcagtctgccccacacattaaggttgacgttcaggacattgacgctgacttttttgcaatgagcggacacaagcttggcggacctatgggaatcggcgccctctacggaaagaaagctctgcttgaagaaatggatccattcctccgcggcggcgaaatgattgaatacgttacccgcgatactgcaacctgggcagaagttcctcacaaatttgaagccggaactgtaagcgcaggcgacgccgttggtatggcagccgcaatccgctacgttcagtcagttggccttgattacatcacagaacacgacaatgccctctgctgccgccttattgacggcatgaagaaaatccctcatattaacatcataggaagtaaggacggaaacaagcgctgcggaattgcaacctttacaattgacggcgttcatcctcacgacattgcgacccttctgagtgaagaacacattgccattcgtgcaggccaccactgcgctcagccgcttggtcagtatctaggtcagacagcaacagcccgtgccagcctgtatttttacaacaccgaagaagaagtcgacaccttccttgaaaaaatcgcccaggtacgcaaatgggcaggttttagcgaataagaaggagggggaagtctccccctgcggacgcacttcgttgcgtcctaccctctctgcggggacaccccgcaacgccccgttttaggagacccttatggatactaaagaactttatagagaaattttaaacgaacacaatttgaaccctatccacaaacagaatatggaaaatccatccttctgtcttgaaggcgtaaacccaagctgcggcgaccagattaccctgcagcttaaaatggaaggggataaaatcacagacgcaagctttattggaagcggctgtgccgtaagtcaggcctctgccgacatgatggcagaccttgtaatcggaaaaacaaaggaagaagccctcaaacttgcagacatttttgaccgtatgataaaaggcagcgtcaccgacgaagaactggaagaacttgatgaggccgctgcccttcaggacatttcccacatgccggcccgcgtaaaatgcgcaatgcttggctggagaacagtaaaagaaatgctgtcttcacctgttgaaacaaaatagtaaatatgatatattatttttccacggcgctgtagctcagctggattagagcatctgccttctaagcagagggtcggcggttcgagcccgtccagcgtcatctaaaagcttcctaaatagggagctttttttcttatattcatacctaaaataaatgcgtctttggactattcaaccagaaaatgtttataatctattgataagttctgaatttttttattgtaaaccagagctttctgaatgtctctcttcatttaattttgaaaacgcttatagttggctagtttcaaaaatggaaaatttaattggtccaaaaccaccatatgtaaaatatcctgtatgggcatggcatacttttgatggaaaacattctaaaccggatttgagaaaaacagagttccgatattttacagaatcctctgtatgcattgaaatcgaaataccagataaagattgttgtttaactgatgaagaagaatggcacatagttttaaataactgctttaatactaaatatttacataaccttgattttgaaaacgcagaagaatgttttgaaaaacttccaccaaaagaacaaaagtttattaaagaaaaatcatgggactgtatattcgatatctcacaatcaaactatattcaggcaacattttgggaactcagaaaagaaaacataataagaacatggtcgataaaataaaaaaagaggaagccgtagctccctctttgcatttgcaatactatttatattcacgcaaaaatatcaacgaatataaaagcattttgcggaaacttaaagtttccttgttagcaggttgaccgcaaaaattaatcagtaacttaataatatacctcataagatttcctgtcaaattattaaacctttttggaaatgtagtgctataattaatgattatgaaattagaaaaatggcgcttaggcttagatttaggaacaaattcaattggatggagtgttttttcacttgataaagataattctgttcaagaccttatagatatgggagtcagaattttttctgatggaagagacccaaaaactaaagaaccactggctgtagctcgtagaacagcacgctctcagagaaaacttatttatcgtcgaaaacttagaagaaaacaggtcttcaaattcttgcaggaacaaggcttatttcctaaaacaaaagaagaatgcatgaccttaaaatcattgaacccatacgaattgcgaataaaagcacttgatgaaaaacttgagccttatgagcttggacgggcattattcaatcttgcagtaagacgaggttttaaaagtaaccgtaaagatggaagccgtgaagaagtttccgaaaagaaatcacctgatgagataaaaactcaggcagatatgcaaacacatcttgaaaaagcaatcaaggaaaatggttgtagaactatcactgaatttctgtataaaaatcagggtgaaaatggcggtatcagattcgcacctggacgaatgacatactatcctacaagaaaaatgtatgaagaagaattcaatcttattcgttcaaagcaagaaaaatattatccgcaagttgattgggatgatatttacaaggctatattttatcaaagacctttaaaacctcagcagcgaggttactgcatttatgaaaatgataaggaacgaacttttaaggcaatgccttgttctcaaaaactcagaattttgcaggatataggaaatcttgcatattatgaaggcggatcaaaaaagcgtgtagaattgaatgataatcaggataaggtattatatgagcttttaaattcaaaagataaagtaacttttgatcagatgagaaaggctctttgccttgctgattcaaattcatttaatcttgaagaaaacagagactttttaattggtaatcctactgccgtaaaaatgcgaagtaaaaatcgttttggaaaattatgggatgaaattcctcttgaagagcaggatttaattattgagacgattattacagctgatgaagatgatgctgtttatgaagttatcaaaaaatatgaccttacacaggagcagagggattttatagtaaagaatacgattttgcaaagcggaacctctatgctttgtaaagaagtttctgaaaaacttgtaaaacgcttagaagaaattgctgatttgaaatatcacgaagcagtagaatcgcttggatataaatttgcagatcagactgtagaaaaatatgatttacttccatattatggaaaagttctacctggttctacaatggaaattgacctttcagctccggaaactaatcctgaaaaacactatggaaaaatcagcaatccgactgttcatgttgctttaaatcagacgcgggttgttgtaaatgctttgattaaggaatatggaaagccatctcaaattgcaattgaattaagccgtgatttgaaaaacaatgtagaaaagaaagctgaaattgcaagaaagcaaaatcagcgtgcaaaagaaaatatcgcaattaatgatacaatttctgctctttatcatactgcttttccgggaaaatcattttatcctaacagaaatgaccgcatgaaatatcgtttatggtctgaattaggactcggaaacaaatgtatttattgtggaaaaggaatatctggtgcagaactttttacaaaggaaatcgaaatagagcatattcttccattcagcaggactttgcttgatgcagaatcgaatctgactgttgctcattcttcttgtaatgcttttaaggcagaacgttctccttttgaagcatttggaacaaatcctagtggatatagctggcaggagattattcaacgtgctaatcagttgaaaaacacttcaaagaaaaataagttttcgccaaatgcaatggatagttttgaaaaggattcaagttttattgcccgccaactttcagataaccagtatattgcaaaggcggctttacgatatctaaaatgtcttgtagaaaatccgtctgatgtctggacaacaaacggaagtatgacaaaacttttgcgtgataaatgggaaatggattctattctatgccgcaagtttacagaaaaagaagttgccttacttggccttaaaccagaacaaattggtaattataaaaagaatagatttgaccacaggcatcacgcgattgatgctgtagttatcgggcttacagaccgtagtatggttcaaaaacttgcaacaaaaaactcacacaagggaaacagaattgaaattcctgagtttccgattttacgaagtgatttaattgaaaaggttaaaaacattgttgttagttttaagccagaccacggagcagaaggaaaactttctaaagaaactttacttggaaaaatcaaactccacggaaaagaaaccttcgtttgccgtgaaaatattgtttctctttctgaaaaaaatcttgatgatattgtagatgagaaaattaagagcaaagtaaaagattatgttgcaaaacataaaggacaaaagattgaagcagttctttctgacttctcaaaagaaaatggaataaaaaaggttcgctgtgtaaacagagttcagactcctatagaaattacctctgggaaaatttcacgttatctttcaccagaagactattttgcagctgtaatctgggaaattcccggggaaaagaaaacattcaaggctcaatatataagacgaaacgaagtcgaaaagaattcaaaaggattgaatgttgtaaagccagcggttttggaaaatggtaagccacatccagctgcaaaacaagtatgtttgttacataaggatgattatctagaatttagtgataaaggaaagatgtatttttgtagaattgcaggatatgctgcaacaaacaataaacttgatatccgtcctgtttatgcagtttcatattgtgcagattggattaattcaactaatgagactatgcttacaggttactggaagccaactccaactcaaaattgggtatctgtaaatgtattgtttgataaacagaaggctcgcttagttacagtttccccaatagggcgcgtatttcgaaagtaaaaaatcttctgtaatcataaattttaactcctctgccgataaataactgtgcttaacagagtcttagagattgcagaagaaaatcgttatctttctctaaagcgaggctttattgttattcagcaaggaacagaagaacttggttctgtcctctggatgacatagctgtattattgctttctgcacaaggcgtaacattaacaaaaaatgttataaatgctctttctgaaaaaggttgtattacaatttttttgcggtgccaattatattcctttgagcatggttcttcccattgccagtcatacctattttacaaaaatcataaaaaatcagattaatgcaacagaaccttttaaaaaacgagtctggcagcagattgtaatccaaaaaataaaaaatcaatctttaagtttaggttatacaaaaaagccagaagcagaaaaattaaagatgattgctgatactgtaaaatctggtgatacagataacagagaagcatacgctgcaaaactttactggaaagcattatttggagagtcttttattcgtgataaaaatggtgacggtataaatgctttcttgaattatggttatgcaataatgagggctggaatggcacgtgcaatatgtgcacacggtttgttaccagccttaggaattcatcacgataataatttgaatcagttttgccttgcagatgatttttttgaaatttacagaccattggttgataaccttgtttataaactttgggaaaatggagaaaaagatttaacacctcagaataaaaagacgcttgtagggcttttaaaaataaaggttcatacttctgactgcgatacacaggctgttcagagtatgcaatatatggtgtcttcctttgttaatgcactggaagctggaaaacctgacattgaactgcccgtttgggaaggaaatgctgatggaattaccattattgaataggtatgagcttatgtggatgctagttttatttgatttaccagttgtagaaaaatatgagcgaaaggaagcgacacaattcaggaattttttattagataatggttttggaatgattcagtattcaatttatacaaagttattttctggaaaagatgcatgcgaaaagtattacaagatgataaaagacaacttgcccagtgaaggaaaagtagatatcataacaattacggataagcagtatg

SEQ ID NO: 829 - DNA, 13590 bp, synthetic construct
  source 1..13590: mol_type = other DNA
  misc_feature 1..13590: note = Synthetic
ccttgtaaaacttatcttgagtctttccttttttatctccgccggtaagcaaaaaagctttcctcttggaatcaaaataataggaaactctcaaaagatgttgttgagtctgatttcttaattctttcaggttcttatatttttttgaaccatgaagaacatctgcataaggacgaggaagatttgggccgtactgttgtagtaaaagaactctttgcaaaacggcctctttactttcatcgtccaatgctaaaaaccaagcatcgaattcatctgatgaatctacattccacataaattattatatgaactaaagtgaatatttgtcaataagaataaatatgggacttttaaataagtcatatatctgtttatgtgatataatattaaatattcaggagattgttggtatgaattgcggaaagtggcgtttaggcttagatttggggacaaactcaattgggtggagtgttttttcattagatgatgataataatgttttagaacttaaagatatgggtgtcagaattttttctgatgggcgagatccaaaaacaaaagaacctctagctgttgaacgtaggacggcacggtctcagcgaaaattgttttaccggagaaaactcagaagaaagcagaccttcaggttattacaaacgcaaggacttttcccaaaacgaaaagaagattgcttaaaactgaaatctgaagatccatatttatttaggataaaggcacttgattcaaaacttgaaccttatgaacttggtcgtgcattattcaatcttgctgttcgaagaggttttaaaagtaatcgtaaagacggaagtcgagaggaactttctgaaaagaaaactacagatgaaatcaagtctcagtcggatatgcaaactaatcttgaaaaagccatcagagaaagtggttgcagaactattgcagaatttcttgttaaaaatcaaaaagaaaatggtggtttacgatttgttcctggaagaatgacttattacccaactagaaaaatgtacgaagatgaattcttccagataaaatcaaaacagataaagtattattcgaacattgactgggatgcaatttataaatcaattttctatcagcgtcccttgaaagctcagactcgcggatattgtatttatgaaactgatagggaaagaacatttaaagctatgccttgttctcagaaactcagaattttacaggatataagaaatcttgcttattatgattcagcaaaacaaaaaaaagaattgaactgtgatcatgataagattttatatgaattattgaattcaaaagataaagtaacttttgatcagatgcgaaaagcattgaacttgtcagaaaatattacttttaatcttgaagaaaatcgtgattttcttattggaaatccaacagcggtaaagatgcggagtaaaaatcgcttcggaaaattgtgggatgaaattccgcttgaagagcaagatagaattattgagacaattatcacagctgatgaagatgagcaggtttataaagtaattgaaaagtattcactttctgaagaacaaagaaatttcattgtagagaatacagttctgcaagctggcacttcaatgctttgtaaagaagtttcagaaaaacttgttaaacggatggaagaaattacagatttaaagtttcatgatgcagtttcatcgcttggatataagttttctgaccagagcatagaaaagtgtgatttattgccatattacggaaagattcttaccggttctacaatgggtgtaaatctttccgagccggaatcaaatcccgaaaaacgatatggtaaaatcagtaatcctacagttcatgttgcattaaatcagacccgtgtcgtagttaattctctgattaaagaatatgggaagccttttcaggttgcaattgaattaagccgtgatttgaaaaacagtgtaaaagaaaaagctgaaatttcaaggaaacaaactcaaagggcaaaagaaaatattaaaataaatgaatcaatttcagatttatatcataaggcttttcctggaaaaacatttttcccaaaccgtactgaccgtttaaaatatcgtttgtgggaggaattgggattaggaaataaatgtctttattgtgttaaaggaataacagcatcagaattatttacaaaggaaattgaaattgaacatatattgcctttcagtcgaacgcttcttgattcagaacataatttaactttagcacattcttcatgcaatgcatttaaggccgaacgttctccttacgaagcctttggctcaaatcctcaaggttataattggaatgaaattgtaacccgtgcaaatcaattaaaagatgcatctaaaaagaataaattttctccaactgcaatggaaagatttgaaaaagattcaagcttcatcacccgccagcttacagataaccagtacatttcaaaagctgctttgcggtatttaaaatgtcttgtagataatcctgcagacgtatgggcaacaaatggaagtatgacaaaacttcttagagataaatgggcaatggattctatactttgccgtaagtttacagaaaaagaagttgctgcactcggtttaaaacctgaacaaattggaaactataagaaaaaccgatatgaccacagacatcacgcggttgatgcagttgtaataggattaacagacagaagtcttgtacaaaaacttgctaacaaaaattctcataaatcaaaccgaattgaaatacctgaatttcctattttacgagcagatttaattgaaaaagttaaaaatattattgtaagttttaagccagatcatggtgcagaaggtaagctttctaaagaaacactacttggaaaaatcaaattacacggaaatgaagtatttgtttgccgcgaaaatcttgtttctctttcagaacaaaaccttgatgacattgtagatgaaaaaatcaaacaaaaagtaaaagattatgtatcaaagcataatggcgaaaaaattgattctatacttacagcattttctcaagaaacaggtattaaaaaagttcgttgcaaaaatcgcgttcaaaagcctatagaaataacctctggcgaagtgcctagatatttagctccagaagattattttgcagctataatttgggaaataccaggcgagaaaaaatcttacaaagcgcagtatatcagacgaaatgaagttgaaaagaattcaaatggtaagaatgtcgtaaaacaagatgttttggaatctggcaaaccgcacccagcggcaaaacagatttgtatgttacataaagatgattatttggaatttagtgataatggaaaattgtatttatgtagaattgcaggatatgcagcaacaagtaataaacttgacattagaccaattcatgcggttacatattgcgcagactggatttactcaacaaatgaaacaatgcttactggatattggaaacctactcctggacaaaactggatatcagtaaatgtactattttcacagcttcaagctcatccagttacagtttctccgattggaaaggttttcagaaaatagttttccttctgcaatcataaaattagctgtttatgccgataaataagtgtgctgaatagattgttggagattgcagaagaaaatcgctatctttctctaaagcgtggctttattgtcgtccagcaaggtgaacaggaacttggttctgtaccgttggatgatattgccgttttattgctttcggcacaaggcgtcacaataacaaaaaatgttttaaatgctcttgcagaaaaaggttgtataacgattttttgtggggcaaattacattcctttgagtatggttttgccaattgccagtcacacatattttacaaaaatcataaaaacacagataaatgcgacagagccatttaaaaaaagaatatggcagcaagttgtaattcagaaaataaaaaatcaggcattgagcttaaaatattgttataaagaaaaagatgtaaaacttattgagaaaatttcatctatggtaaaatcaggagatccagataatcgagaggcttatgctgcaaaaatttattggaaagcattgtttggtgattcttttgtaagggataaagatggagtaggaataaatgcatttttgaattacggctatgcgattatgcgagcaggaatggtaagggcaatttgctcacatggtttgataccttctttgggcgttcatcatgacaataatctaaatcaattttgtctggcagacgatttatttgaaatctacaggccaatagttgatacatttgtttataagcttatagaaaaaggtgaaactgaattaaagccggaaaacaagaaagttttggcaagcctattaaaagtgaaagttcgtacttccgaaggtgaaagtcctgcagttcaaagtatgcaatatatggcttcttcttttgtaaatgcattggaagttggaaaacctgatattgagttaccgatttgggaaggaaatgaagatggaattaccattgttgaataggtatgagcttatgtggatgatagttttatttgatttacctgtcgttgagaagaaagaacgaaaagaggctacgaaatttagaaattatcttttggataatggattttcaatgattcaatattcaatttatacaaaaatgttttccggtaaagatgcctgcgaaaaatactacaaaatgataagacaaaacttgccagcagagggaaaagtagatattataactattacggataaacagtatggaaatattatcagctatcaagctgcagagaaaattgaaaaaaaacagcaggaacagctcgttttgttctgattttttgacaaaaaaaatacgtctgacgcaacttaattctatacaacaaaaggaattgcatcagacatattataactgattaatttttccggtcaacctgcaacaagtagttgacggtgacgttctgttcggacattataactgattaatttttccggtcaacctgcaacaagcatgagattaagcagaattgtataagcattataactgattaatttttccggtcaacctgcaacataaagcctgttatatcgctttttaattgaattataactgattaatttttccggtcaacctgcaacaaaaaaatcactttccataaaagaaaagcaattataactgattaatttttccggtcaacctgcaacagagcgttaatcttttcattcgcctcgtccattataactgattaatttttccggtcaacctgcaacctttggaacgttgctgccaatctcgtaataattataactgattaatttttccggtcaacctgcatcgcttttttaatcaattacaactgctgtgccgctggctgtgaccataagcatgctgttgttctgaccgagaatttcgtaatcaatatctacgccgacaattgcgttggctccaagttcccttgcgcggtcttccatttcttcgattgcctgttctcgcgcatcaatcagttcatcttcataagtttgtgagcggcctccgacaaaatcccttaaacgtgccagagcatctgaaataaaattcacgccggaaattacttcgccaaaaacaatttttttgtattcaattatgttgtgccccttaatggacggtgttgttgtagtaatcataattttattgtacattccgttctgctttttttcaactttatgcgcaggaaattaaaagattttgaaatttgactaattttagagagaggaatacaatattaccgaataggttaaaaatataccaccatattttccagggagtttgatatgaaaaaagtcatagtgccagtgttgttgctcgtaacaggattttcagttttttctcaatcacaagatttgtacaaaagagaattgcctgagattccaaaatcttcttcagctgatactagcggtagttgtaaggcaaatgatatttcgacattaaaagtcgatgacaaaatccattatattgaaatttcttcaatcgaaaatatcggcttgattcaggttgcagcgataagtgattttgaaaatctgatttctgaaaaaaatattacgacactttactgtctttattctgaaggcaaaaatagactttatgcgatttctgataatgcaggcttttgtcttgatatcgggtattataaaaatctggctgatatagcaaacggttttaattccggttacgaaaacggaaaagatttttatgaatcgaaaaacttgaacatcactaaagcggatgtttactactattataaagcaaatgatttttcttcagttgaagactgttatgatgcctggaataacgagtttttctttgttcctgatgaaatgaaaaatcattatgatgaccagccaaaaaagaaattgagcgaagtttattatgcggcaaaagaaaaaggattttcgacttatgctgattttgcggaatatcttttttatacaaaatacggatttaagaacaagaaagattatttgagtgcaaaggaaactggtttttcagatggtggaagttattattacgcaattgaaaatggatttgactttggaaaggattactatcttgcaagttctgttggaataaaaaattttgagtcatatcagaattgggctcagatgatttgtgatatagaaaaaatttgtaaaaccaaaagctttgataaaaagtatggttcaatttattattttctccagtctcttccaaaagacgattattcagtaaatgcgctttctaacacgattaaagaaaatattttccaaatggattcaaatattatccgcgctttgaatatgtatctgaataatattgagcgtgttgattcatatgaatataaaatatcaaacaagcggtatggcgaacggataactttaatagatgaaattgtctcaactgaatcaattatgaattttattgagaatgctgatgtaaagccgctcggttcatataacgcgaaaactgatatttttaagaaaaaacttcagctggatacaggaatcaaaggcaatataaaagatattgaaaatattcctctttatacgagaaaggttgcgcctgcttcagcaggaaattccagtgcgcagtaaaaatcatccatcctccggttagccatccttgcttttgattcgtataaataagtgagagcggactgcgggcgcggaatgcataaccgcggagctttatgaggagggcattatgaacaaggtaatcgaattaaatgagatggaactggacggaatcgtaggcggcaacatttttgaggatgcgtgggattggatttcgggagatgcatgggattttgtcaaagatactggaagtaagctttgggacaatttcaaagaaaagttttgggagaaaggaataaaggaaacattctggaccggcccaaaaaaagtggttgaagcttttggtgacataatcgagattatctggaaagagttgagcaaatgaaattatgtggcatgtttatttgaatggttcctgttgcgaaatgcaggagccttttttttatccgggctcaattgaaaaaaagttgcgcttatcaattcaaggggaatatttgtcaggctcttttttttctttataattcgtggtacaatcactttatagatattggagattttgatttatgagtgatgattttaggccacacaagccaagggcagtacttgaacctggaacgctggaaaatacaaggcgcaatatcggtctgattgatgcagaagaagctgctaagatgacgaaaattttaggcggcgaaatcttaactgaaaaatcagttcctatcgattattcaaaactcccaaaacgcccgattcaacgaaatcatgtcgcaagggcaaccggtaagacaagtgcgtccggttctgttccgtcatcagcaggtgcagctctttcttctactcataaggaagagccaaaaaagaatgttacccgtacagcaaatctcccttcaatttcatctaaagacaatcagcttattgataagctcatgatgtctcctgaatacggcattaagaaaaattacggctttttgaatttcttaaagggaatccagaaggacggaagggaacgctttattcctgaattcgctgaaattacgcttaagtgtcatatggaacacatcaatgcatttatcacagtaatgaagacttttattcagcttgcgcctgatacatacaaagcaaaaatacagaatgaaactgaactcaaattcaaattcctcaggacagttgcagcatggtcaacgcgtgacattaagctcacttatataaatcttgaaacactcaagggaaatgttgtagtagccgatttgattccgtttgtaaaaatgacataccggctgattataactgttttgtatttaggtgaagcgacagtaaacaggcttgtacgcgaaatttatactgacatgataaaatatcctaaggcagatcaggaaaaattttccaagctttcaaaagaagcgcttaccgaatggatgtacatttatgtaaaaatcgctcgcggaatgtatccccttttgatgcgtatgtgcggaactccttacgaggaatttaaccgtttctttgtaacgcagatttcaacagtccttaattttgtgggacttaaaaaatttgatattcttctcccggaaaaaaaggttgatcctgaagcaatcaaaaaggcaagggaagaggaagagcggaaagccaaggaagaacagaaaaagcgtgatgaggaagaagaggcgcgtcttaaaaatgatatggttgatacaggcctcaaccttcttgataagcttttcccgcaggctggatttttgcatctggacagcttccctgatttgtacggctattttgatccgctgtatgattttgatgatgagtttgtttatgttgcgccggaaaatccgattcagataacgcttgtgcttgcaagaattatagaggatttcctgaatgcaacccacaatatgaaatttgagcctgaacagaacgaagcgcttactgatccgcgcgataattttgttactgcaatcggagaatggccgttataccgtgaagatttgtttgataaaaaatatgcgccttcattaaagcagcttgttgaccagacatatactcaggcaaatttcggacagactcaggtaggaaaaaaagtaatcacagatttgtactggatgacaaagtggaactttttgccgcagtttacattcgaccagcttttgcttgagcgtccgattaatgataataaatacatagcgcttaacatgcgtacttcatttttccgcagggcgtttacatatcttacccagcagattgcgtcggctgaggcatcaaagggttctgttggcggacttgaaaatccgtgggagcactaccagtttgactttccgtcaccagtcagccgccgccttgatgtcctcttgaatggaaagaataagggcgcgaattgtacggcgacaaacgcaaacctcataaaatatcttgtctgcatcgtatctgtgcttgactggtgggtaaatgcaaagggaagccctgcgtataagactgacccaaagcatatttaccgtactatgcctggttcaaatgaaccggcgttttctgtcgaagcgcgtaacgatcaggataagctttttgccgaagccataaaaaacagcgttcagaaaaaagcagaataattcgtgttgaaaagatcaatgacttagcgactcacagattgcagaaaattatactgtaaaaatttcttgtaaattttaatttttcgtggtaaaatttaacattgagagtttatgctcgtcggagtgtgcaaaagtgaatgtaaagaagttctttcagagccttcagttcaggctcatcgcgattgttgttgcaatttttatcgtttcaaatgtcattgttgtttctgccgctttaaagcttgcaaaatcatctacatctgattcagttgaactgctgcttaattccgtaactgattcagcagccggaagaatcaagggcgaaacagaaaagcatttcagaatgcttgaggctcttgcattgatggataatcttagaaatccggatatccaattgatagaaaaatgccgtgaaatgactcgtatttcaaagaacagttcagaatatgagaatataggtttttatactctgaaaggagagggttttactgctgccggtcaggcaattcaaattgagcgcgcttatattgatgctgcccgtcatggtgaaaattttcttgctgatcctgcaatcaatcctgtaacgcatgttctgtttcagatttattctgttccggtatacgatgaaaacaaaaagccggttgcatgtcttacggcaaatgtaatgggtgagacgctttcaaagaaaattgaagagctttcatttggtgtttctgattcagttataaaagttatcagccgtaaaaccggtcatgccgtagcttctactcagtttgatgatgtaatggcatttgatgatattaatgaaattgctgataaaaacctcaagccggttctttcaaagctgatgaatgacgagattggaagcgacagttttattgattcaaaaactggaaagcagatgcttgctgcatatcgtcctattgagggaactgaatggtcggttcttggtatatgcgcctatgatgatttctattctcagatttcaaagatgcaggtgattatcggaacacttgcgcttgcaacgattttgatttcgttcattgctgtatggcttacaatggcaatcagcttaaagccgcttaaaaccgttaaggatgcaatcgatgatgttgcaacaggagatgctgaccttacaaaacgtcttgaaaaacacggtgatgatgaaatttcagatgttgttgttgaattcaatgtctttatggataagctccacgatattatcagtcaggttaagaattcaaaagttacgcttggatatgccggcgataagcttcaggaaagcacgcagaacacgtctgcttcgattacacagattcttgcaaatatcgaatccgttcattcgcagattaagaaccagtcaaagagcgtgcacgaaactgcaagcgccgtaaacgaaattgcggcaaacattgagtcactcgaaaagatgattgacagacagacagccggagtaacggaagcgtctgcagcggttgaagagatgattggaaacattcactcggtaactgattctgtagagcgaatgtctgcttcgtttagtgagcttttaattaatgcacagaacggaattgatgttcagaacggaatgaacgaaaagattgagcttatcaaggggcagagcgagacgctgcaggaagccaataccgcaatttcggcaattgcttctcaaacaaacctgcttgccatgaatgccgcaatcgaagccgcacacgccggcgaatcaggaaaaggctttgcggttgttgctgacgaaatccgtaagctttctgaaacatcaacgcagcagtcaaagacaattggtgaacagctaaagaatattcagacttcaatcagcgaagtagttatttcttccgagcagtcaagcaaggcgtttaacggcgttactgaaaaaatcaagcaaactgatgaagtcgtgcgccagattaaggatgcaatgcttgaacagaacgaaggttcacgccagattagcgatgtccttaatttgatgaacgacagcgcacatcaggttaaaacggccggaacagaaatggccaccggaaactccgctattctcgaagaggtccgcaatcttcaggatgtaacaaccgtaatgcagcagagcgttgacgaaatgagtgttggtgccaagaagattaatgagaccggcgaagagctccgctcaattgcaatcgagatggaagattcgattaacgaaatcggcggccagattgatttgttcaaagtataaggcaagcgtaaaattgctgacggagtttatttcctgaaaacaataagataagaaataataaaggctgtctgaaccaaaatgcaaatgcacttcaaatcgggcagccttttttttagcagctatgttttattgacagcttttatcagtaattttctgcgctgatttcaaaatagcttttcgggtgagcgcaaacagggcaaacctcaggagcttttgttcctacaattatgtggccgcagttacggcattcccaaaccttaacttcgctcttttcgaatacggcagccgtctcgatatttttaagcagtgcgcggtagcgttcctcgtggcgcttttcgattgcagctaccatgcggaattttgcagcgagagaagcaaagccttcttcttccgcggtttttgcaaagccctcatacatgtcagtccattcaaagttttcgccgtcagcggctgccttaaggttatctgaagtatcaccgattccttcgagttccttgaaccacatctttgcgtgttctttttcgttgtttgctgttgcttcaaaaattgcggcaatttgctcaaacccgtctttcttggcacgagaagcaaagtaagtatatttattgcgtgcctgtgattctccggcaaaggctgcctgaagattcttttctgtctgtgttcctgcgtatttactcataagttcctcctatttttattttctcattgaattttattattcgtcaattcctttattgtctttttcgcgaatttctacacggcggatttttcccgaaatggtttttggaagctcatcaacaaattcgatgatgcgcggatgcttgtacgaagcagtctggctttttacccattcctgaagttcaatttcgagcgcatgattgggttcgtagccctttgtaagaacgattgtcgcctttaccagctggccgcgttttggatcaagcacgcctgttaccgcacattcaagaacggccggatgctgctgcaaaacgctttcaacttcaaacggactgattctgtaaccggagctcttgatgatgtcatcgcttcttccaacaaaccagatatagccgtcttcgtccatagttgccgtatcgccggtgtgatatatgccgttgtcaaatgcctcggctgtaagcgaaacatcctgatagtatcctgcaaaaagtccgagcggccggcctttgtcgagcttgattacaatctggcctgtttcgccaggagcacacggactgccgtcagattttacgatggcgacattatatccaggggcgggcttacccattgagcctggttttggttccatgccagggaagttacctgcaattactgttgattcagtctggccgtatgcctcaaacattttgattccggtctgttcgtagaagcggttgtaaacttctgcattcaaagcctcgcccgccgtaacgcaatacttgagcgaagaaaagtcgtatttagaaagattctggcggataagatagcggtaaacggtcggcggtgcacagaatgtcgttaccttgtagtgcgacattttattgagcgtaaggtccggcttgaaagaatccatgtcgtatacaaaaacagcgcttcctgcaatccactgtccgtagagctttccccatacagccttgccccagcctgt

SEQ ID NO: 830 - DNA, 13038 bp, synthetic construct
  source 1..13038: mol_type = other DNA
  misc_feature 1..13038: note = Synthetic
atcggaggagctgggggtcagccccgaggccctgcgccgggcggacgggggctgcgtgtccatccccatgaccgggctcaaggcttcgctcaacgtcggcgttgccttcggcatcctgatgcaggcctggaccggcgggagataaaagcggcttcggtaagcctccctgccggtccaggtcatttggactactggttcacggcctcaggcagggcttcggcaccggcttcgctggcaagctccttctcgtagcgcttctcgcagaacttgcagatcgttcccttgcccgcgtcaatcgcctcctgcgcggtcccagtcgtcagcgtctcggagcggtcaagcgcctggcagtcctcgtaaaggtggaacttcttgccgtgctcggtccagtacacgccggttcccgcgttggcctcggcgacggcctcctgtgacagggggttccagtcgtagctggcaaggccgcacaccagcatgaggacggcggcgacggcggttccgacggccttggtcttcttgtcggccttctcgtccttgagcaggatgatgatgaaggggatgaaggcgaccgcgctgaccagtacgcccatgttgttccacagccagaacttgagcgcgttcttctgggaagcgggatcgatgtggttggctttcttccacagggtggaaccgatgatgacacagacagcgtctacgaccagcgcggcgatggccttgtacagcgggtcaatctggggaaggacgagcagcttctccaggaacagggcaatggcgagcacctcgaacacgaccgcgacgagccacaggatgacggccccgacgcggaggcccgtggcgtttcccgtctgctggacggcaccgggcttccctgcgggcctcgtgcccggcttgacggcctctccggtggaggccgacacaatcttatgctccttcttgggcttcttctcttctgccataattcaactcctctattcgatgaatttcgatattcagcccccggacaaagcctccgggatgcgttatgggtgaaaagtatacacaatcccgaggatttccacaagacggcggcggcggacggaccgggcgcattacgaagcatggcggaccggcctgctaccgtttccgcccccgcacagaagctccggccataaaaaaggcggcacgccccgggggaaggccgcctgatgcccgaatggtggggcagtctcaaaagcaaccggctttttgaaactgcccctgctgcttttctctattcgtagtagacttctacactacctaacgataaagcaccctctgatctcagaattattgagtccgaattgatatttgttattgttgcagtgcctccgctgatagctattgtgcctttatccgttctcagcttatttatatcattccagctttgtgtaacttcaacacgcgtaattctttctcccatcggagttgtaatcgtagcaattttgccggagccgctgtgtagataaatgccatcgccctgaacatccgtagcagtcagcttggcatgggtttctgtgtattcacaggttcccgcggtcagcctaaaagatacactacccggaactattgtaacaaccgtaagctcgtagcttgcggtatttgtcgcataagtgtagttcgcgctgtccgccacggttgcggtgatggaggcggttcctgcggcgacgattgtaacttcacccgtgccggcatccactgtcgcaaccgcagtatttgacgaggcatagctgacggtgccgtcgcctgtgtttgtaagcgcgttggtaaaggcactggcactcgtcgcctttgtgacggagcttgtcgcatagcttatcgtcgcagccggtaacgataccgtgagcgtgtagcttgcggtgtttgtcgcgtaggtgcaggttgcgctgtccgccgcggtcgcggttatggtggtcgatcctgcggcgacgattgtgacttcgcctgtgccggcatccactgtcgcaaccgcagtatctgacgaggtgtagctgacgctgccgtcgcctgtttttgtaagcgcgttggtaaaggcactgtctgtcgtcgtcttgctgacggtgcttgtcgcatagcttatcgccccagccgtcggtggcgttggagtgggtgacggcgtgggtgtgggtgtcggcgtgggtgtgggtgtcggggtaggcgtgggcgtcggtgtgggtgtgggtgtcggtgtgggggtactgccggaagtgctgccggtgagcggcgcgttctctgatttttcgcccctgtaccagtcctcgttccagtagtcgcaggacgcgaccatcatgaccgacgcggcaatggcgcatgccgccgccagccgtaagagagttttcttcattcttctgctccttgatacttgtatttctggactattatatttcttatccccggaaaaacggccgcgatgcgcccgactgagccgaccgcatcgcggattttctcacggaggaaatagacatgtataggatagttacttaggacagagttatggctgtatggagctgtatggagctgtatggagctgtatggagctgtatggaagaaacttccttcattttttcttcggttcctctcagtcctaatattctattatcataataccatgttatgcccctcctgtcaagtatgaatatgatgttaagcagggcggaggcgcgggcggttccatgccgcccgcacactcaggcaagtaccgtgtcaggaacggaggtttctgactgcctggcaagaaatgcctacagcttctctatttcagcaacggacaaacccgttatctgcgagacctgggatacaggcagccccatcgcaagggccctgcgggcagattccttgaagccctcatcacgtcccaccttgcgccccttttccataccctcgtcaaggccttctctccgggcagcccgtaaggcctgagatgcggtcgcgctcatggagctccagatgatactgggtcagccacaagtcgcggtccgcgctgattgatgacagtgatttctgtgcctgcataagtccctccttcttgcttgtcaacacatctatgatgcccttcttctctggattgtcagcgtctttcaagaaaatggcccagttctcaaggtccgtgttggtctcaaggctcccttccagtttcacggcctcgggaagctctatgaatatgatgttgagcgagtttgaaagctcccgaccgtcctttgtcctcatcgcatatcggctcacgggcgtcttcttcactttgcggttgcgggtttcgacacgtttttggagacgtattcaaagtcaaggacacttatctggtagacggtcggagccttctcccagccgtccccttttttcaggtaagtcgtctcaagacgggcaacctggtactcggcccgcttgccgtagtcgtactgctagttgaatgcctgcatttctatgtccgccgataaaccgtcgtcaaactcgcaggagatgtcataactgacattcctctgtccgataaagccgatgggagcatcgttgttgcgaatctcaaaatgcgtaatcttccgctcggtcgcggcttccagaaaggactgcagcgcgcccttcgactccggcgtgtcctgcgtgaacagggccttgaatgtggagtcgatgcgcgggtttagcagtgcgcccgtcccggcctgggaagcgtattcctcttcgttcctgtactctgcctgtgccatgccgacagtataccacggattcaggctttcaacaatggcccgacgtagcggaacctacggacaggcggcccgccccgggggaaggccacccgatggcgagtgcggggcacggcggataccgctcaggcacggcggcccgccgtcaggtgatgcccgcgccacaggcggacactgcacgcacaaaagcgtacagcacctccgccccaagccgaaccgattatccccgaaaaagtgtataaaatccatcaaagtatccccgaaaaaatgtaaaaaaccacaagggaggccgctatggacagggacatcatcgcaaggctggcagaatgagataggcgaattggacaggctcaccatcatagagcttgcggacgaggtcacacgggctttggcctcgaagtattctaacgtcatgcagggggtggacaacatcatgagaggacctatcatcgagacgaaggcgaagaaggcctggaacgccgggatgcagaaaggcatgcagcaggggattttctccgcgtataatgacctgataaagtcgggcctgctctccatgaaggacgcggccgcaaagctggggatgagcgaggcggacctttccaagcagttcgcgtccttttccctgaagtaatccccatctctcacccggcggacaccacacaggtaaagccctccccactggagagaaggccgcctgatggcgagtgcagggcacggcccgcacagccttgaaactgtgcccccagatggcttataatcccccgtatgccagcgaatttcatcaggcggccgttccgctacagcttttccaatgcgaccttcatgctcatcgccgtcaacgcggcggtcttcctgctgacgagcctctcgccccggctgaggacctggctctccatgaacgtcgtcatggtcgtccattaccgctgcttctggcagccggtgacctatatgttcacccatgcgggcgtgcggcacctcttcttcaacatgctggccctcttcttcttcggcctgccggtggagaagacggtcggcagcaaagaattcctcctgctctattttttctgcggcatcatggacgggctcatctcgctcgccttctactacctcgtgggcggatacggggtattcctattgggggcttccggggcggtgtactccctgctcctcgcctacgcggtcatctttccccggagccgtatattcgtcttcggcctcatacccctccccgctcccgtcatggtcgcactctacgccgccatcgaattcctgagccagttctcggcggacgggaccgcccacttcacccacctgaccggctttgccctcgcatggctctacctccgcgtccgcatgggccttaagcccgtcaaaatatggaaggacgcctggcggggcttctgaccgctttcacgggggaaggccggacggggagtcttaccaaaagtcccggattgtgctatactacccgtatggaacggctgacctacacgctcatgaaccgcgagactcccctctgcgacttcatcatcgaaggcgagggcgagctggaactgtgcaaaatcacgagggaacaccggaagctgcctttctggtgcgcggacatcgattcgtggaacgcgaacaggagcgcggccaagcaccgggagcacgtgaacagaatcctcgagatgtgcgggggcaagacaaagagcggcttcatcgcgctgacccactgcctctcgctgaccgacacgctctgggtgaagagcgaccgcgaggacgtgagctgggcgcaggtcaacctctacgagaataactttgacgaggttatttccaaattatctttcgacggcaacgggcttttcggcatccagatgtccacgacttcccccgagctgacgacggacggggcatacgacaagtgctggctgaacgaaaaggacggaatccacctgataaagaccgggagcgaggggggcaggaacacgggccttgagccttacggggaagtcctcgcgagccaggtcttcgagcggatctgcgattcggtcacgtacacgctcaggaagtacgatggcagggttgtctcggactgcaagctctttacctcgcaggaattcggataccgcccgattgcgctgttctacaaggataagctgaccctcccaaggctgattgaaatctaccgggaggcgggctgcgaggacgcgttccgccgcatggtcgtcgccgactgcatcacgctcaactgcgaccggcacttcggcaacttcggcttcctcgtcaacaacgagagctttgagcggggcctgctgaacccctgctttgacttcaacatggccttcgtccccttcgctgaggaaggattcgacttcggtaatcctgaactggactttgacggatacctttcgcagcgcggccccgtcatcggcagcgactacgttgcccccgcccgcgccatcctcacgccggaaatacggaagtgcgtcgaggaaatccgcgagatagcgctcaccgtcccctgcgaccagaagttcacggagaagcggctcgcgcagatgaacatgataaagaacgtccagtgcgagcgcattctgggcttcgatgcccgctgggagttttaaggaacaaaaggagggcctcagctctcttttctcatgtgaaccatttatattccggaggaatataaacgcatttttcggagccggacagctccgtgtcagcaggttgacgaatcagaacggaaggtacgctttatattatttgcgtagacgaacggaagacggagatggaaatagaaaacaaacaaggcttttgacgattacggattgcattcgtttttagagaaaagatttttaatcgcgaaggattcatacaatacactaattgtaaacggaaattcaaaaagtgcgtgaggggataattccgaattaatctattaatcagcacatccgctatactgcaattttacgtgtttgtcagatttcgatttcactggaacgaaagacatcacccgggcgcatgaaagagtcagcaaggctgtatatatgtctgggacaggcggcaaagaagagcaaatcttactgcaaaaagctttccgacaagcggggaaagtcctgtagcagggctgttttcatcttgtaactaggctagttacagtttgtaatcggtcttgttccgtttcgtaactgggctgggaaatatttctcggagggtattcgttgcagggaacacgccctgcaaacggtattaattatagcatgaatccgtatgaaaatcaaccctgcaacgtcgggcggtcattgaagttctagatactgttccgtttgggctggaacactgtacaacccgggcggactgtgctacaataggtttatggaagaaaaagacttcaagagcgaagaggaatacgtctcacaggccggcacgggcgcgctactcaatccccgcgtgtgagccgctacgccatgcggaccaaggacggaagggagcttgccaacgcgctcaacatcatcttcgtagaattgccaaaagccaaggggcttgaggacagccttgagacgaacaccgctcttgagaactgggcgatattcctgaaggatgctgacaatcccaagaaagcggatgtcatacggaaacttacggacaaggaggcagggcttatgaacgcacagaaatcactctcgtcaatcagcgcgaaccgcgacctgtggatagcgcagtaccatcaggagctccacgagcgggaccgcatatcgggtcttgaagctgcccacaataatggagtgagggacggaaagatacaatcggcaaagaatgccctctcgatgggcctttctccggcacaagtctccaaaatcacggggctttccgaggaggagataagaaagctccagtaaggaggccggacttatgaacgcacagaaatcactctcgtcaatcagtgcgagcgtattctgggattctatgcccgccgggagttttaaaaacaaaaagagagccgtagctctcttttctcatgtgaactatttatattccagaggaatataaaagcattttgcggagccgaaaggctccttgttagcaggttgacaagataaattaatcagtacgtccactatactacattcgcgcgtatttgtcaaattccatcttcaccatgacaaaaaattctcctggatgtgtgaggactgaactccgccaagctgctgaatctggaacaccatgtataatcttgttataataatgctatgaactatcgtcttggtcttgatttgggcacgaattccatcgggtgggcagtgtattcgctggacagcgggaatgagccgtgtgagcttgtcgatatgggggtccgcatattctcggacgggcgcgaccccaagacaaaggaaccccttgcggtggcacggagaactgcacgcggccagcgcaagctgatttaccgccggaagctccgcaggagggcgatgttccgcctcttgcagtcgcagggcctgttcccggcgagcaaggacgaggcgcggaagctgaagctgctgaacccctaccagctccgcatcaaggcacttgatgagagacttgagccgcccgagcttgcccgtgttttgttcaacctgtcggtcaggcggggattcaaaagcaaccgcaaggacggcactgacaaagatgagcctgctgtctcaaagtccggggaaaagctctcccaggccgatatgagcaatgagctttcgaagaccgtctcggcatccggctgcaggacgctcggggaattcttatggaagaaccaggacaagaaccatggaatccgctttgtcccggggaggatgccgtactatccgctcaggcagatgtacgttgacgaattcaacgcaatccgcgccgtgcaggagcccttctacaaaacgctggactgggatgcggtctttaaggcggttttcttccagcggccgctgaagccgcaggagcgtggcaaatgccagtacatggcggacaaggagcgcacgttcaaggccatgccctgcgcccagaggctccggatgcttcaggaaatccgcaacatggattaccaaaatgagcgcgggcagaaaattcctctctcggaggacgacgagaagacgcttatttccctgctggacacgaaggaaaaggttccgttcgacgctttcaggaaagccctgaaattatccccagcctgcacattcaacctggaatccgagagcaggacaagcctgaacggaaacgtgaccgccgtgaagctccgcagcaaaaatcgtttcggggctctgtgggatacgctgccgcttgaggagcaggatgccgtcgtggaaaagctcatcactgcggatgaggacagggaaatcctcgacatgctcgcaaaataccccctcagcgacgagcagaaggagtccgtcgtaaagcttcagctcccgaccggtacgacaatgctctgcaaggaagtctcggaacggctggttcacaagatggaggagctgggctgcaactatacgaccgccgtgcaggtcctcggctacaaatatgctgaccagaacgtggagaaatacgacctgcttccctattacgggaaggttctcgtcggctccacgatgggaggcaacccctcggagcctgaggacaagcctgagcgcaggtacggcaaaatcagcaacccgacggtccatgtcgcgctcaaccagacccgcacggtcgtcaacgccctcataaaggaatacgggaagccagcacaggttgccgtggagctctcgcgcgacctgaaggcaagccgagaggccaaggacgcgatggtcaggaagcagaacgagaacaagaagaggaacgaaatactgaacaagaacatccgcgagggctacggcatctcctatcccaaccgcaatgaccgcctgaagttccgcctgtgggaggagctcggggcctcaggtttgcccaggcggtgcctgtactgcggcaagacgatttccggggcagaactgtttacgaagaatatagaaatagagcacatcctgccctacagccggacgctgctggacgcggagtccaacctgaccgtagcgcacgcgagctgcaacgcattcaagaaggaacgctcgccatacgaggcctttggctcaagcccgtccggctacagttgggcaggaatccttgagcgggcgaaccagctcaagaaccccgccaagcgcgggaggttcgcaatcgatgccatggaaagctttgataaaaacagcggcttcatcgcccgccagctgacggacaacgcctacctttcaaagatggcactcaagtatctgcactgcgtgtgcgacaaagtgtggtcggtgaacgggggcatgaccaagctgctccgcgacaagtgggagatagactccatcctcaagcgcaggattgacgacaaggagattgcgcattttgagctgaagggagagcagattggcgagtacaagaagaaccgctacgaccaccgccatcacgcgctggacgcgtccgtaatcgcgctcatagacccttccctggtaaaggagatttcgacgctcaacgctcggtcgcagaaaaacaggatagaggttccccctatggccgtcccgcgcatggagctgcaggagaaggtgcggcacatcgtcgtgagcttcaagcccgaccacggggcagagggcaagctttccaaggagacgctcctggggaaaatcaagcgggaggaggtcgtagacatcgccaagcttgaggagaaggacattcccctcatcaagcatgaaaaagtccgcgcggacttcgagcgggaactggcaggaacaaaggacatcaagcttgtccgcaaggcactcaaggacatctacccgcaagtgaagctctaccgggagtattttgtcgcccggggtcccataacgagcctttccgagaagaacatcggtgacatcgtggatgccaagatccgttcccgcctgcaaagcttcgccaactcccacgagggcgggaagttcgaggatgtcattcaggcattcagcgaggagacggggataaagaaagtccgctgcctgaaccatgggcagaagcctattgccattaatggaaatgttcctcgttattatgaacccgaagactattttgccgcaataatctggacgattccttcaaagaaagctggggcgaagccaacgtacgaagcccagtatatccgcaggaatgaggttgacaggaatggtaagccgaaagtcgaagtaatcgaggcgtggaagaagacacatcatcccgcagcaaagtcgtcatcatttgtcttgcataaagaagactacttggaattcagcgaaaatggtgtttggtataaatgcaggatagcagaattttctgcaacgaataacaagctagttataatgcctatatatgctgcaacaaaggcaaaagaatactcaaattggcttgttgccactacggactccatgttagaaccttgttggaaaatgaaaaacgggaaaaatctcatttccgtcaacgtcctcttcggtgagaagcaggcccgtttcatcacggtgaacccgataggcagggttttcagaaaataagcttataccctgccccgcataccgataataaaagtatgctgagcagggttctggaggttcatgaggaaaaccgctatctgtctcttagccgtggctttgccgtcatccagcaggggcaggggcaggaggagctgggcagggtgccgattgacgacatcggggtgctcttgctttcggcccagggagtcagcgtctccaagaaccttctgaacgccatttccgagaaaggaggcgttacggtgctgtgcggaaagaactatgccccccagagtatggtcctgcccgtctacagccattacctgttcgcaagggtcatgaaaagccaagttgatgcctctgttcccttcaggaagcgggtctggcagcagattgtcacaaagaaaatcaggaaccaggctcgagccctacggctctgcggcaaggaagaagaagccgtcctcatcgacaagatagcgacgatggtgaagtccggcgacccggacaacagggaggcatacgccgccaagatgtactggaaggccctgttcggcaaggactttgcccgcgacaggaatctgccgggcatcaattcctttctgaactacggatacgcggtcatgcgggcttccatggcgcgggcggtatgtgccagcggcctgctcccggccctcggaattcaccatgacaattacctgaaccagttcgcgcttgcagacgacctctttgagctctaccgcccgatagtggattgcattgtctttgatatgtgcccgaaagacggggaggagctggggcacgggcagaaaacaaagcttacgaacgcgttatggataaagctgcatacttcgcagggggactccccggccttccagagcatgcagtatctgacggcttcctatgtccacgcattggaagatggaaaagcggccattgatttgcctgaatgggagggaaatgcggatggcgatgccggagctgaacaggtatgagcttatgtggatgctggttttgtttgatttgcccgtcgttgagaaaacagagcggaaagccgcgacggaattcaggaatttcctgctggacaacggattctccatggtgcagtactccatctacaccaagcttttctccggcaaggatgcctgtgagaagtattacaagctcatcggcaggaacttgccttccgaggggaaagtcgatatcataacgataacggacaagcagtatgagaacatcatcagttacacggccgcagagaaaacgcccaaaaaacggcaggaacagctccttttgttctgatttttgcccaaaaaataatacgtcctatgcacttcaatcccttgtctgggaaagaaatacatcggacgtattataactgattaattcatcctgtcaacctgccctgcggtcattggagcccggcccctgtttccgcaatgaaactcaggacgggggccattcatgctccagtgcgggatgttctcaatcggtcagagacttccccacgacggcaacgagttgtacgattgtaagggcgctcgtgaggccggcggtgtctttgtggagaagtccgtctgaaccatccggcgaacctgtgccggagaatgcaaggcggatttcgtcgcttgatttgttgaagcctgccggaatcaccgcctcataaatgacggacggctgcccgttcacgccggagtttttctttgtataaaaatcattgtagtcaaagctcgtgttgaactcagcccgtattacatacgctctgtcatccagctctgcatcaaaaataactccgcctttcg

SEQ ID NO: 831 - DNA, 12963 bp, synthetic construct
  misc_feature 1..12963: note = Synthetic
  source 1..12963: mol_type = other DNA
ttcagttttcctttttttcaggtgaagaaagagatgaagcagaaggagatgatgaaactggcgcattgtactggaaaactcgcacgatgattccagacggatttttttcaagcgcaatgtttccgttccagtcgtagaagaattctttttcagagacagtttttccttccgcattttttagaactgagcgaatcatatttcctgcaaaaaaagtccgagtctcctcagtcttcaggcttccgtctgcgccgagcgtttttattgaagatgcctttccgtttgaatacgaatagttcacgctctcgtaaaatccgcttgcgtcatagtttttttcctgcgccaaagtggaatccgcattgtagatgtactcgatgcgcttgaaaagttttccgtcagcatagaacgaggaataatctttaatccgtccgtcttccgtgtagatgtatttttccgtaaagttcaatgcgcctgaggcagaataagtcttgcattcagaaagccgggatttttcgttgtaggaatattccgcgcgccactcaatctcgccgcttcctgaataagaagtctcgcttgcaagaagccccttttcgccgtagccgtaggaataacgccacttcacgttttttgacgagtcaagcccggtgatttctgaaatctttccgtcatcaagaaattttctttcaacaatagttttttcagagccgtcgtcgccaaactgcctttcctttgaaatccgcccgtccgcaaattcaagaacgctgtatttttttaggctgtcaggagaagctcctcgatattctgtcacacaaaaaggcgaaccgctgaatttaggagaggtagccaatgtattttttgaaactgaaaccgtgttttgcggaaaaacttccgcgcctccaaaaataaaaaaagatgcaaacgttaaacaaaaaaaacgagatgatttcattttaatcctcattacgtgattttcttctattatataaacacaaaaaaacgatttcaagatagagaaacggttataaatctattaaaagttaaaaacaaaaaccaaactgaaaaacttttgcacaaacaaaactcacaatccgtttttcagtttgatttctgctggcgaaagttgattttttaataatttaaaaaatcgactttctgccaattttagcaaatttttactctgcaactggagcagaagcatcgctagattctggagcttcgctttgagcagagcttgtgttttcattttccacagagctagaatcttcttgcaaaggagcttctgatgttgtcgcactatctaactgttcttgaacagcaggtgtagcttcttgtacagaagaggcttcttttttagttcccacacaagagaacatcattgcggcaaatccaaccattgatacagcgataaaagtttttgttgttgttttcatattttcctccagaattattcaaaatcgattttttattttgcaagaactaaagaagcttcttcgctaaagttatttgcaaggcgaagaaccgcaaccttgtcgtccgcgctgtcagcaagtcctgcaacttcaacgttgtttataagaatagcagaatcctttacttcaacaggaagtgtttttcccgaaagagtctgaacagaactctttgtctcaaggttttcctttgtaagcttttcaggaactatatagtcagaaatattctggataattttttctgtatcggcaattgcgtcaattggagcaagaaccgtaacgccagaatcagaatcaacatcctttactttgtctgaagaatttttaaggatattggcgaatacttttattccatcaacttcctcaatcgactttgaaatttcctgagcagaaagaatcttgtcatctgcattttcagaaaccgcctcctgatttgagcttatcccggcattttcatttgcgctaatttctccaagaggcgataaagaaggagcaacttcctgggcgaaaacagccactgcaaccaatgccgatacacctagagttaaaattgtttttttcatagattttcccttgtcataaaacagatgtagtttctgaacggactttgacgctcaagcatctattccgcactcctgtctgcttttgacatcgacatagtagaatttctatttaaagtttttttattgaaaatgttaagattgtgcaaagattaaaaaaaatgattaaaatagccaagttgtcgagttttttataaattgtaaattcggttacgcttttgttcattttcctaaaaactcaaaattttggataaatagcctgaattttgagttttttataactttacaaaaaactcgattttcgaccttatattctttccaatattttcttgtaaagatccaagtccttgctgaaaaaaacgttgaaaatcactttttttacgcttgaatttttgttttcgtcaagccagtcttttacgttttttacagcgatttgggcggcgcgattctgcggaaatctgaagacgcctgtcgaaatgcagcagaacgcaacgctttcaagtccgttttttgcggcaaggttcaggcagcttgtgtagcacgaggcgagctggattttgtcgcgttcggttactgtagcgcggattatcgggccgaccgtgtgaagaacgtattttgaaggcaggttgaaagcctgagtgattttcgcgcttccagttttttcaggcgagccctgtttctgcataatctcgttgcatgcgaggcgaagctgaactcctgcgaaagtgtggatgcagttgtcgatgcacgcatggagcggagcaaagcagccgagcaaggcggaattcgctgcattcacgattgcatccgcgttcagagttgtaatgtcgccctgccacagaaaaagccttttgtccgccggaacatttttcagcgtggcgacatcggtgattccgcgctctttgttgcgttcggttaagtattcgtcctgaattttcaagaactcgttggaaacaggacgtggcgggcgcacgttcataagcgagcgaagcaagtccttttgagcggcttcgtcatcttgcggcggaagttcaatattcttgtattcagctggagagcccggctcgttcagaagatattttatgagccattcgcgtctttcagtctgtgtcatttttttcccatcctacaaaatatattccagctgccgctcttttgtcttgaaccccattttctcgtagaatttttccgccgaagtgtttccagcccaaacgttcagcgttacttcgtagcagccaagccgtttcgcctcgcttttgacgtgctcgaaaagtttttcgccgatgtgctggcctctagtgcttttgtcaacgcacaagtcgtcaataaaaagcgacttgaactgaaccatgttgttcgaaaacggctgctcccgaatctggcaaaaagcgtagcctacgcaagtgtcgttctcgtccgcggcaacataaatcggcttcgtctcgtcctttagcatttcttcaagctcggcgtccgtgtattttgtcgttcccggaataaaaatgtccggccggatttccgcgtgaatctgcagaacctgtccaagcaggtcgataatcttcggaatgtcattttcgttcgctcttcgtattgtcatttttcctccataatccataaaaagtcggtgagaaagtttcaaattctcttttttattttttcgggtggctttttgtttcgctccgctccgcaaaaatcgggctatccgtggttccggcttccgcctccattcctccgctatgcttcggaacggcttcgccgccactcctatccctgccacgaagtgcaggcgtgcgcgtgagcgcacacgtaaataaacgagttttgcgaagcaaaatctcgcggcataccgacaggtatgcaaatccctgccacatttctttaaaaaacaaaaaggaagccgcagctcccttttttcagtttttctgtacacattcctaagaatgtataagcattttgcggaatcttaaagattccttgttagcaggttgactagaaaaattaatcagcaataatattttataataaagaaatatgctttgtcaaatgtttactaaaataattgcctccatttaataagctgtgatataattttggctggagattttaatgaaatatcgtttagggcttgatttaggaacaaattcgattgactgggctgtttattcgcttgatgaaaatagcgagcctgaaaaacttgaagatctcggcgtaagaatcttttcagacgggagaaatccaaaatcaaaagaaccacttgctgttgaaagaagaactgcacgcgggcagcgaaggataatttatagaagaaaacttcgcagaagagatactttccggcttttacaaaaacaaagtcttcttcctcttaaaaaagatgaagcccaatcgttaaaatttatgaatccttatgagcttcgcataaaggctcttgatggaaaacttgagccgtttgagcttggacgtgtcttgttcaatctttctgtacgacgtggatttaaaagcaacagaaaagacgcttctcggaacgaaacaaaagaaaactcaaaatctgaaaaattgatacaggcagaaaaatgctcaaatctttcaaatgcaataaaaaaatctggctataggactcttggagaattcctttggaaaaccaaggaatctaatggcggaactcgctttgctccaaacagaatggactattatcctgtgcggcagctttatatagaagaatttaatttaataaggcaaaaacaagagccgttttatcctgatgttgactggagcggaatctacaataaaattttctttcagcgaccgctaaaaatccaagaacgtggaaattgccagtatatgccggaaaaagaaagaacgttcaaggcaatgccttgtgcgcagaaaatccgtatcttgcaggaggtcttcaatctttcttttattgcaaacggaaaacaaaaaaaacttcttcccgaatagcaggacgaaatcataaagcttctagattcaaataaaaaggtaacttttaaggaaattcgcaaaaaacttggtcttgatgaaaatatcactttcaaccttgaatcagaaacccgcgactttttgcagggaaacttgaccgctgtaaaactacgcagcaaaaaccgctttggcgaaatttgggattctttaagtcttaaagagcaggatgatattgttgagtgcctgataacagcacaggaagattctgacgttcagaaaatgcttgagaaatacgatttgacttctgagcaaaagaattttatcacaaaacctgatcttccaagcggcacaacaagtttctgccgtgaattctctgaaaacgttgtgaataaaatcgaagaaaatgcaaaaatatttgcggtttcagatgaacgcacggaacgctgccagattcacagtgtgattcaggagcttggctatagttatgcaaatcagtttgtggaaaaatgtgaggagcttccttattacggaaaaattctttccggttcaacgatgggtgcaaagtcaaatcctaaaaatgatgaggaacgatttggaaaaataagcaacccgactgtccatattgcacttaatcagacacgcgttgttgtgaactctcttataaaagaatacggaaagcctgcgcaagttgtaatagaggtaagccgggaactaaaagagagccgtgaagcaaaagaaaaaatgcagcagagaatcgcggcaaatcaaaaacagaacgagattctaaataagaaaataaaggacgcgaattctaatattcagtttccaaacagaactgaccgcttgaaatacaagctttgggaagaacttgaccaggaaaatgcgctgaacagaagatgtatttattgcggaaaacaaatttccggcgcagatattttcaatgacaacaccgttcagattgagcatattcttccgttcggacgcactttgtgggattctgaacacaacaagactgttgcccatacaaaatgcaacgcattcaaaggtgaaaaatctccttacgaggctttctttaataatccgaaaggctacaactggaatgaaattcttaaaagggctgctcatttgaaagacccgcagaaaagacggcttttctctgaaaacgcgatggaaacttttgagaaagaaagcagctttatttctcgccagcttactgacaacgcttatctttcaaaaatggctttgaaatatttgaagtgcgttgttgagaaagattcaaatgtctgggcagttagcggcggaatgacaaaacttttgcgcgacaaatggcaaatcgattcgattctgaaaagaaaaatcggagacaatgagattgcgcattttgagctgaaagacgagcagattggaacttacaaaaagaaccgctacgaccatcgccatcatgctcttgacgcaagcgtaatcgcgctaattgaccgctcaatggttcagcaaatttcacgtcttaatcagtttggaaagaaaaacaaaattgaagttccgcaaatgccggtttcaaggcttgaacttatcgaaaagacaaaaaatatcgtcgtgagttttaagcctgaccacggcgcacagggaaaactttcaaaagaaacgcttcttggaaaaataaaaagggcagagcaaatttcaatctcgaagataaaagaagatgatattgctttcataaaaaacgaaaaagtccacgctaagtttgaaaaaatgcttgcagatcttaaggatattaaaaaagtccaaaaggagctaaaagaactttatcctgttgtttggattttcaaggaatattatgtttgcaaggaaaatattcttggtttaaaagaaaaagattttgattctataatcgacaaaaaaattcaaaaagagcttcgagaatttgcagaatctcataaatctgaaaaaatagaagatgtaatgcagaagtttagcgagcagacaaaaatcaaaaaagtgcgctgcataaaccgtgttcaaactccgattgaaataaagaatacggacggcacaatgcgctatctttgcccggaagattattttgctgcggttgtctggcagattcctccgaaaaacaaggaggcgaaacctgtttacaaggctacttttgttcggcgcgaccaagttgatccagacggaaatccaaaaattgtggctaagcctcaccctgccgcaaagaaagtttgcgttctgcataagaatgattatcttgaatttgtggataatggaaactggtacaagtgcagaattgcgggattgaatgctgcaagtggacggtttgatattcgccctgtctatgctgttaccgattgcaaggattggattatatctacaaacgaggctgtccttgaatcttattggaagcctcaaaaaggccaaaattttatttctatcagtgtactttttggagaaaaatccgcccattcaataactgtaaatcctataggccgcgtgttcagaaaaaaataatatggagaactttgttcagtataccgataaacaaagtatgctgaatagaatactagagatttgtgaagaaaatcgctatgtttctctgaaccgtgggtttgtagttatccagcatggaactgaagttttagggcaagttccgctggatgatgtttctgttcttctgctttctgcgcagggaatcacgctcagcaaaaatattctcaatgctctttctgaacgtggctgtgttacggtcttatgcggaaagaattttattccgcagagcatggtcttgcctgtcgcaaatcactgtctttttacaaaaatcataaaaaatcagataaacgcttccgagccgctaaagaaaagggtttggcagcagattgtaatccgaaaaatagaaaatcaggcgaaggttctaaaattatacgaaaaagattattcttttgttgaaaagatttcaaaacttgtaaagtctggcgacagcgacaaccgggaagcttacgctgcaaaaatgtattggtctgccttgtttggaaaagagttccgacgcgaccgaaacgaagaaggaataaattcatttttaaactacgggtatgcggtaatgcgagccgcaatggcaagagcagtctgcgcttcgggacttattccagttttaggagtaaaccacagcaataatttgaatcagttttgccttgctgatgacttttttgaaatttaccgtccgttggtggattctattgtctataaaatgtgcttggaaggagaagaagaacttacaccgaaaaacaaaaagcgtctcacggattctttatggctaaaagtccgaactacagaaggctatgcaccggcttttcagagcatgcagtatatgacggcttcctatgttcatgcattggaagataaaaatcccgtcattgcacttccagtctgggaacaaggtgaaaaagatgaataatcttgaattaagcaggtacgaacttatgtggatgatggtcttgtttgatttgccggtagtcgaaaagaaagagcgcaaagccgcaacagattttagaaattttcttttggataatggattttctatggttcagtattcgatttatacaaagcttttttctggaaaagacgcatgcgaaaaatattacaagttgattgtaaacaacttgcctccagatggaaaagttgatattcttacaataacagacaggcagtattcaaatataattagttattcatctggaaataaaattgaaaaaaaagcgcccgaacagctcatgttattttgatttttcctcaaaaaaatacgtccaacgtattctatttctttatctagaaatgaattacattggacgcattataactgattaattttccaagtcaacctgcaacaaatcacattatctttttacttcagaatcaattataactgattaattttccaagtcaacctgcaaccaaaactcgaagtttgggctaataagtttatattataactgattaattttccaagtcaacctgcaaccctgctagcgattatagttcaagttgttttattataactgattaattttccaagtcaacctgcaactgagtatttctactcgctctgcaacactgaattataactgattaattttccaagtcaacctgcaactacccaatgccatacgcaacaataccgcaaattataactgattaattttccaagtcaacctgcaactgtctattgctccttataaagtcgctctaaattataactgattaattttccaagtcaacctgcaactacagacggaataacatggactagtagaacattataactgattaattttccaagtcaacctgcaactattgtaacaaaagagttttttcagcttatattataactgattaattttccaagtcaacctgcaacctatcaatatttatatatagtatttagttatcaatagaaaaattaagacttattcccaatgcatccgccagtcgtgtaataacatttatcgtaggatttgctttgccattttcaattctgcttatatcagcctgaatgattcctgtcattcttgaaagttcctgctgtgaaatattctttgattttctagcttttgcaatagccgaatagatttctttatcgttcaatttcacaacctgatttatttttatctatagatttttcggaaggtgcaatccctattttgatatttaaggattttacattcaaaggctttccgtcgtctgtagaaaatattaattcattcttaccagattcatctctgaaataaatttctgttttatcagcttctccagattcacagacagtcttgatattttctgcaaggttttcgcacactaaatcgtgatgatttttatctgtccagcgggattcattcgttccgttaatctcatcaactttttgcattgctgcatatctttcttgacatgatttccaacttaaatttttggcacaagtctgtatcaaaacttctgtcttataaccattttccttcatttttgaaagtgtttttattggaatctcagcagttctaaaagtaccttcaattacaatattataatgtttttctatcgctttattcaaaatcgcttctgtcatttttcctgcaaaagcagctgtatacttaggagaatctttaccataaagtttttgatattcactataatttggatgatattttctaaaatcatcaccgtttattatgactatatttttatagcatttttcatttgctaattcatttaaataactctttccagttccaggttgtccacccaaaacgaaaccttggggaaaaacttgtggagttggatttattttatatttttctaatgtatcagtccaaacaatatcaaaggcatctttgactatttcgtcaatttccatattttcctaccagagtatttaccatctttacagttccattaaaatcaaatacttcaggtgaattttcaagtaaagcggcatttaaattatacaatgcctgacgtgttggaacatcatttactttcaatgccgtaagtcgtgcaatagcaccatttaccatttccatcattgcatctttttccattaaagttgccatattagcctccgtttattttattatattttataacatatataactgcaaccgcccctaacaacactttcaagcgttgaaaattataactgattattttctaagtcaacctgcaacgaaaatgaacagaatagtttttgatttccatatcagaaacattagagatgcacgaaaaccttaaaacattttattctgccaaaaacggcacaaaataaaaaggtctcaaaaggatattttcttcgtttcctgaatctttctgcgatattaaatacgccttgtttatgttctgtgaaaattttctgcagaattcttttattgactcatgctttcctgttccggaggattttatttcaagcgcatctattttgcttccgtcggaaactagaaaatcaacttcgtaataatgagtgcttccgtttttttcccaagtgtgatagtaaagttcacgtcctgaggcggcaatcatctgcgcagcaaggttttcgtaaagatagccaagattcgccggaagtttgtctgaaagcagttttgcatagagtttattttcagttgctggacggtcaataaacatcaaagtgacaaaaagtcctgtgtcgcaaagataaagcttgtagctgtcaaaatcttttgtgtcggcaaggcttactctcggatttgttgaattgtagcaaggcagaacagtttttgagtcaatcagatcataaaacagctcctccgcctttgtgttgtttttctttccgattgccgttgtaatccggtattttcttgaatcctttgccagctgggccggaattgaatggtacatggccgatattcttccggacggatcgatttttttgaaatcctcctcgtaaagggagattatctgccgctttaccatgtcgatttccgaaaaattctttccattaatataggattcaaccgactgcggcattccgcccaccgccatgtaaagcctcaggtctctcatcagcttgcggtttgtcgcctgcccgattgcttttccagaatcgaaaatctgatgcagaagcccgaaatttccgcctgttgcatcgcagaattcctcgtaatccatcggaaaaacttgaattttcatttcttccgacggaatcagaatgtccttgacattttttcgtattgaaattagagagcctgtctcaagataactgtatcttccgtccgcaacaggatgttttatcgcctgccgcgccttcggaaaaagctgcacctcgtcaaaaattataagcgactcatgttcgtaaagagttgttcctgtttcagcctgaagacgcagaaaaaacacattcagatttcctatatcgttgaaacattcaataatatttgctgccgcctttgaaaaatctatcaggatatgcgatttgtattcatttttggcaaatgtttccgcaattgtcgattttccgacgcgccttgcgccttctagcatggcagcatattcagatgaataattctttttccattccaaaagttttttgtaggcttttctcttaaaatacatttaggctttccaatacaaatttgttatatcacaaaaatgtacttttcttcaagatttcattcagtagatttgtaactttcttcaaagttttataagccgaatttgtgcctttcttcaagaaaattgacattcattgatttttacgaggaaaccgccgcatccgcaatccgcattgtcttgtattccattccgtcgggtgatagtgcgtcgcgcagttttagcgtgccgctcactgtgattttttgtccgggctcaacgccggaaacttttgcgctttcaaattcgagtccctgcgcacagcacgcaagaacgtcagtgattatgcagtagtcgtgccgtccgtaaggagcatcgtcgtagaaagtttcaaaagttccagtcatccgaattgtttttccctcgtatttttcaggctccacaataatctggaaaataaaggcatatacaaagtcggcgttcatttttgaaaggtcaagctcaacatcggttttgggcgcggagatttcctcaaagctgcttccgtaatagtcgtaggttgatgatgagtaatcttgagccgagctgtcggaattttgcgatgaatcattttctgtgccgctgccgtagctgtagtaattatcataattgccggaaccagtggcttcatccggttcattctgctgccggctgtcagaggattcttcttccttgattttttcttctattatattggcaactttgttctgctttggaactccgcctgcgctgtaggattttttcgccgagcatgatgaggctgcaagcaaaatcaaaatcaaagcggcagtctgaatctttttcataaaaatctcccggcaacgcaatgaagtgcgaaaatcattatgtcgattattacgattgtggctccaaccggc

SEQ ID NO: 832 - DNA, 9061 bp, synthetic construct
  variation 4073: note = n is a, c, g, or t
  variation 4454: note = n is a, c, g, or t
  variation 3997..3998: note = n is a, c, g, or t
  variation 4034: note = n is a, c, g, or t
  source 1..9061: mol_type = other DNA
  variation 4118: note = n is a, c, g, or t
  variation 4448: note = n is a, c, g, or t
  variation 3992: note = n is a, c, g, or t
  variation 5766: note = n is a, c, g, or t
  variation 4485..4486: note = n is a, c, g, or t
  variation 4494: note = n is a, c, g, or t
  variation 4400: note = n is a, c, g, or t
  variation 5703: note = n is a, c, g, or t
  variation 4740: note = n is a, c, g, or t
  variation 4020: note = n is a, c, g, or t
  variation 4662: note = n is a, c, g, or t
  variation 4722: note = n is a, c, g, or t
  variation 4530: note = n is a, c, g, or t
  variation 5922: note = n is a, c, g, or t
  variation 4440: note = n is a, c, g, or t
  variation 4746: note = n is a, c, g, or t
  variation 5973: note = n is a, c, g, or t
  variation 5448: note = n is a, c, g, or t
  variation 4024..4025: note = n is a, c, g, or t
  variation 5707: note = n is a, c, g, or t
  variation 4656: note = n is a, c, g, or t
  variation 4043..4044: note = n is a, c, g, or t
  variation 4642: note = n is a, c, g, or t
  variation 5349: note = n is a, c, g, or t
  variation 4521: note = n is a, c, g, or t
  variation 4071: note = n is a, c, g, or t
  variation 4031: note = n is a, c, g, or t
  variation 4424: note = n is a, c, g, or t
  variation 4001: note = n is a, c, g, or t
  variation 4460: note = n is a, c, g, or t
  variation 4488: note = n is a, c, g, or t
  variation 4652: note = n is a, c, g, or t
  variation 4480..4481: note = n is a, c, g, or t
  variation 4427: note = n is a, c, g, or t
  variation 4013: note = n is a, c, g, or t
  variation 5979: note = n is a, c, g, or t
  variation 4389: note = n is a, c, g, or t
  variation 4509: note = n is a, c, g, or t
  variation 4421: note = n is a, c, g, or t
  variation 5838: note = n is a, c, g, or t
  variation 5844: note = n is a, c, g, or t
  variation 4434: note = n is a, c, g, or t
  variation 5693: note = n is a, c, g, or t
  variation 5453: note = n is a, c, g, or t
  variation 4144: note = n is a, c, g, or t
  variation 4457: note = n is a, c, g, or t
  variation 4475: note = n is a, c, g, or t
  variation 4527: note = n is a, c, g, or t
  variation 4052..4054: note = n is a, c, g, or t
  variation 4016: note = n is a, c, g, or t
  variation 4385: note = n is a, c, g, or t
  variation 4113: note = n is a, c, g, or t
  variation 4391: note = n is a, c, g, or t
  variation 4407: note = n is a, c, g, or t
  misc_feature 1..9061: note = Synthetic
  variation 5955: note = n is a, c, g, or t
  variation 4011: note = n is a, c, g, or t
  variation 4648: note = n is a, c, g, or t
  variation 5756: note = n is a, c, g, or t
  variation 4686: note = n is a, c, g, or t
  variation 4804: note = n is a, c, g, or t
  variation 4041: note = n is a, c, g, or t
  variation 5670: note = n is a, c, g, or t
  variation 4503: note = n is a, c, g, or t
  variation 4620: note = n is a, c, g, or t
  variation 5806: note = n is a, c, g, or t
ttctacatctttgcctgaaatcggcttgctgaaatagtagccctgaatgacatcgttcttgagctttttgagcatttcgtactgccatttgtactcaacgccctcgacaatcagtttcatgttgagcgaatgcaccaaattgatgatgtgcttgatgaacgattccttatcttcctgcaagcatgcgtctatgaggcttttgtccagcttgatcgtcttgacgggaatataggtgaggtaggcgagcgacgaatagcccgtgccgaagtcgtctagtgccagctgaatgccaatcgcgttgaaatccgccgcaagatcctgcgcgatttttttgttccccatgaagaggctttcggtaatttcaatctggatgaggtcgggcgagatgtcgtttttctccatcagcgttttcagatagttgatgtattctttgtccgccatctgtgccgccgaatagttgatcgataccttgcggagcggaaagccgttcttgcgccattcgaccatctgcttgatgacctgctctgttacgatgcgcccgatttttgccatgaggccgctctcttccgcaatgggaatgaactggctcggataaatcttgacggttttcaggcgcaccaacgcttcgtagccgtgaatctcgcccgttgtgatgtcaacctgcggctggtacaggacgtaaaaaccgtcgtcgctgttgcatgccttttccagaatcttggcgatttcctgctttgtctgccgttccttgagcatttctttggtaaagaaaacggtcttgttcttgccctgcaacttcgcctcgcacatcgcgctgtccacgttggaaaagcactcgtctaccgtgatgttgtctttgtccgtgtagttggcaatgccgatgtttgtctttataaaaatctgattttcggaaaattcaaacggctcggaaataatctgtttgatgaggtacagcaggctgtcatttttgcgcagacgcgtgtctttcagcacgatgacaaaatcgtcgtttgcgtaacgcgctatcatatagttgctcagccggtcgattgatttgagccgccgcgccatttcgcacaggatataatcgccgcaagcaaacgtatagaacgcattcatcattttcagctcgtcaacgtcaatcataatgatggcaaaatcgcactttgccttgagcaggttgcgcactgtcgcctgcaccacatgacggttcggcagtttggtgagcgcgtcgatgtcatgcgcacggcgcaattgccgcgcataatggaatatgagtatgagcagcagcgtcagcgaggcgacaatcgtgatgaacggaatgagcacgatatggaattgctgccagaatgacggcttttcgttcaccaaaatcgttcccttgggcagcaggcgtgtgttcagccggaaacgcttcatcagcccgttgtcaaaatagaagtgcgacggcaagtcttttttgagcggaaaatcgctcatgctctttccgtcaaggacatcgatgattacctgcgcggaatatcgccccgcttcgatgaaatcaaacagatagccacccaagaatcctttgcccaccgatccgaacagttgggtgtacacgggaatttttgtgtgcgtgtagaagaaatgcgccgtttcgggaatcgaatggtaaaatccttccttgtcaaagtacgcgctcaggcagatgaggattgtgtcatcggtgaactgtgcgagcttcttgcccagctccgtgcgcgtatagttggacgttctgagcgcgctgaatgtgaattcgggatagcggtttttgagcgcgaagaattgtcttccttcgttcctgccgtcttccgtggaatcgtcatacactgctgtaatattcgtcgccgttttgttcagttttgtcgccaattcgatggtctgcgaaaaatcagactgattcaccgaccccgtgatgaacggattctgcgccgcaagccgcaccttgtcggggtcgttcagcccaaaaaacaccatcggcgtttcggggaacaaatcgtcctggtgctccatggcaaaggcgagcgcgggggcatcacccaaaaggacggcatcgtattgctcctcatgctccagcttgaggtggtctattttgtatttgagcgtctcgtagaacagcgtggcgttctccggcgagtcgtaaatcttcgtgtccatgtactcagtgtcgcaaatgacgttgtttttctcaaacacgccgaagatacccgtcagctgggcgttgacggtatcgaaattctcactataggaagagataaaaaggacgcgccgctcggcatcggtgtccaacaggggcgtacggtgcgcatcccactcagaatgcacatatcccgcgcagagcatgatgatactgaaaataatacctgctgtcgcaagcccgatgagagaaaacctcagcaatcggggagtctttttttcttcattcataaaataccccccccacctatcaaggataccccgtttcaatacccgatatctattatatatacgaataatcgattgtgcaagtggaataaaatgcctgttcgcgcggtatggaaaacaaaaaggaagccgcggcttccttttttcatggtatgtaatacacattccgcagaatgtatatacattttgcggagtcgaaagactccttgttagcaggttgacaagaaaaatcaatcagtatcataatagtataatgaatttcagattttgtcaaatgcggcagtgttctatctgtcatatttttggaggaaacgatgaagtggcgactcggacttgatttgggaacaaattctatcggctggagcgtttatacgctgaatgcggacaatgtaccggaaacgctggaagatatgggtgtccgcattttttcggacggacggaatccaaagtcaaaagagccgcttgcactggaacgacggatggcgcgcggtcagcggcgcatcatacatcggcggaagcagcggcggcgcatggtctttaggttgctgcaaaaagaagggctgtttccgctgacgcgcgaagaagcgcagccgctgaaaatgatgaatccctacgaactcagaatcaaggcactggatgaaaaacttgagccgtttgaactggggcgtgtgctgttccacctttccgtgcgtcgcggttttaaaagcaaccgcaaggacggttctcgcgaagaaccagcggaaaatacaaggtcggaaaagctcacgcaaaaagacaagtgcgagcggctcaggaaagcagtcgcagattccgggtgcaggacgctcgctgaattcctttggaaacatcaggatgagcacaaaggaattcgcttcgttcctggaagaatggactactatccgctccggcagttgtatatcgacgaattcaatgcgatacgggaaaagcagcagtatttctatccgaatgtggactgggaagctatcgagcatgcgttgttcgaccagcgtccgctccgtccgcaggaacggggagcgtgtcagtatctgcccgataagaaacgcacattcaaggcgatgccctgcgcccagaaagtcaggatattgcaggacgtgtacaaccttgcgattatcaaagatggaaaatcctgtgaactgctcccggaatggcgcgaggaactgatacggcttctgaacgagaaagaaaaagtcacgttcaaggaaatgcgcaaaaaactatctcttgatcaatgcgttatgttcaatcttgaaaaaacgcgcgagtatctgaaaggaaacgcaaccgccgcaaaacttcgcaaggaaaaatgcttcggcacaaaatgggatagcatacctcttgaagagcaggatgcaatcgtagagacgcttatcaccgcagacgaggattctcaggtgaaagaagtcttgcgcgcatacagcttgagtgacgaacagcaagacgcaatcgcaagtatcgtcttgccttcgggaacgacaagcctttgcaaggaagcgtctgaacagatagccgcaaaaatcgaagcngaaanntgnacgtatacanangcnctgnaaannctcggnttncatgaantnnatcaggannnagaacagtcagacttgntnccttattacggaaaagtgcttgtcggttctactatgggcngcaangaaaatccccggaacgacgaagagcnatatggcaaaatcagcaatccgaccgtgcatatcgcgctgaatcagacgcgcaccgtcgtcaatgccttgatacggcagtacggaaagcccacgcagattgtcgtggaattgagccgggacttgaaggcaagccgcgaggcaaagagtgcaatgacgaaaaagcttgcgcagaatcaaaaagaaaacgaacggctgaacaaaaatattctggatgcgtatcctagtatttcctatccgaanaggnangaccggcgnaaattcnggctgtgggaaganctnggngaagatnccatgncgcggaantgcatntantgnggaaaggtcatcagnggctnncganntntttacnaaaaacatngaaatngagcatattctnccgttnggnaggacgctctgcgatgcggaaagcaacttgacgctcgcccatgcggcatgcaacgctttcaaaaaagagcgttcgccgtttgaggcgttnggaagcagccccgccggatacnattggnacgnaatnctttcncgtgcaaaccggctcaaaaatccngcgaaacgttctcgttttgcagaaaacgcgatggancagtttgaaaaggacagnggcttnatttcacgccagcttacggacaatgcgtatctttcaagaatggcattgagatacctgngtgcggtttgccgtgatatatgggcagtgagtggtggaatgacaaaactgctccgggacaaatggaacattgattcgatattgaaacgaaaaatcggcgatgaagaaattgtccattttgggttgaaagatgaagacatcggcaaatacaagaaaaacaggagcgaccatcgccaccatgcactggacgcgaccgttatcgcgcttatagaccgctcgctggtcaagaaaatttctgatttgaatcagattcatcagaaaaataggattgaagttccgccgatgccgattccacgggaagaacttgcgggaatgacgcggaacgttaccgttagcttcaagcccgaccacggcgcgcagggcaagttgtcaaaggaaacgttgctcggcaaaatcagacgggcagaacaagtccccatttcagaaatcaagacggaagaggatattgcgtgtattagaaatgaaactgtccgcatggcattcgaggcaaaatacaaggaatgcaaggacatcaaaaaagctcagaaagtgctaaaggacttgtanccgtcagtctggatgtacaaagattattttgtttcccgtgtgccggtcgtctcgctcggtgaaaagaatattgatgatgtcgtagatgaaaaaatccgntcaangctcaaagattttgctgaaaagcacaaaggcgaaaaatgggagacggtcatgcagttgttcagcgaaactgaatggcaaggaaagccaagcgcaggcggaaagccgggaaagaaatatcggattgtaaaagtgcgctgcataaaccgcgttcagacaccgatagaaatcacgagcggcagcgttccacggtacttgtgcccggaagattatcttgcngctattgtctgggaacttccctngaaaaaaganggancaagaccgacctatcaggcgacgttcatcaggagagatgaaataggcanggacggaaanccgaaaaatcctgcaaaaccgcatcctgccgcaaaaaaantgtgcattgtgtacaaaaatgactatcttganttctcngacaacggcaggtggtataaatgccgggtggcaggatatgcggcgacaagcaataaattcgacatccgcccgatttangccgtcaccgactgcaaggactggctgatttcnacaaacgatactatgacngaaccntgttggaaagggcaggcaggacagaattttatttctgtcaatgtattgttcgggaaaatgtatgcccgtcctattacggtgaatccaatcggaaaggtgttcagaaagaaatagataatcatctgcccggcatgccgataatgaaagtatgctgggaagagtccttgaagtgtgcgaggaaaacagatacgtctctctgagccgcggctttgtggtcgttcagaaaggaacggaagtcctgggaaaagtgccactggatgatgttgccgtcctgcttttgaccgcacagggaatttcgctcagcaagaatattctgaatgcgctttgcgagcgcggttgtatcacggttttgtgcggagcaaacttttcgccgcagagcatggtgcttcctgtttctggtcattgcttcctgacaaaaaacatcaaaagccagataaacgcaaccgaaccgttcaagaaaaaaatatggcagcagattgtcatcagaaaaatcaagaaccaggcgcttgtcctggaaatgctgggaaaagactatgtgcttgtctcaaaaatcgcatcgctcgtaaagtccggcgacacggacaaccgggaagcgtatgccgcaaaaatgtactggcagatactgtttgacaagcatttcagaagggacaggaatcagggaggaatcaattcgttcctgaactacgggtatgcagttatgcgggcttccatggcgcgggcaatctgttcggcaggactgcttccttcgttgggagtgaaccatgacaacaacttgaacccgttctgtcttgccgacgatttctttgaaatttatcgcccgattgttgactatgaagtctaccggcttcaggaggaaggagaaacagacctcacgcctcaaaacaagaagcgactgaccgccctgctttgggttaaagtccgcacaaaggaaggaaatacgcccgtatttcaaagtatgcagtatatggcatcttcttttgttcatgcaatggaagataaaactccgactatcgaactcccggtgtgggaaggaagtaatgatgaggagccttgagctgaacaggtacgagcttatgtggatgatggtattttttgacttgccggtcgtagaaaagaaagaacggaaggctgccgccgacttcagaaacttcttgctggataacggatttgacatggtacagtattcaatttacacgaaacttttttcagggaaggatgcctgcgaaaaatactacaagctcatcgtgggcaacttgccagtatcgggaaaagttgatattcttactgtaacagacaagcagtatggaaacatcattagttattcggcaggagaaaaaattgaaaaaaagcagcccgaacaacttacattattctgataaaattcagaaaaaaatacgtccgatgcatcgtatttttttacgcaggaacgatttgcatcggacgtgattataactgattaatttttcctgtcaacctgcaaccatcgcccgccacaacgtccgcaagcgcgggattataactgattaatttttcctgtcaacctgcaaccggtttgccgccacagagtggtcgtaatttattataactgattaatttttcctgtcaacctgcaaccagcaatttgatcggcctcattttcacattattataactgattaatttttcctgtcaacctgcaaccatgagtagtggagaatcaggcgatacaaaattataactgattaatttttcctgtcaacctgcaactcgcggtaaactttccaaggttctcgaaaaattataactgattaatttttcctgtcaacctgcaacttggacataggaggataaaatatgttcaaattataactgattaatttttcctgtcaacctgcaacttgtaacagtcgcgaatttacttattgcctattataactgattaatttttcctgtcaacctgcaacaaacgggcaaggtgcttttgcacgatgacaattataactgattaatttttcctgtcaacctgcaaccagcgaaaagaattcttgcaatcaagacaatcctcaagctgtgcaacaccatgcgcatcgaccccgcctcgttgtttccctggtcggacgatgacaagctgaccgcaaagagaaccgtctttgacttgatagagcgatatatgtaatttaatagaaaagaaagcgtttctgaaattgccttgtcggcaggctgttttcccgttccttgcttgtgctaaaaaaaggacttgtcgctccaaaaaaatggagttgcttataccaaaatctggaacgtgtgttccaaattttggagcgtgtgtatcaggttttggtataagcaagttttttggcacaatgcgataaggcatcggggcgtgttgtttatcagcagatgtttttgtgtcgtaggcaggattgtcgcgcgggcgcattgcccataaaaacaaagccccgcagtcttgcggggctttgttcgtgtgtgtcgcagccttgcggctgcttaccgagtttcgtacgcagtctttcaactgctaccgaaactcgaagttgtaaacgttcagggttttatttgctcaaacgcgcttccaaatcgtcgaggcacgccgtcaattctttcggcaggtgcgcgccgaacttcggatagtggttctcgcggatgtccttgcattccttgagccagccttccttgtcaacggcggtgattgcaggaatctgcgccttgtacacgtcggcaagtccctcaaggttgagcgcgccttctttcggcatatagccgatcggcgtgtcaacgaagttgtcctttccgtcgcagcggtcgaaaatccatgcgaggacgcggctgttgtcgccgtagcccggccacatgaatccgcccggcaagtccttgttttcgtcgtccttgcggaaccagttcacatagaagattttgggcagcttgtcctgatccgcctttgcgcccacgttgatccagtgtgcaaagtagtcgcccatgttgtagccgcagaacggcaggatcgcgaacgggtcgcggcggattttaccgacatcagcggcattgattgtagaagccgccgtgatttctgagccgacaatcg

SEQ ID NO: 833 - DNA, 8682 bp, synthetic construct
  source 1..8682: mol_type = other DNA
  misc_feature 1..8682: note = Synthetic
cttgtattcttcaattccctttgataccgtgcgcaccgcgtccacgtcgagccccgaatcggtttcgtcgaggattgcgaatttcggtttgagcatgagcatttgcagtatttcgctctttttgcgctcgccgcctgaaaaaccgacgttcaaatcgcgcgaagcgtattcttcgtccatgttcaaaagcttcatcgcctcctgcaagtctttttgaaattgaaaaagtttgacacgctcgcccgtgcgctgctggagcgcgcttctgataaatgtttcaagagaaatgcccggcacttcgagcgggctttgaaaggttaaaaacatgccggcttttgcgcgtgcatccgttttttcttcggttatatctttaccgtcgaaaaaaatctttccgtgcgttacggtgtacacgggattcccgataatcgtattgccgaatgtcgacttaccggctccgttaggccccatgaacacgtgggtttcaccctgattgatttttaaagagacgtcgtgcaaaaccgatttttcatcgacatctaccgaaatatgctgaacatcgagcagcggataactcataaaaactcctctaaagcaccggttgtcggtcagaacaaaagaataaccgatactaacttgaatatacccgtattattgtaaaaaagcaagcgcaaacgttatttcaggttttcgtaaaaggggatgtattcgtttttgatgatattgtcccacgcgtatgtactttgcacatggcgggacgcataggcggcacatgtttgtacaaaagtcggattgtcctgcatgaggcgcgccgatgtaagcataataccggccaaaacctgcggcgtgttttcgtcgtacaaaaagcccgttttgccgtcgataattttgcgcaagcctccgcacgcatgggcaacgggaagcgttccgtaaatctgcgcgataaaatcttcaagcccgcagggttcaaaaatactgggaagaacgataaagtcggacacggcgacgcacaaacgcgccgaacggcggtcgtacccgcgaagatacaggtatttgccggggaaatcgtgcgccaaactttcgtgttcgcgttccaattcgcggccgccctgccccgttacgataaagcgcgcgtcgtcgttttcccgcagcacgatgcgcgcagcctttgccaaaatatccgttcccttttggtgaacgatgcggccgtgatacgaaaagaaaacggcttcgcgatcatccggcacatcgaggaaaccgtagcgttttagagttaaagcgcttttacacgcattgtgtgaaaagccgccggcgcaagatgtgtccgccgcggccgtgccgccggccgaagcgttatccgcagcgaaacgtgtaagaaaatccgttcggcagcggtatttgcccgcaaaatcaccgcttgcaggatcgaaagcgtacggcagcatggatgcttccgttttttttggatcatattttgcgtacgaaatgccgtttgtaattcccgttatgcgcgtaccgcgtcgcgcaaaaacggccgaaagtccgcccgagttcggatcggacggatcgatcagttcctgcgcgtaccacggcgatacggtggttaacgccgcatagggttcggcgagtaaatacggttcgcagcgcccgtcgataaggctttgtgcaaaaaaacgttcgggtaaatcgagtaaggaagcggctttttgcgcgctttcaatttcatggcgataggcgtttcccgcattgtgtatggttaacacaaagcgcgcatccttatacgcgtgcgcatacgaagcgtcgtttcgcgcgataaaaggcacaagggctgcggccgcatcctgacagtgaatgatgccggggaccgacgaggtttttgcgccgtattcgagaacgcctttttgaaacagcacgtgcaaaaggtttgagtcggcatgcccccggccgggaacatgttcggcctgtatgcgctgttcgtcttcggtatatgtgtatacgcccagttttgccgtaaacagcgaatggacgataaacacaaggcgcacgcccttataatgagcggccgcataggctatcgtatatgtgcgtccttcggaggcgatatcagcgcgcaaatcgtgaataagcgcaaaatcttttaattcgttcagaaacgtgcagccgtaaaagggaataaaaacggttacgtcgtaatgttctttttgcaaaccttcggccaaagaagccgttacgttttttacgccgcccgcttccgccacaccggcatattcgcggctcacaagccaaatctttttttgcatcatcggcgcaaacttaccttatgaggaacgcaaatcgggacgcagcttttgcgcttcgccgaggtagacgtgaacgggttttgagccggaataagcggttacgagaacccgtaccgtgtgcgccaaagcgccctttacggcaggttcagcggcgcaaaacaagggaacgccggtgcataaaccgctttttctgagtacggaagccggattcgcacagtccaaatctccggtaagggtaaactgcacggacacgatatcgtcttcgcataaagcgtttttgtcaaaaatccgccccatcaaatcggcaaccgccttttgcatatcttccgccgtgttttcggtgcacaccgctccccgtataccgtacaaacgcttatcctgcataaaacgattgtaccctttcgtggcggcccgtgtcaacgcaaaaggcggtgtaacttcctctcgcatacaggctttacatacttgcttggcaaaacaaaaaggaagccgaagcttccttttttcatgtgatgatttttacattttattaaaatgtaaaaacattttgcggagtcaaagactccttgttagcaggttgatcaaaaaaattaatcagtagctatagcatacaacaaaattattttattgtcaaatatttttatcctacgctttctaccgaatttcggatttcttttgtcaattttacacttttgtgctataatgatcttcatgaatgataaaaatcaaagataccgcttgggcctcgatctgggtaccaattcaatcggctggtgtatatatttgttggacggcaataacaaacctgaaacgcttattgatatgggcgttcgtatattttccgacggccgtgatccgaaaacaaaggaaccgcttgccgtggaacgcagaactgcacgcggattgcggcggattttgcatcgacggaaacagcgcagaaagcagatgttttgcctgctgcaggagcaaggtttgatgccgaatgatgcggttcaggcgacagcgcttaaatcgttaaatccgtatgaactccgcgtaaaagcgctggatgcaaaactcgaaccgtatgaactcggccgtgttctgtttaatttatccgtccggcgcggatttaaaagcaacagaaaagaagcggtacaggaaaaagaaaaagacagtcaaaacgacacaaaatcacaaaatgaaaaatgtgaacaacttgcaaaagcgataaaagattccggtttcagaacgctcggagaatttttgtggaaacataaaaatacggaaacgcagcaaacagaaaacaatgcgggcgatatcggtatgcgctttgtgcccggccgttcgaattattatccgactcgccgaatgtatgccgaagaattcgacacaatccgcaaagtgcaagaaccctattacagcggcgtaaactgggatgccctccatgaaaaattgttttaccagcggccgctccgtgcgcaggaacgcggcaagtgtcggtatatgcccgacaaagagcgcacctttaaagcgatgccctgttcgcaaaagatccgcattctgcaagaagtatacaatatggattacattgacgcattaggaaaagcatttccgatcgggaatacccaaactgatatgctaatcgcgctgctcgataaaaaagaaaaacttacttttaaggcaatgaaaaaagagctggggatcgatgaatcctgtacgtttaatttggaaagaggcggacgggaatatttacagggaaatacaaccgccgtcaaactgcgcaataaaaacagattcggcgacttgtgggattctctttctttggcagagcaagacgcgatcgttgaaaaactgattacggcagacgaagatgcggaaatcatctccatgcttgcgcagtataatttaacggacgagcagaagaaaaatattgccgctaccgtcctgccgtcgggaacggcgatgctgtgcaaagaagtgacggagatgcttgtagaaaaaatggaacaaaacaaaataccgctgaccgttgccgttcagatgctcggttatagatacgccgatcaatcggttcacgaagaagacgaacttccctactacggcgccgttttgaccggttctacgatgggagcacatcctgagcaggatgaatcgaaacctgaattgaaatacggaaaaataagcaatccaaccgtacatgtggcgctgaatcaaacccgcaccgtcgtcaacacactgataaaagcctacggaaagccgcaacaaatagtcgtagagctttcacgcgatttgaaagcgagcagagaagcaaaagcccgaattcaacaaacaataactgcaaatcaaaaacgcaatgaacgggacaataaaaatattgcggagatcacaaaaattcggtatcccaacagagaagaccgattaaaataccgcttatgggaagaattgggcagcgattctttcagcagaaagtgcctgtattgcggaaggccgatcagcggatccgaaatttttacaaaggatattgaaatagaacatatccttccgttcggacgcacgctctttgacggcgaaacgaataaaacggtcgcgcatacggactgcaatagggataaaggcgaccgctcgccgtttgaagccttcggttcgagtccgaacgggtataattggcatgagatttgcgcaagagcgaattcgttaaaaaatcctgcaaagagagcgctgttcgcagaaaacgcgatggaaaaatttgaaaaagacaactcttttatacagcgtcagcttaccgacaatgcctacctctcacgttccgcgctgcggtatctgcgatgcatctgcaaagatgtgtggtcgatcaacggaggcatgacaaaactgctgcgcgacaagtggaatatagattcgattttaaaacggaaaatcgacgatcctgaaatagcgcatttcgaattaaaaaacgatcaaatcggacaatacaaaaagaaccgctacgaccatcgtcatcatgcccttgacgcttccgtcattgcattgatcgaccgcgcaatggtgcaggagatttcacagctaaacaaaattcggctaaaaaacagaatcgaagcgccgcaaatgcccgtactccgcagcgaattgatcgaaaaagtaaagcatatcgcggtcagtttcaaacccgatcacggccggcagggaaagctttcaaaagaaacgctcctcggcaaaataaaaaagattgaaaaagtcgatatcgattccatacaaacggacgacgatatagcatcgataaaggatgacgcaatccgtactcggtttgaaacaaaacatcgcgaactcggcaatatgacaaaagcaaaagccgcattaaaaaccgagtttccgaaattggacgtctttaaagcgtactatgtttcgcgtacgccgatagtgtcgcttacggagaaaaacatagacagtatcgtcgatgaaaaaataaaagaaaaactgaaaacatttattaaagaacatgccgatttgtcttttgcggaacagctgcaaaaattcagcgaaacggaatggatcggaaaaccgagcgcggcaggtaaacccggcaaaaaataccgcatcgaaaaggtgcgctgtataaactggggacaaacaccgattacgattacgagttccgccgtcccccgttacctgtgtccggaagattatttagcggccgtcgtttggcaaataccgtcaaagacgaaaaatgcggagcccgaatacaaagcgacatttctccgacgcgatgaatttgatgtcaacaataaaccgaaaaaattggaaaaaccgcacgacgcggcaaagtatatctgtatgctctataaagacgactacctcgagttcactgaaagcggggcaacacatctttgcagaatagcagggcttccggcatcgcaaaataacaagatcgacatccgcccgatatatgcggtttctgactgtaaagattggattatcgcgacaaatgaaaatatgcttgagccctgctggaaaccgcaaaaagaagaaaagcgtatttcggtaaatgtgctgttcggaaagcacaaagcgcgcagcgtaacggttaatccgataggacgagttttcagaaaataataattttctgcgtatctgccgataatatatacggcgtgatacacagagttttggaaatctatgaagaaaaccgttatcttgctctcagccgaggttttatagtcatcaagcatgaagatgaaacgctcggcgaaatatcgcttgacgatatcggcgtattgttgctttcggcacagagcgtcgtcttgtcaaaaaatattttaaatgcattgacggaacacggctgcattaccatactctgcggtaaaaactatgcgccccaaagcatggttttgcctatcgcttcacattatctgtttgcaaaaattataaaaaatcaaatagaagcttcggctccgctcaaaaaacgaatctggcaacaaattgttatacgaaaaataaaaaatcaagcacaagtattgcatatggatggaaaagaagaaaacgcaaagcttgtcgataaaatatcattgctcgtaaaatcgggcgatcccgacaaccgcgaagcttatgccgcaaaagtgtattggaaagctttattcggcaaagaatttattcgcgataaaaatgtggaaggcatcaattctctgctcaattacggatatgccgtaatgcgggcggccatggctcgcgcggtatgttctgcggggcttttaccctctctcggtattcaccacgacaataatttaaatcaattttgcctcgtcgacgatctctttgaaatatatcgcccgctcgtggattttaccgttgtcaaattacaaaaagaagataaaaaaatacttacaccggaaataaaaaagcggctctccgatgtattgtggataaaacttcatacgaccgaaggaaattcaccggcgtttcaaagtatgcaatatatggcaaatacctatgcacgtgcgctggaaagcaaaaaaacggatatcgaactgcccctatgggacggagatgaaaatgcgcgatttgattttgaataagtatgagcttatgtggatgatggtactgttcgacctgccggtcattgaaaaaaaagaacgaaaagatgctacggaattcagaaaatttttgctggataacggtttttcaatggttcaatattcgatttatacaaaattattttcgggaaaagatgcttgcgaaaaatattacaaaatgatacacgacaacttgccgacaaaaggaaaagttgatattatcacgataacggacagacagtatggcaatatcatcagttataatgcgggcgaaaaacggcaaaaaaagcagccggaacagtttcttttattctgattttcgtttaaaaataacacgtccggcacaaaccatttctttgtattgtaacggtttacgccggacgtattatactgattaatttttctggtcaacctgcaacctaccgcgactaattcgtataatgattctcattatactgattaatttttctggtcaacctgcaactcaaggtgtccgttctgactttacggctctattatactgattaatttttctggtcaacctgcaacatctaatgttattcatggtcagatggccgaattatactgattaatttttctggtcaacctgcaacgcgtggtcgtttggcgaaatacaggtaaagattatactgattaatttttctggtcaacctgcaacataagccatatcataatcattttggtctgaattatactgattaatttttctggtcaacctgcaactacgttttctgtcagccgtttgagcgatttattataactgattaatttttctggtcaacctgcaactagtgcatacgagttctcttacaggacgggattataactgattaatttttctggtcaacctgcaacagcgtttttttgcttcggcgcatagaaatcattataactgattaatttttctggtcaacctgcaacgcacaccttgcaacggtgctttcgaataaattataactgattaatttttctggtcaacctgcaacaggacttgcattatggattatcatgtattcattataactgattaatttttctggtcaacctgcaacagctatcgaaagagaaataagaacggcgattattataactgattaatttttctggtcaacctgcaactcaagcgctgaggaatatggctgaagactaattataactgattaatttttctggtcaacctgcaacaaggcacgcgctacggctgtgaaacgcttaattataactgattaatttttctggtcaacctgcaactaagtcaaggtcagggattccgcattataaagcattgaagatcctttcaaggcaatcttcgcgtt

SEQ ID NO: 834 - DNA, 8363 bp, synthetic construct
  source 1..8363: mol_type = other DNA
  misc_feature 1..8363: note = Synthetic
tcaagccagataaggcgttctatgttcggccttgaatacgcacttccttttttcctcggcgtaaaatgctgcgccctgtgagtcctgtcgatatgctttatcgtactgtcaatccacccaaagcacagcgcctcttcaaccgcatcgttataagaaagactttcctcgccagattctttcatggggaacacaaaccagacctccttcgccgtcctgtaatttttaaaaagccaggtgcgccacgcctccctcgacgaagtataaaaaaactcaccatcaaatcgtttttcttccataaaaccattatacatctttcctgaatttttaaaagccgaatacacagggcggcttttgctccactccgtttcacaaaaaacgcgctatccgcacttcgccgtcttgtgcggctcattcctccgcttcgctccggaactgcatacgcaggtgctcttatccctgccgcagacaggggttccataatcttttttcaaaaaatgtaatattcttttaaaggattgaaaccaatatcatctttggaagattagaaaattcagacaaatcttactttgcaattattatttttgcacaaaaaaaaaggaagccgtagcttccctttacatttactaaagttatttatattcacgcaaaaatatcaacgaatataaaaacattttgcgaagacttaatgtcttcttgttagcaggttgaccgcaaaatttaatcagttgcttatataatatctataaaaacaggatatgtcaaatcttttgcagatacttaatattagtggtataattttaaaataatttagattttcaaataaaacaaacggagaatgtatgaataatttaaactggcgtcttggacttgatttaggaacaaattctattggctggagcgttttttttctggacaaagataacgaagttttagaattagtagatttaggtgtaagaattttttcagacggcagggattcacagacaaaagaaccccttgcagtttccagaagaatcgctcgggggcagcgaaaatctatatacaggcgaaaattaagaagaaagcaaacattcagattattgcaaaagcaaggtttatttcctaaagataaaaatgattgcatggaattaaagggtttaaatccttatgaactgagaataaaggcactggatgaaaaactcactccttttgaacttggaagggttctattcaatctttctgtaaggagaggttttaaaagtaaccgcaaagatggaactcgtgaagaaatttcggagaaaaaaaacgattcagaaataaaatcacagtcagatatgcagactcatctggagaaagctattcaagaaagcggctacaggacacttggagaatatctgtataaaaatcagaaagaaaacaaaggcatcagatttgttcctggcagaatgacttattatccgacaagaaaaatgtacgagcaggaatttaatgaaattcgtaatgttcaggaaaaattttacaaagacatcgattgggatgaaatttacaaaagcatttttacacagcgttctttagaacctcagcaaaaaggttactgcatttatatgaaagaaaaagaaagaacatataaagcaatgccttgttctcaaaaactaaggatattacaagacatcagaaaccttgcctattacgatgaagacagaaaaaagatttccctgaacgataatcaggatgttattttatatgaattactgaattcaaaagaaaaagttacttttgaccagatgcgaaaagctttaaaacttaatgaaaaatgtactttcaatcttgaagaaaaccgtgattttttaaacggaaatgcgactgccgtaaaaatgcggagcaaaaatcgttttggacaactttgggatgaactgccgcttgaagaacaggataatataatagaaacgatttttgaagcagaagaggatattgcagtttatcaagttattgaaaaatataatcttacagaagaacaaaaagattttatagtaaaaaatacagttcttcccggcggaaccgcaatgctgtgtaaggaagtttcagaaaaacttgtaaagagaatggaagaaatttctgaccttgaatatgataaagccgtaagttctttaggatttacattttctgatcaaaaagttgaacagtgtgatgttctgccatactacggaaaaattcttgcaggctcaacaatgggagttgacccgactgcagacgaaaataatcctgaaaaacgctatggaaaaatcagtaatccgacagtacatgttgcactgaaccagacccgcgttatcgtaaataatctgattaaagtttacggaaaaccatctcaaattgcagttgaattaagccgtgatttaaaaaacagcgttgaaaaacgtgcagaaattgcaaggaagcaaaacgagcgtgcaaagcaaaatattattttaaatgaaaaaattacggaattgtattcatctgtaaataaaggaaaaactctttatccaaacagaaatgacaggttaaagtatagattgtgggaagaactgggacttggacacaaatgtatttattgtggtcagggaatcggcggtcatgaaatttttacaaaaaatattgaaattgaacacattcttccatatagcagaacattacttgatgcagaatcaaacttgacagttgcacatgcaagctgtaattcatataaagctgaacgatctccgtatgaagccttttgttccagtcctgatggatataactgggatgaaatagtattccgtgcaaatcagttaaaaaatccttcaaagaaaaataaattctctgcaaatgcaatggaggcatttaataaagattcaagttttattgcaaggcagctgacagacaatcaatatattgcaaaagctgcattgcgatatttaaaatgcctggttgaaaatccatctgatgtttgggcaactaatggtgcaatgacaaaatttcttcgtgataagtgggaacttgattccattctgtgcagaaaatttacggaaaaagaagttgctttccttggattaaagcctgaacaagtcggaaactataaaaagaacaggtttgaccacagacatcatgcaatagatgcagttgtaattgccttgacagacagaagcatggttcagaaactggctacaaaaaattctcataagggaaacagaattgaagtgccggaactgccattatacagggaagattttattgaaaaagtaaagaacattattgtaagctttaaaccggaacatggttcagaaggtaagctttcaaaagaaactttacttggaaaaattaaaattcacggaaaggagaaatttgtttgcagggaaaatctcatcggtcttaaagaaaaaaatcttgatgaaatagtagatgagaaaataaaatctgatgtaaaaaaatatgtagaaaaacacaaaagcgaaaaaattgaaaatgtattaactgaatattcaaaaaatacaggaataaaaaaagttcgctgcataaatcgtgttcaaactcccatcgaaattacatcaggaaaaattccaagataccttgcccctgaagattattttgctgctattatctgggaaattccgggagacaaaaagacttacaaagcacaatatattcgccgtaatgaagttactaaaaattcaaataatcagattgtcgtaaaaaaagaggttctcgacagcggaaaaccgcatcctgctgcaaaacaactttgcattgttcataaggatgattatctggaattttctgaaaatggaaacctattgaaatgccgtgtagcaggattttcagccacacgaaataaccttgatatacgcccgatttattctgtaacagattgtgctgactggatttatgctacaagtgaaaatatgcttgaatctggctggaaaattcaaaaggggcaaaattttgtttcagtaaataccctgtttggaacaaaaaatgcaaagccaattacagtgaatccaatcggcagagttttcagaaaaaaataaataatatgctgttttgagaaatatgccgataatataatcgtgctgaaccgagttttggaaattgccgaagaaaatcgatatatttctcttgaccgcggatttattgtaatagaatcaaaaggagaagaattaggaagaattcctttagatgatattgcagttcttcttttatctgcccaaagtattaccattacaaaaaacataataaatgctcttgcagaacgcggttgtatttctgtcttttgcgggaaaaaatatattccccagagtatagtaacacctgtcggacttcacacttttcattcaaaaatcttaaaattgcagattgcttcttcagaaccgtttaaaaagaaaatctggcagcaaatcgttatcagaaaaatagaacatcaggcaatggtattggacttatttggaaaaaattcagctcttgtgaaaaaaatatccagaatggtcaagtccggcgacacagataacagagaagcttatgccgcaagaatgtattggcttgaactgtttggagacagttttgtaagagataaaaacggtgacggaataaatgcagtattaaattacggatatgccgtaatgcgttctgcaatgattagggctatttgtgttcatggtttagagccgtctttgggaatatttcatgacaataatcaaaattctttttgtctttctgatgatttttttgaagtctacagacctattgtcgatgctgttgcctttaaactatttcaacagggagaaacagaattaactttggctgtaaagcaagttcttgcgaaagtattaaatgctattgttgatatccgtaatgaaaaaacgcagattgtacagagcatgaatattatggtttcgtcttatgtgaatgctttagaaaataaaaatgctttcataacattacctttgatggagaatgatgctaatggaactgccattattgaatcggtatgagcttatgtggatatttgttttttttgatttaccagttgttgaaaaaaaagaaagaaaagacgcagcaaaattcagaaatttacttttggataacggatttaacatggttcagtattctatttatacaagattgttttctgggaaagatgcatgcaaaaaatattaccgattgattcaaaacaatttgccaaaagaaggaaaagtcgatatattaacggtaacagatgcacaatattcaaatatcatcagctttaatgcaagaaaaaaacaagaaaaaaaatctcaagaacagctacttttattctgaattttctcaaaaaaaatacatccaatgcaacttatctctttacaacataagcagttacattggatgtattataactgattaaactttccggtcaacctgcaacaacatggctttaatacctttatataattatattataactgattaaactttccggtcaacctgcaactatttagtccgatgaatctattttttgccaattataactgattaaactttccggtcaacctgcaacaggtttaggcagtgcgttttcatcattattattataactgattaaactttccggtcaacctgcaactactaaagacgattctaatttaacattaaaattataactgattaaactttccggtcaacctgcaactttttggtggaattttggaattgacgctttattataactgattaaactttccggtcaacctgcaacttcctgttaaggcctgacgacacaaaacttattataactgattaaactttccggtcaacctgcaactattaaactcctgtatatttattatagggtattataactgattaaactttccggtcaacctgcaacaaacattattcacatataccgccgctgtttattataactgattaaactttccggtcaacctgcaactacgacagttgcaacttctaaaactgttgaattataactgattaaactttccggtcaacctgcaacacgaggcaatggaaaacaaccaggaaaaagattataactgattaaactttccggtcaacctgcaacattattgcgatactggcataaaacagaaaaattataactgattaaactttccggtcaacctgcaactgtgttatgcaatatttaaagaagatatttttttgtatgcttggaaacttcaagcactgtaaaatattctagccaacataataaaatcttgactataatatattattgtgatatattttacttgttaaaataattttctgtcgggaggtttttatgtgcagaacttcaatttatgatgcaagaaataatttttcaaatcttgtaaagcttgcagaaagcggcgaacctgtagaacttacccgctatgacaagcctgtggctgtaataatcagttacgaggaatatgaaaaaaaggatgcaaagccgtccttaatcgaaaaacttaatctgctaaaaaaagaatatgctgatgttttgagcgatgaaggaattcctctgccggaaaaagtatacccggatccaaaccgcgttatttttgaagaataaagatttttgaattttaaaattttacgggagcaaagcatgaacaaagtttatcttcttgatacgaatattgtatctgaattttcaaaagaatgtcctgaccagaatgttatttcgctttacgagcagagaaaagatttatgcgcaatttctgccgttacttggcaggaacttcaatacggactgtcaaaaatgcctgacggcaaacgaaaaacatatatagaaaactgtcttgcctgttacagagaatgtctgccagtcatcgcttatgatgattttgctgcggacatctgcggaaagcttttgggtgaaggctctgcacagggaaagccgcttccttactgcgacactcagattgcagcaaccgccattgcaaacggaatggttcttgttacgcgaaatgtttctgattttaaaactgcaagagaaaaatcattcctgaatgttgaaaactggttttcggcgtaggtaatacttgtgatttgcgttaaaaaaaactctgacagtataaattaactgccagagtcatttgctatttttcagcatcatgaataattatgtgtaaatcatcaagctgactttggtctacagcactcggacattcatccatcgggctcattgcaagattgttcttagggaatgcaataacttcgtggattgactcttcgtgcctcatcagcattacaaggcggtcaagtcctggtgcaattcctccgtgcggcggtgctccaaatttaaatgcctgaacaagaaatccgaatgccttttctgcacgctcacgactgtatcctacgatttcaaaaatgcgttcctgcaaaacagggtcgttgatacgcatagaaccagaagcaagttcgtaaccgttcaaaacaaggtcgtacaaatcgccttttacttcgccagggttgctttccagagtgtcccagtattttttctgaggaagggtgaacatgtggtgttctgtttcccagtgattttcttcttcgttccatgcaaaatacggaaagtcaataatccatgcaaagtggaattcgtcgtctggattataaaggttcaagtctttgccaagctgcttgcgcactgctccaagtgccgtacatgcagtctgccagtcttcatcgcttacaaacaaaagcaaatcgttcttttgggcaccaagtttttcgcaaatcactttttcctgacctgcatagaacttgctgattccgccttcaaactttccttctgcatcaactttcatccatgcaagaccttttgccttgtaagtttttgcaacagcttcgagagcttcaatgtttttgcggctgtatttgtctgcaacattttttacgacaagcgctttaagacccgaacgtttgtgacgctgaatttcacggccagaatttgcagctcctgctttgaatgcgttaaaatctgccaaatctgccataaatgcggcatcctgcattttcatgtcaaaacgcaaatctggtttgtcgcttccgtaaaagtcaaaagcatcttcccaggcaatgcggtcaaattttgcaggcaaatcgtaattcaacgtttttttgaaaatatgctgcatcattccttctgttgtagaaagaacttcttcacggtttgtaaaactcagttccatatcaatctgagtaaattctggctgacggtcaccgcgagcatcttcatcacgataacaacgcgcaatctggaaatatttgtcaaaaccagaaaccatcaaaagctgtttgtaaagctgaggcgactgcggaagtgaataaaattttccaggatgaacacggcttggaacaaggtaatcgcgtgctccttctggcgttga

SEQ ID NO: 835 - DNA, 7285 bp, synthetic construct
  source 1..7285: mol_type = other DNA
  misc_feature 1..7285: note = Synthetic
tcgcacgggcgttgttgcaaacgacggaaaaattgaaatcaaagccggtgataaaattgagctgactgttgacggctctgaatgctacggcgcggaaaaaggaaagcctggtcacatttctctcacatggcaggatcttccgaataaagtaaagaaaggaattaaaatcctgattgccgacggtcttattgagcttgatgttgaaagcgtaagcggaaacactgtgcttacaaccgcgcataattccggttcaatcggcagcaagaaaaatgtaaaccttatcggcgttcatgcaggactcccgataatggctcagcaggataaggatgatattgcattcggcgtatcgcagaacatcgactttgtagcggcgagctttgtttctttcccggaagaagtgcgcgaaatcagaagctatctcgattcactcggaagccatgcaagaatcatcgcaaaaattgagaatgaggaaggcgtgaacaacatcgacggcatcatcgacgctgccgacggcattatggttgcgcgaggcgacctcggcgttcagcttcctacagagcgcattccgctcgcacagaaatacatcatcggaaaatgccgcaaggcaggaaaaccggtaatcaccgccacacagatgctcgacagcatgattgtcaatccgcgcccgactcgcgcagaacttaccgatgttgcaaacgcaatttttgacggcaccgacgccacgatgctttccggcgaaaccgcaaacggtaaatatcctgttgaagctgtagagacaatggcgcgcatcgcccagactgtggaagacagcagcgaatactgcgaccgcatgtttgaagtggaccgcacatatacaaacggcagaaacattgagcacattgttgcccgcaacgcatatcttatggcgaccgacgtaaaggcaatcgccatcatcacgccgaccctttccggaaatacggcgcgcatggtcagccagttcagaccggcacagacaataatcgctgttactccgcgcgcacaggtgcagcgccagcttctgttgaactggggcgtctatccgatgcttaccgaggttgcggaagacagtgaccagatggttcagaatgcaatcaagcgtgctctcgacgctaaggcaatatcactgagcgaccgcatagtcatgctcgccggtattccgcttacgaatccgctccacgtgaacaccgtaaaagtgcttatggtcggaaacgttgttgcttccggcacaggcggattctcatcagcttcatgcaagcgcgcaagcggccgtattatccgcgcgacagacgcaaacagcacgcgcacttcactgagaacaaaagcaggactcatactcgtgtgcccgagaatcaccgaggaatttattccggtgctccgccttgtaaacggagttatcagcgaaggcggcagcgacttgaacgaccagctcctttcaatggtcaacccgaaccttgtgtggctccagaacgtgagcggtgcaatgacatcgcttgagccggaacttacagtgacaatcgacggcgagcgctctcttgcatttgaagggttagtctgattctccttgttttatttctccactgtatttataatagaatacatgaagatgatcctgatggggacgggaacaagccacggcatgccggttatcggctgttcgtgccgagcctgtacgtccccgcataaaaaggacaaacgtctgcgctgcagcgcgtacattgtccagaacggcaacagcgccagggactgcgacggtgtgccgtttcctactaccaacatacagatagatactggacccgaattccgcattcaggcgctcaaatatcatcttaaacggcttgatgcagttcttctaacgcacagccacgcagaccatcttcacggactcgatgaccttcgtattttcagccatacaaaatcacatatgcagaactgcaaggaaatgcccgaaagccaggtgtgctatcctgagacaaccggcgcaggacttcccgtttacgcaaatacaaacacaatagaagacgtgctgttcagattttcatacgtgttcagccctacgaaagaaggcggcggaaagccgaagctcgatctgcaggatgttacaaaatataccggcgggaatccgctcataataggaagcatgcagattattcctgttcccatgatgcacggcacgatgacgacaacaggatgggttttaagctgcaccggaaaagacggcaaaaaacattccattgcgtaccttaccgactgcaaccagataagcgatgaatcaatagaacggattacaaagtatgcgggaattatcgatcaccttgtgattgacggactaagaaaacggccgcacacaacacatttttcgtttgacgagtcgcttgcctgcgcagacaaaatcggcgcaaagcatacatggcttacacacatttgccacgacatgcgccacaccgaaatcaaaaagtacgtcagggatcatattgccgaacatccgcatcttgcagaaattgttaagcatggcggaagtgcggggcctgcctacgacggactcgttttaaaagccggcgaataacaacagatttacattccagtaaaaacaatacctgtacagacaatacaagacaaaaaaaatcccgtccaacaaaggaacgggatctcacagagaagttattagcgtgactcaggcaaagcctgaaccgtgttattttgcttctgcagctttcggtgcaccggcattagcgggggtaacattcacttttttagtgatatatccagcgcgcaggcagcgtgtgcatacgttcagtgtagcagttgttccgccgatttctgtttttactttgagaagattcggtttccaggtgcgtttctggtggttgaatgatttactgactttattgccgtactgaaggccttttccgcaaacatcacaagttcttgacatatctcttacctacctaacaatagattacgcgtgagttcaaacataatagcaaaacgacagggaagtgtcaacagaaccagttgcataaacaaacaaaaacatcccgttccctccctcaaaaaaaggtaaaaaaacaaagggtgtatcactcattggtacaccatgcgttttatactgattttcaacaggctgcaagactgcctgaggagaggacaatgagcgaaggagacaaacaaatgattaaagctatcagaagaatggcagactggtcgattgcatcggtgtatgcgctgctcattattgcggcggcagtcatgatgatgatgtgatgcggggggaaaaggtttaaaaacaaaaaggaagccgcagcttccttttttcatgtttcgttatttatactcccgtgaggaaatataaaagcattttgcgtacccggcgaaccggatacttgttagcaggttaaccagaaaaattaatcagtaattacaatataacttgtgaactgagatttgtcaaattcatacttatatattaagatagcattaataaaggagaaagatatgaaaaaatggcgtttaggtctcgatcttggtacgaactcgcaagggtggagcgtgctcgggcttgatgagaatggagagatcaatggtgaactcattgatatgggcgttcgtatcttttctgacggatgtgaaccgaaaactggtgaaccgcttgctgcggcaagacgaacagcacgaggaatccgtaaaaatctctaccgcaggaagcttcgtcggcatcagcttttcaatcagttacaagaagacggcctctttccaaaagaaaaagaagaagctgaaaaaataaaagttcttaacccttatgaactccgcgtagatgcgcttgaccggaagttgcaaccttacgaactagggcgggtgctcttcaatttgggtgtacgaagaggatttaaaagcaatcgtaaagattctcctgacgaatctcttgagcaaccagatgatgatacgcagaaaggaaataaaaattcaaatgatccgttaaaaatgaagcaaggtgaaaaatgtctccatcttgaagcagcaataaaagaatcaggctatagaacgcttggtgaattcctttggcaggaacgtgataaatttaaattacttgttgcaaaagaaaaatgttcaacatacagacaatattttgaaaaatgcgatgacgaaaaacgtgaagcagcaaatgccaatagtgttcgttttgtttcttcttgctcgacttattacccgctccgcagtttgtatgaagacgaattcaatgcaatccgtgctaagcaagagcagttttatccaactgttcattgggacaaaatacacgacatcatctttttccagcgaccacaaaaacctcaggaacgcggaaagtgccagtttatgaccgataaagaccgcactttcaaagcaatgccctgttcgcaaaaataccgcatcctccaggaagtgtataatctcaaatggtatgacgaacttaacaaaccgaatgatttaacaaaagaacagcaagacctcatcatcctgaaactcaacgaaacgaaagaattttcttttgaaaagatgagacgccttttaaaacttgatactaatactcgttttaatcttgaatcagaactgcgtgacaaactaaaaggaaacgagacggctgtcattctccgatacaagaataactttggtgaattatgggacaccctttcgcttgaagagcaagataacattgttgaaatacttatcaccgcaaatgaagacagtgaagtcgaacagatgctgcagaaatacacagcactctctgatgaacaaagaaaacatattgttcataagacattctcaagtggtactacaagtttgtgcaaagaaatcaccgaaaaactcgtttccattatgcaagagaagcatcttcaatttgataaagctctcattctgcttggatatgaccattttgatgattcagtgaaacattctgatttacttgagtattatggcaaggtacttgttggttctacaatgggcgcaaaacccgaagctccggaaaacaaaccggaacttaaatacggcaaaattgcaaatcctactgttcacattgcgcttaatcagcttcgtgttgttacaaacgcattgatcaaacggtacgggaaaccgtctcaaattgttgttgaagtttcgcgagatctcaaggcaagccgtgaggcaaaagatgaaatacgcattgcaaatgcaaaacgcgcaaaagaaaatcagattataaataaaaatattattgatatgaattctaaaattcaatatccgaatcgacttgaccgtcagaaattcagattgtggcaggaactaggtgcagaaggaatgccccgcagatgcatttactgcgggaaaaatatttcagcgtcagacttattttctaatgatattcagatagagcacattcttccttatagcagaactctgctcaattcagaatcgaaccttacccttgcacacacaaactgcaatgaggcgaaaggagaaaaaactccgtttgaagcatttggaacaacaacttccgggcaatatgcatggcaggaaatcatgaaacgtgtctctatgcttaaggataaaaagaagcagggccgctttgcacctgatgcaatggaaaaatttgaaaaagatgcttcattcatagatcgccagctcacagacaatgcatatctttcaaaaattgcacgccgttacttaacaagcatcactgaaaaaaattccgatgtttggacagtagctggcggcatgacaaaaataatgcgtgacaagtgggaaatcgacagcatcctgaaacggaagattgattctaaagaagctgcagagttaggattgaaagatgatgagattggtacattcaaaaaaaatcgttatgaccaccgccaccatgcacttgatgccgttgtgataggactgactgaccgctcaatggttcaggaaattgcaacaaaaaatgcacggcatcagaaaaacagaattgaaatgccggagatgccaataccgcacatggaactgtgcagtaaagtaaaaaacattataccaagtttcaaaccggatcatggtgtggaagggaagctatcaaaagagacattgctcggtcggattaaacaggaaactcttttaaaaataacagatttaagtgctgatgacatttcgaatataaaagtgccgtctgtaaagcaacagtttgaaaagactatagcagaacaacaaggtgacttgaaaaaaacaataaaaattctaaaagacacgtatccggaagtaaaagtattcagatttcaatttgttgcaagaacttcaattatcagtttgaaggacagaaagaacattactgatattgttgatgaatcgataaggaaagaacttgcagctttcgcagattcccatgctgatgaaaaatgggaacaaattgtacaagactttagcaagagaactggtatcaaaaaagtgagatgcgctacatttgttcagacaccaatcataattcaccaagactccaaaaacatccataagccgacccgctatcttaatcctgttgattattttgcagtgattatatggcagttaccaacttctaaagaaggcgaactacctagatacgtcggacagttcgtactgagaacagaagttgataaaaacaaaaatcctcttgaagatagacctcatcctgctgcaaagaaaatctgcgaattatataagaatgattatttagaattctcaaacgagaatatatggattaaagctagaatagcaggatatagtgcgactgcgaataaattagacattcgtccaatttattctacggaagatgctaaaacatggttggtcgcaactaacgaaaatatgattgaatctggttggaaagaaatatcaggtcattattttgtttctataaacgttctctttggtattatgtctgcacgaaaaattacagtcgatccgattggtaaggtgcattataaaaaataattgtatacagcatatacttttcttccgatagaagagtatatgctgcatcaaatagtggaagttcaacaagagaacagatacctcttactagaccgcggctttcttaaaatcaaagcggaaaatcaggaagttggctccgtaccacttgatgatattgccgtgcttatgatttcagcacaaggatgcagtttttccaaaaatattctttctgaattagcagaacggggtgcattaacaataatctgtggtaagaattatacaccaacagcaattatgtatcctgttacagggcaatatcaacaggatacataattgctgt

SEQ ID NO: 836 - DNA, 4890 bp, synthetic construct
  variation 4164..4177: note = n is a, c, g, or t
  misc_feature 1..4890: note = Synthetic
  source 1..4890: mol_type = other DNA
  variation 2478..2590: note = n is a, c, g, or t
  variation 1457..1458: note = n is a, c, g, or t
  variation 885..886: note = n is a, c, g, or t
  variation 3549..3569: note = n is a, c, g, or t
  variation 208..209: note = n is a, c, g, or t
  variation 684..745: note = n is a, c, g, or t
agttcttccaaagctcgacacattccagattgataaggaatgtcagcaggcaatgtacgatattgctacagaaatgggacttgaatctaaagccttgttcacagcactttatcaggcacttgttggaaaagaacagggaccacgtcttggaagtttcttccgaattatcggtaaagaaaaacttgaaaagattttgagcgtttactanntaagtaccaaattctaaaaaagcggtggttaatgttttcaaaaccaccgtttttttatcaaatgaattgcctgtaattattattcaatgttaaattaactatatgttacaaatgtatttaagttatcccgtatgtcttaatagcgaatgccccaaggctttggaatgtctgcataatactacttataatgaaataaaaggatcgcaagggattatttctgttgtaaatcctcaatattccagaatcacaatggaaacaatctattaagcatctgtttctttgtactatctcagtttcacgctttgaaactacagtttcacggtttaaaaaatatttacatactgatgacacaactgttccatacggttgaaacaagtgtttcgtgctgatgaaactggaataaaaaaaagaggaagccgtagcttcctctttgcattttagaactatttatattcacgcaaaaatatcaacgaannnnnnnnnnnnnnnnnnnnnnnnnnnnnnnnnnnnnnnnnnnnnnnnnnnnnnnnnnnnnnacgcaaggtttccttgttagcaggttgaccgcaaaaattaatcagtaatttaatattacaacgtgcatgagtactatgtcaaattaaattttaccttttcaaatgtggtgttataataaagtaattaactacaatttggnntgagctcatatgaaattagataaatggcgtttaggcttagacttgggaaccaattcaattggctggagcgttttttcattagatgatgataataatgttcaggaactcatagatttaggtgtaagaatcttttcagatggaagagatcctaaaacaaaagaacctctagcagtagaaagaagaactgcacgctctcaacgtaaattaatatatcgtagaaagcttagaagaaaacaggctttcagacttttacagacacagggattttttccaactacaaaagaagaatgcatgaaattaaaatctctgaatccatatgaacttcgtataaaagcattagacaataaacttgaaccttatgaacttggaagagctttattcaatcttgcagtacgtcgaggctttaaaagcaaccggaaagacggaagccgtgaagaaacttctgaaaagaaagcgacagatgaaatcaaatctcagtctgaaatgcagacccatctggaatctgcaataaaagaaagcggctgcaggacaataacagaatttcttgttaaaaaacaaaaagaaaatgganngcagaatgacttactatccaaccagaaagatgtatgaagatgaattcttccaaatgaaagcagaacaaataaaacattatccaaaccttgatggggatgcaatttataaatcaatcttttatcagcgaccattaaaggcacagtcacgcggatattgtatttatgaaactggtaaagaacgaacttttaaagcaatgccttgttcgcagaaacttagaatattgcaggatattagaaatctggcatattatgattctacaaaacagaaaaaagaattgaatgatgatcaggataagattttatatgaattattaaactcaaaagataaagtaacttttgaccagatgagaaaggctctaaaaatttccgaaagtaattcatttaatcttgaagaaaacagagacttccttataggaaatcctacagcggtaaaaatgcgtagcaaaaatcgttttggaaaactttgggatgaactctcactggaagaacaagactttattgttgaaacaattatcaccgctgatgaagatgaacaggtttacaaagtaattgaaaaatatgatttgacgcaggaacagaaggattttattgtaaaaaatacaattctacaaagtggtacatctatgctttgtgaagaagtttcagaaaaacttgttcaccgtatggaagaaatttcagatttaaaaatacatgaagcagtggatagccttggctataactttgctgatcagaacgtagataaatatgatttattaccatactatggaaaagttttgaccggttctacaatgggtgtaaatctttctgaaccagaatcaaagccagaaaaaagatatggaaaaatcagtaatccaacagttcacgttgccttgaatcagaccagagtagttgtaaatgctctgattaaagaatatggaaaacctgctcagattgcaattgaattaagtcgagaccttaaaaacagtgtaaaagaaaaagcagaaatttctagaaaacagaatcagcgtgcaaaagaaaatnnnnnnnnnnnnnnnnnnnnnnnnnnnnnnnnnnnnnnnnnnnnnnnnnnnnnnnnnnnnnnnnnnnnnnnnnnnnnnnnnnnnnnnnnnnnnnnnnnnnnnnnnnnnnnnnnttgtggaaaaggtataacagctgcagaactgtttactaaagaaatagaaattgaacatattttaccttttagccgaactcttcttgatgcagaatcaaatctaactgtagcacattcctcatgcaatgcatttaaggcagaacattcaccttacgaagcttttggttcaaatccaaaaggatataactggactgaaattgtagcacgtgcaaatcagctaaaaaatacatctaagaaaaacaagttttctccaacagcaatggatagctttgaaaaagattcaagttttattacccgccagcttactgataatcagtatattgcaaaagcagctttaagatatcttaaatgtcttgtagaaaatccatctgatgtatgggcaacaaacggaagcatgacaaaaatcctgcgagataaatgggaaatggattctattctctgtcgtaaatttacagaaaaagaagttgctgcattaggattaaaacctgaacaaattggaaactataagaaaaacagatacgaccatagacatcatgctgtagatgcagttgtaattggtcttacagacagaagccttgtacaaaagcttgcaacaaagaattctcataaaacaaacagaattgaaataccagaattaccagttttacgtgcagatttaattgataaagtaaaaaatatagttgtaagttttaaaccagatcacggagcagaaggaaaattatctaaagaaacattattaggtaaaataaaactacatggtaaagaagtatatgtctgccgggaaaatctaatttctctttcagaaaaaaatcttgatgatattgtcgatgaaaaaatcaaacatcaagtaaaagattatgttgcaaaacataaaggagaaaaaatcgatgctgttcttacagctttttcagatgaaacaggtataaagaaagtgcgctgtataaatcgagtacaaactnnnnnnnnnnnnnnnnnnnnnatacaaagcacagtacatcagacgaaatgaggttgaaaaagataagaaaggatataatgttgtaaaaacttctgttcttgaaaaaggaaaacctcatccagctgctaagctgatctgtatgcttcataaagatgactatttggaatttacagatgagggaaaactgtatttgtgtagaattgcagggtattcagcaacaaatcaatgtattgatgtaaaacctatttatgctgtaaaagattgttttgattggataaattccacaaatgaagcgatgttaaccggatattggaaagcttctacagggcataactttgttgccacaaatattttattttcaaaacttcaagcccatataataacagtttccccaattggaaaagtctacaaaaaatagaactttcttctgtaatcataaaattactcattcatgccgataaaatagtgtgctgaatagagtattagagattgcagaagaaaatcgctatatttctctaaagcgtggctttatagtcgtccagcagggtgaacaggaattaggttctgtaccgctggacgatatagctgttttattactttcagcacagggcgttannnnnnnnnnnnnnaatgttttaaatgctcttgcagacaaaggttgtataacaattttttgtggggcaaattacattcctttgagtatggttttgccgattgccactcatacatattttacaaaaatcataaaaatgcagattaacgcatctgaaccattaaaaaaaaggatatggcaacaaattgttattcagaaaattaagaatcagtcattaagtcttaaatattgtaataaacaagataatatagaacttattgaaaaaatctcaaaaatggtaaaatctggggattccgataatcgtgaagcttatgcagctaaaatctattggaagtcattatttggagatagttttgttcgagataaaaatggagatggaatcaatgcttttttaaattatggttatgcaattatgagggctggtgtggcgagagccatttgttctcatggtcttattccatcacttggtattcatcatgataataatttgaaccaattctgtcttgctgatgatttatttgaaatttacagacctattgttgatacagttgtttataaattaatagaaaacggtgaaaaagagttaaaaccggaaaataagaaagttttagcaagtctattgaaagttaaggttcgtacttctgagggagaaacctctgcagttcagagtatgcaatatgtagcatcttcttttgttaatgcattagaagctggaaaaccagacattga

SEQ ID NO: 837 - DNA, 3277 bp, synthetic construct
  misc_feature 1..3277: note = Synthetic
  source 1..3277: mol_type = other DNA
aacttccttctcgcatacaggctttacatacttgcttggcaaaacaaaaaggaagccgaagcttccttttttcatgtgatgatttttacattttattaaaatgtaaaaacattttgcggagtcaaagactccttgttagcaggttgatcaaaaaaattaatcagtgaccgtagtgtataacaaaattattttattgtcaaatatttttttcggacatattttttttcatacagtttatactttcgtgttataatagttcttatgagcgataaaaatcaaaagtaccgcttgggactcgatctgggtaccaattcaatcggctggtgtatatattcattggatggtagcaataaacctgaaacgcttatcgatatgggcgttcgcatattttctgacgggcgcgatccgaaaacaaaggagccgcttgccgtggaacgcagaaccgcgcgcggattgcggcggattttgcatcgaagaaaactgcgcagaaagcagatgtttcgcctgctgcaggagcagggtttgatgccgaatgatgtctctgaagcggtagcgcttaaatcgttaaatccgtatgaactccgcgtaaaagcgctggatgcaaaactcgaaccgtatgaactcggccgtgttctgtttaatttatccgtccggcgcggatttaaaagcaacagaaaagaagcggtacaggaaaaagaaaaagacagtcaaaacgatgcaaaatcacaaaatgaaaaatgcgaacaccttgcaaaagcgataaaagattcgggctgcagaacgctcggagaatttttgtggaagcataaaaatacggaaacgcctcaaatggaaaacaatgcgcgcgatatcggtatgcgtttcagatccggccgttcgaattattatccgactcgtcaaatgtatgtcgaagaattcgacgcgatccgcaaagcgcaggaaccctattacagcggcgtaaattgggatgcgcttcatgaaaaattgttttatcagaggccgctccgtgcgcaggaacggggcaagtgccggtatatgcccgacaaagagcgcacctttaaagcgatgccctgctcgcaaaagatccgcattttgcaagaagtatacaatatggattatatcgacgaatatgggaaaacgattccgctcgaagaagctcaaacggacagcttgatttcgctgctcgacaaaagagaaaagctttcgtttaaggcaatgaaaaaagagctgggacttgatgaatcctgtacgtttaatttggaaagaggcggacgggaatatttacaagggaatgtgaccgccgttaaattgcgcaacaaaaacagatttggcgaattgtgggattctctttctttggcagagcaagacgcgatcgttgaaaaactgattactgcagacgaagatgcggaaatcatctctatgcttgcacagtataatttaacggacgaacaaaagaaaaagatcgtcgcaaccgtactgccgtcgggaacggcgatgctgtgcaaagaagtgacggaacagcttgtagaaaaaatggaacaaaacaaaatgccgctgaccgtcgccgttcagatgctcggttatacatacgccgatcaatcggttcacgaagaagatacgcttccctactacggtgcaattttaaccggttccactatgggagcgcatccggagacggatgaatcggaacctgaattgcaatacggaaaaataagcaatccgaccgtacacgtggcgctgaatcaaacccgtaccgtcgtcaacacgctgataaaagcgtacggcaagccgcagcaaatagttgtagagctttcgcgcgatttgaaagcgagcagagaagcaaaagcccgaattcaacaaacaataactgcaaaccaaaagcgcaatgagcgggacaataaaaatattacggatatcacaaagattccgtatccgaacagagaagaccgattaaaataccgcttgtgggaagaattgggcagcgcctctttcagcagaaagtgtttatattgtggaaaacccatcagcggatccgaaatttttacaaaggatattgaaatagaacatatccttccgttcggacgcacgctctttgacggagaaacgaataaaacggtcgcgcatacgaactgcaatagggataaaggaaacctctcgccgtttgaagccttcggttcgagtccgaacgggtataattggcatgagatttgcgcaagagcaaattcgttaaaaaatcctgcaaagagagcgctgttcgcagaaaacgcgatggaaaaatttgaaaaagacagctcttttatacagcgtcagctcaccgacaatgcatatctttcgcgttccgcgctgcggtatctgcgatgcatctgcaaagatgtgtggtcggtcaacggaagtatgacaaaactgctgcgcgacaagtggaatatagattcgattttaaaacggaagatcgacgatcctgaaatagcgcatttcgaactgaaaaacgatcaaatcggacaatacaaaaaaaatcgctacgaccatcgtcatcatgccctcgacgcttccgtcattgcattgatcgaccgcgcaatggtgcaggagatttcacagctaaacaaaagagcgaaatgcaaggggattttaccccctcctcgaaactgaatggagaattacccgattctcttatctatccaaaatatctacctttgtaagagatagagaggggaggcatagaatatccccgacggatgaatgaattttatagtctatgaataattggtacgagtgttcggtacgatatgaaaagctagcagatacggggctttctaagaggtctgccgagagctatctagtagatgcaatgtctgtaacagaggcagaagcacgcctcgttgaggaaataacccctttctcctctacgggagaaattgtaattagcaccattaaacgtgccaaaatagcagagctatttttgaacgataacgacgaggacgataaatattatcgctgtaaagtgctttttatcgtgcttgatgagaaaaacggagtggagaagaaaacgcccgtgacgatgattgtgaaggcgagttcgcttgctaatgccgtggctgtgatagagcgagagatgtcgcgtacaactcacgattactccatcgccgctgtggtagagactaatatcatggacgtgtttacactccgaatttaagcctcgctcctttatcctatcccttaatggcaacaattcaagaacggctcgatcagattcgtccacagatccctagcaatgcaactc

SEQ ID NO: 838 - DNA, 9719 bp, synthetic construct
  source 1..9719: mol_type = other DNA
  misc_feature 1..9719: note = Synthetic
tcccaccgcaccgtggtcatgaatcaatatcgccgccatcaccggctgtgtcaatcgcacgagaacgcgttctccccgaagcctgcaccgccctccgcgatgcgatgggcgcacgccagccactcagaggcactgtctcacctgaccaaacgcgcccgggtggattcgaaccaccgacctgcggtttagaagaccgctgctctatccaactgagctacgggcgccgaaagcagggcgcagcggcgcggcggttgcttcggcgccggcgccgcgctgcgggggggccacgggacgaccgattctagccgctcacgcccggcggttaccactcgaccttctgccgccggccggtgcgggcgcttttcaccgccgcgagcaccatcgcgaggctgcggatgttgtccgtgcagtgcgtctcgggggtgcggccttcgcggacgcagcgggcgaaatcgagcatgtagccttcatgaacgcccggggcggtttcatgacgcgggatcgcgacatcctcgaggtcgcgcatgaacgccacctgctgcggatcacgcagccgctgcgcggccatgacatcgctaccgttccactccgccgtgccctcgctgccgattacacgccagtggcagccccacgtggtgttgatgccctcggcacaccacgagccgcggtaggtgtagacaatgtcgtggtccatctcgaacagggcgaaggcgctggcatcgccttcgaaccacgatcgcggcgggttgtagctgatgcactgcacgcggtgcgcatcggccccggtcagccgccgcgccgcatcgaagtggtgaatcgccatatccttgagcagcacatcggccatccgatcgcggaacccgccgaagtgcgccccgatgaagaagtcgcagtggacttcctcgatgcggccgatcgccccgccctggcagaacgcggcgaagtcgcggatggccgggacgttgcgctgcgtctgcgtgatggcgtagtaacggccggcctgctccgcggcctcgaccatccgccgcgcgcgggccatcgaatcgctcatgggcttttcaccgagcacgtgacagccggcgcgcagcgccgggatcaccaccttgtgatgcgcttcggggacggtaacgtcgaagaccacgtccggcttcgtcgccgcaagcgcctttttcagcgtgtcgaagatgacatcgggagcgaaaccatggtgctcggcggtccgctcggcggcctcccggttgatatcgacgagcccgacaatctggtattcatcgagctgacaggcgagcttcgcccatcgctgggccatgccgccgcagccgacctgaacggtgcgcaggggttctgacacgggtttcctttcagtacaagagcaggtccagggcgaacggatggcggagctgtgctgctgaagatcgaaagcgtgggcgccgtgcctgccaccatggcggcatggccatccaccacccggcctgtcttcagcttgcgcgcagttccgccccgacattttcacgcagggcgtcgaccaccgcctcgacctgcgggtcgacctcctcatgccgcagcgtgcggccggggtcgcggaaggtcatgcggaagctgacactctttcgtcctttctcgatcggcttgccgcgataggtcgtcagaaagtcgatcgcggccagcaggggcgggtcggtctcgcggacggtccgctcgatgctcgcccaggccaccggctcatccacgatcaccgacaggtcgcgctcgatgccggggtagcgagccagcggctgcacgaccggctcgggcggataggcttcgatgatggggggcaggtcgagctcggcaagcaccaccggcgtctggaggtcgaaccgcttctgcaccgccggatcaagcagcccgaaccggccaagcacgcggtcgccgctgcgaacttcggccgcggcggagaagctgtgcagctcgatcggctcgcacgccgccgcaggccagttggtcagcgtggcgatggcctcctcgatggtgccgcgaacctcgcgcagggcgcgctggcggtccggggcatcgcagagcatgccaagcttgtgccattcgtgaatcgtgccctcgcggcgggcccagacgctggcggcttcgtacagcctcaggtcctcgttgcccgcatcctggttgcccttgcggcaggcaagcaggctcggcagcaggctcggtctcagcatgggctcggccttgcggcgttcatcatcgagcacgaccgcctcgtgcccggcggggacgaacggttcaccctgggtcatcggcacgaagctgagggtgatcgtctcgaagtagccatgggccgagagcacctgcccgagcctgcggcgggcctggaccgacgcctgcggcggccgggcgatgatctcgattttctcacgcaccggcacccggtcgagcccgtgaaggcgggccacttcttcgatcaagtccacctcacgctgtaagtccagccgatgcgtggggatgcggcagacgatgcgatcgtcctcatccacgccgtcgccctcccgcgccggatcaagcccaagccggccaagggcatcgacaagctgctcgacggtaaagtcgatgcccataagttgccggcaccgcgccggccgcagcacaagcgaccgcgggatggggtcctcacagccggcccggatgacgcccgcggcagggctgccgccggcgagctcgatgatcagcgccgccgcgcggcgggaagcgcggtctacgcccgccacatcgaccccgcgctcgaagcggtagctcgagtccgagctgagcttcagtgcccggctcgtccgacgcaccgacaacggatcgaacgccgccgactcgagcagcacatccgtagtttcgtcccccacctccgtctcctgcccgcccatgacccccgcgatggccacgggccgggccgcatcggcgatcacgagcatgggttcatcgagggtatgccgcgagccatcgatggccgtgatcggctcgccgcgcttcgcccggcgaaccacgatgcgcccctcatcgagccgggccatgtcgaacgcgtgcaatggctggcccgtttccagcagcacgaagttggtcacgtccaccacgttgttgacactgcgaagccccgccgcctcgagccggctgaccagccaatccgggctcgggcccaccttcacgccccggatcacacgggcggtgtagagcgggcagagatcggtcgcctcgttgtccacccgggtcacgctcgcggcctcgggcgcagcatgggtgccggcgggctcatcagcgatggcgggggatgtgaagccgagattgagccccgcggcaagctcgcgtgcgaggccgagatggcacagacagtcgggccggttgctcgtgacctcgacatccatccgccaatcccgcccatcgcgggtctcgaccgcctcccactgctcggtgggaaagcccatcgcggtgagtgcctgggccgcttgttcaagctcgaccggccgatcgagatagctgcatatccagttcaggctcgcattcataggggcatgagggtagcagggggcggggtcgtggcaaacgggggcctcgccgatggcactcccaccttgcgagtcgcacggcttcgacgccgcagcccgcatgccagccaggcccggaggacgggcccctcccgtagagtcctccgcaccgttggtgggggcaacaacgactgtcgtagcgaacattgtccacaccgctttgcgcagtaccgcaccagctacacaccggccccgccctattcggaatacaactcgttttgattcaaccacttacatcaagaaggcttcgccagccataaaaaaagccgcaggccaagggtcacttgggctggcggcggtcgcccgaaggcggtgcctgcgaatctcgcatcttgttgcgaaaaagcgcgaggcgaggtcgattacactgtccgaagtatccgcaatatcccggagtttgtcaagcggcccccaacttgtgacaatgaggcttgattcaacgtcgcctgcttccggagaaacgacatgcgcacactggggctcgacatcggttccaactcggtcggttccgcgtggatcgacactgacggcaaaatcgtggacatgggtgtgagcgttttccctgcgggggttgacgagaccgaagacaagcggggcgcccccaagaatcaggaccgccgggacaagcgaagcctgcggcgaaacatcgcccgccgggcgaaacgcaagcggctgcttcgacggcttctgatgcgccatgggctgctgcctgatgatccgcaggaaatggaagcgctgcttgcgcgtgacccgtggctgcttcgccgcaaggggctcgatgagccgcttacaccccacgagttcgggcgcatcctgctgcacatggctcagcgccgtggggcgatggggctgaatattgaagaaccagccgatgaaacagaagccgatgatgaaagtcagagcgaagcgagcgatgggaaggcagcgccgaagggaggagcgggagaggatgaaaaggtcaagtccgcgattcatcatacacgcgagcagatgcgacaggagcaggcccgcaccttcggggaacttgtcgcccgcgtcgccgacaaacgccgccatgtcctggtcgatgatgagggcgagccccgcaccggtccgaagggagaaccttccgcctgggccgaacccatccgcaaccgtgccgattctttcgagtttcatgccgacagaaacatgattcgcgatgagttcgctaagctctgggaggcccagaaccgaatgcagggcgaacttgcatcattgcttaccgaagatttacgactcaacctggacaacccggaaggcaaccgaacctggcgccaccgggggctgatgttcggccagcgacggacgtactgggataccggcacgctcggccgatgcgacctcgaaccgaccgatcgctgtgtgcccttagccgatcgccacgcctcctacttccgtgtcgtcgaatcggccaacaacatccgcctgcgtgggccccaggatgtggactttcgaccactcaccgccgaggagcgcgatgcggtgatcgaagcgcttcgcaggcagaagaccgcatcgccgaccacggtgcgcaaggccctccggatcgacaagaccgcgttgaaaaagcagggactgcccgacaatgcctataccctcaatatcgagcgggatgcagagcggtcactcaatacggattggttcgaaagccagatcgtccgtggcgcgatcggcagcgatacatgggcaacctgggatgagtcgaagcgcgaaggtctcaaccgcgccgttttgaaattcgatccgaccatagaagatgatgtacagcgattaaccgaggtcgcgggcaaactcggcctcgacagtgaaaccaccgcccgcctcgtgaaggcctggcgaacgcgcccgaagctcgagaaccggctgaacctgtcccgacgggccgtgttgaacctgttgccctacatggagcaacccaacgctgatggcacgtggccgacacagatcgaggcacggggattgtttgccgaggatggcgatgccagcgaccggaaaactggaacacccgcaccggatgaacaacgccagcggtaccgcatcggcagtcggagcctgcggaaggcggaccggcatttcatggccaagcatcctgatggcattcctcccgcacccacactctccaaccccgtggtgcgaaaagccgttcacgaagtccgccggcatctcgtcgcctacgtccgcaaatacggccagaagcccgaccgtgtcgtgatcgagttcgcccgtgaggcgagcaagcctgccaaggtcagcgaccgcatcctgagcgtgaaccgcaagcgcgacagaatccgcaagtccatcatcgaggaagtggtcaagcccactttcgacgacacctttcatacgctgagcaacaaccagctccgggccgccgttgaccgcatcgtgctcgcccggcagcagcgcaacgtatgcgcctacagcggcgaaccgatcagtgactttgcagccgcgaagggcagcggactcgagatcgaccacatcatcccgtacagccgttgcggcgataattctctgaacaatcgcgtggtctgctatcgcaaggccaaccgcgacaagggccgaaagacgccccgggaatggtggggggaggccttcgatgagcgaagtgctcccgtccggttcatgcgcgaccacaaacccgcaagggatgattacttcaacagccgtgagtatgccgccaagtggcgcaacttctcgcggaccgacattaaggacgactggcgcggcagccaactgacggatacggcctacgccgcacgcgaggttcaggcctacatccagcaggcgctgtggccgacagagcccggccacctcgaaggtggaagccgtcgcatctttgtgacccggggggtctataccgcacagcttcgccgcgactggcagctataccaacgtctgctggcatccggccccgcatcacctgatgaggtcaggcaggcggcagccaaaaatcggggcgaccaccgggaacacgccgtcgatgccgtggccatcgcactgactgatcatagcgtgatgcagaagctcgctggccatgcccgagaggtcgagctggagcgcgagcgcgcctaccgggccggcgaggaaccgcgccacattccccgaaaaccgatcgacccgccctgggacacgattcagtccttccgccaccaggtgctcagccggctctatccgcagttcgatgaaccggacggccccgagggcggaaaggcgctgggggacccgctggtcgtatgtcaccggcccatcgcgcgcaagcttgtcggccgcctgcacgaggacacgctcttcgggcccgttcccggcaacgacaccctcttcacagggcacaagcccgtcagtcagatcgagccgaaccacctgcgaatgcccgaaccggagacggacaagcaggcgattgaacgccttgccgagcgttatctcgatacgggaatcgagaaggaccgacgccgtgcccgcaagcgggcaaccgccatcgtcgagagtcccgcgttttcacgcaagcacgtcgatccccctcccggaaagagcgggatcatcagagatatcgggatgcggcgcatccttcgcaagcagatcgaacagcggctccacgcactcggcattgatgccgatgcagacacctttaacaaatcacagatgaaccgcatcctgaaagatgggccgttgcgcatgccttccggggttcccattcatcgcgtggtgctgctgcgaaccatgaccgaccccgtgcgcataccgcgaaaacgcttcgatcacgggcagcagaaatggggatacgaaaagcaccctcgtgccatgcgtgtgtacgtcggtggcaacaatcaccatattgaaatccgggcagatgaacgtgagcggtggaccggcaccatcatccccaccttcgaggcggcccagcgcgtccggatcgagcatcgcgaagccgtcgatcgctccgatgccccggaaaagggcggccggttcatcatgtcgctcgctgaaggtgagaccgtctacatgaagcataaggactccggtgtgcccgattatttcgtggtcttcaagcttgataagccgcagaagatacagttcaagcaccactgggatgcacggcgggcgaaaggggaaaaggatgaagatggaaacatcatccccggcagccagcgcgaagcgatgccggtcaccgcgagccagttgcgcgatctggccccgcccggtttcgacaccccaatcaaggtggccgtcgatccgctgggccggccgcggcagatggagccggcacccccgctccaggctgagaccgggcaggtcaatccgcgcatcctggccattgcccgcgatgcgctggccgccagaaaggcacaccccgaccgccggccccagcccgatgcccagcccctgccgggttcctggacctggatgcggcggcgccttgcggatgagggcctggccgatctgaccccgcagttgtccgtggcatggcgcgcattgcaggcagaggccgtctgacctgcttcttcttgagcgaccttggcggttggccgataggactcattggcattgccccccattcggggtgcctttgagcccgggccatgatcaagcgaacactcgaaatatcccggcaacccatgttcatctcgctgcgccagggtcaactggtcctgcaaccgcccgaggccgataagtccgcatcgcataccgtgccctgcgaggacatcgggctggtcatggtagaccagccacgcgtcacgtggacccacaaggcgctggccgcgttgatgaaacacggagcagcggtatgcatctgcggggacgaccaccttccggccggcctcctcgtcccactgcccggccatacggaggtcgtctggcggctcgatgatcagatcaacgccacgaaaccccggaagaagcgcatctggcagcaactcgttgccgccaaggtccgtgctcaggccaccaatctcgcttccgggtcgcctgcacgaaatctgctcgagaacctcgcttcgcaggtacgttccggcgatacgaccaatgtggaagctcacgccgcccgcgcctactgggccacctggctgtcgcgcagcggcgagccggccctggcatccagtgtgaccgccggaacagagatattcgatgccgagcatccggacacgccgccgttccgtcgcgatccggatgggaccgatccggtcaacgcgatgctgaactatggctacgcggtgctccgggcggccgtcgcccgggccctcgtcgcggccgggctcctgcctgccctcggggtacatcatcacaaccgatccaacgccttctgcctggccgacgacttgatggagccgctgcgcccgatggtcgatgtccgcgttcgtgaactgcactggcgggggcaccatgaactcgatcagcttggcaaggcctgtctgctggacgtgctcgtccaacccgtgaaactgcggcgtgaccgcggcccgctcatggtcagccttcaccggatggtggcctccttccgccgcgcacttcgtggcaccggcgagatggcgattccgttgagtgacggccccgcgctcatgcaacgcttcgagcccgagagcggggcgccgggggaaacggccgagcccagtgaccaagggcccggggcgtgctgatcagcgggtaccgatgcatgtgggtggtggtgatgttcgatctgccggtggacactgtggagggccggcggcactatgcgcgttttcgcaaatcccttattgaagacggcttcacaatgatgcagttctctgtctacacccgccactgcgccagtgaggaaaacgcgcaggtccacctgcggcgggtcgaggggctcgtaccaccggatggggaggtgcgggtcatcaccatcacggacaagcagttcgagcggatggcagtcttctggggtcgcaaacggcgggtcccggaacctcccccaccccaactcgagcttttctgagcccgccgcccacggttaagcccctgtcgaagcggcacttacggcgccaggagtgtaatcgacctcgcctcgccgccaatccgcaacgcgcagcaccgactcgcctgcgcacttcagagtgtaatcgacctcgcctcgccgccaatccgcaacaggcaagc

SEQ ID NO: 839 - DNA, 5172 bp, synthetic construct
  source 1..5172: mol_type = other DNA
  misc_feature 1..5172: note = Synthetic
tctcagcatataaacagaaatacagtctgatttgacccgaaaggttacctataaagcatcagaatgttcaataaaaattaaaatctccccaggcagattatcctaaataatgtaatttattcttaggattctattaacagagtgtgtttaagactgatttttatatctataataaaagaatccccgccgaagcggggatacagatcgtaagatctacggcatatagccttattgtgataagatgccagtaaaacatacactttttcctttcatttgtcaaaagttttttcttattttatttcagattatattttaaagatatataactgtcggaatgaaagtcttagaatcattaggagagttatcatgaaaaaggttttaggtttagacctcgggaccaatagcattggttgggcacttgtcagttatgatgagaatattgctaaagaaaaaaaatataccggtattcttgatgcgggtgttcgcattttccctgaaggattggaaccggataccattgggaaaggggataaagaaaagtcgaaaaatgccagcagacgggaattccggcaaatgcgccgacagacattcagaaaacgtctgcgaaaaattaagcttcttgagtgtctcactcggcatgatatgtgcccacttacaatggaagaactgaaacagtggaaaaaatgggatccggcaaagaaaaatctcggtcgttcctttcctgatacacctgccgtgagagaatggctcaggatgaacccttatgaactgcggacaaaagccctgaaagaagatatttccagattggaattggggcgcatcctctatcatttaattcaacgacgcggtttctacagcagtcggaaagaaaaagatactggagttctatataaaggaaacgatgccatgattggcattaacgatacgcgtgaagaattaggaggaaaaacacttgggcaattattgaatgagtatacgaaacctgaaggagagccttatactcccatcacagatgaaaatggacgtgaagtaaaaatccggggacgctatacactccggaaatggtatgtagaggagtttcatgaaatctgggatcggcaggccaaacaactgggactggataaagaaaccgatgtgagaaaaaaggttcgttacataaaaggatctcctgacagcaaacggaacagacatatccttaattatctaatacaaaaactgggagaagaaaacgtaaaacatgataataatgttattatttcctatgagaaaatggctttaaaagaatatttgggaggtgaaatttggaaagatgaagagggtgagataagatacaatagcatggatagtgttttgttttggcaacgcccgttgcgatcacaaaagaacttactccagtcatgccgttttgaatcttccaaaaaaccgtgtgtggtttcacatcctgattttgaaaagtacagggcgtggcaatttatcaacagtatcaaatttgaaggagatagctcaggactacatttgagaagtctttcacagaaggaagcagagaccgtcttcaagatgatgacggaaaaaacatccttaaaatttgatgcgattaagaaaaaactgggcagagaatatgaaacatccaattttgataaggataacaaagttccaacctgtaatacaattgcccagttaaagaaattgtttcctaataaaatgtgggaagaaaactatcacgagatatggcatgcttttcacttttttgatgataatgataaactttttaatcatttgaaaaacaaatttgaattaattcctgatgatcctgaaaagatatctgcaattacacttgatgataaatacagttctctttcactcaaagcgattcggaatatcctcccgtttcttgaaaaaggatatatactgagtacagctattgttctgggtggtgttaaaaatgtgtttggaaataaatgggatgccttcaaagatcatcatgagattatagaaaaagaaatctgtaagttgatgttaagaactgaaaaaaacaaagcaggtgagctaattgataaaattaaactctttctcatcaacgggacaggtatagttgattttggaatgcactctgacgacaaaagattaaacaaactatatcatccggtttatgaagtaaaacaaaaaaaagaaacattagacaaacttccggaaatagaaaatctcagaaatcctttggtgcagcaggcactgaatgaaatgcgccatattgtgaacgaaatcattgaaaaacacggtaaacccgatacgataaaagtggaattatccagggatttaagaaacagtaaaaagaaacgtgaagagttgcaacatcgcattcgtgataatgaaaaagcaaatgaagaagcacgaaaacgcctgatcgaatttggtctggcacaatcacgggataatatccgtaaatacaggctttacaaagagattgaagaaaaatccggaactgtccactgtccctatactgataaagccatatcgttgtcagcgcttttaggagacagaaatctttttcaaatcgaacatatttatccccgaagtatctctctggataacagttatgcaaatattaccctttgcgaaagcaattttaaccgcatgaaaggtgaaaaaacgccatggcagttctatcaggaaaatccggatccggctttatggaatgccagttcatgggaagaaattgtttacagggcttataaatatcttccatactttaaagctaaacggtttacacgaaaaggggatttagaaaaggagggttttgtaaaccgacaactcagtgacggcagatatatcagcaaaaaggccagggaagtgctttcagcaatttgtgatgatgttcaggttcttcccgggatgctgacctcagatttaaggcggttatggggactgaataatgttcttcaaccggttgaatcgattgatattggcccctttgattttgaagaaaatgtgttaaaacctcactggcttgtgaaagatacaaaaggcaaaaacaaagaaattaaacctatttataatcagaaaccggctgtgagtgctggagaaacaacaatccccggtgatgtgaagcgaaattggttttactcaccctgcttatctgagaaaaaaacggcagagggctaccacgatggaaaatattgggcagtattaaagcttggtgaaccactggaatgggtaagacagcggaatcaaaagcctgatcagagcactgaaacgcttgttcttacaggtgaaattaaaaatgggaaattttccgtcagagacagatttaattttacattgaaagataaactgccatttgaagatgggtggtactgggcttcattacctattgaaaaaatcacgtttaaagatgtaagcaaaaaaccgacgacatcaactcatcagattacgtactacggtggtatccatgatggccggtttacatcttatctatttcaatgtaaaacagatttaccagatggcaacgcatgggtgatacttgatttgaatactgaaaaagcggagttttttcctgtttataatcaaaaaccagaactgtctgaggatgaagtcctaattaccggaaccatcggcagtcaccggatttttacctcagatgtagatccggatcatagtatgacaacagataaacctgccgggaaatactgggtccggtttccgatagaattcatgaatccggaattagtccctcagttaaacagaccgccagttcctcaaaaaggtgaaaaacttattgaaggcaatatatgggtggataatcaaggagaaatccgctttgatccaaaaaagaaccgggatgaccaacgacatcatgccattgacgctcttgcaattgcctgtacagagcacagttttcttcaaaaactatctacctggtatgcccaaacagatgaaatggagcgggggcggtcccattcgccctatgaatttcccgtaccctgggacaactttttccaatcggtacaggaaaaagcgcaaggaatcctggtttcatataaaaagaataatccggtattgacgaaggtcatcaagaatgtgtataaaaacgggaaaaaatacagaagtgttggttttgctgccagagggcaattgcacaaagaatcagtgtttggaaaacgtacggcaccggatggtaaccaacggtttcatatccgaaaaccgattacttcccttcaaaacaacaaacatgtcgataaaattgtggataaaacccttcgcaatatgattaaggattatttgcagcaagaatatcatatcaatgtgaggggtaaatataacatccctgatgatgcattttacaaagatggtcaatatcgtctctttcttccaaataagaacggcgaaccggttcctgttaaaaaagttcggattggtgaacagataggatttgccaaacggttaaaagatccggttaatcagtacgtgaacccaaggaataatcaccatgctcttctgtatctcgataaaaaaggaatcatgcaggaaaatattgtcacgctttgggaagccgctgaacgaaaacgcaagggtgaaccggtgtatcagcttccggaagatggaaatgaaatgatcactgttcttgaaattaatgacatgtttttaatcggattgccatctatctggcatgaaaatgatgcatggaaaactttgagcccggataaattgtcaccgtatctttatcgagtacagaaaatttctacaatgtattatacttttagacatcacttggcatcaacgctggataatcctgatcaggaattgagaattcaaagcttcaaagcctggcatgaattgaaacctataaaagtgaaggtgacccgggataatcgaatattggagtttaatgatgattaaacggacgcttgtgattacgtcaccctgcaaaatgaacatccgctacggacagttgcagattttgaatcgtgacaccggtgagacgaatgcggtaccggtagaagatctggggtatttgattttggatcaccggcaaatcagtgtgacgcaatccctgctggaggaactgacagaaaacaatacggctgtggtcttttgtgacagccgtcatcatccttcatccatgctgctgaatttggacagtaaccagatacaatctgaaattttccgttgtcagat

SEQ ID NO: 840 - DNA, 24779 bp, synthetic construct
  source 1..24779: mol_type = other DNA
  misc_feature 1..24779: note = Synthetic
ggctattcaagaaatttccgagagctgggcttcgccccaagaaataacaggacctattctaaccataccctatgagtcggttgtaacgatttccaatagcaaagaagccgtcattgtaaagtatgcgcacttcttgcctgaagccctcaacattgagggacaaatggaacctaaatcgaggaaaagaggcatttataatgtgtctctttacgcttcacaactcaagatagatggatcgttcagtactcccgatttttctaatttcctgggcgataccgataaagttttatggcacatggccaccattagcatgggaattccggacatgcgcggaatacaaaatcatattgtgcttcaattgggcgataaagctctcacaatggagccgggcatcccccaaaaaatcaatctggatattgaacaatctaccaaccccaaaaaaactgtttcaaatgattatcagaatggagtatctgccaatttaacctggaaccccgagtggagaagtatctccttttctacagagctctccctgcatggcacaaaaagcctcacctttaatcctataggcaaaactacgcttgtcaaaattcgttctacctggccgcacccaagttttaacggtcagttcttaccagacgcatatacaacttcagaaaatgggttcaatgcagagtggtctatttttgatctcaacagaaactatcctcagcagtgggctgacaaacagcatcgcatttacaactccggttttggggtcatgttgtttcagccggtagacaactatcatcaaaatatgaggtcggcaaaatatgctgtactgattctctttctcacctttcttgccttcttttttatagaaaccctaaataaaactagaattcaccccattcactatatcctcgtaggactagcgctcaccatattttacactttactactttccatttcggagcaccttcaatttggtctggcctatcggatctcggccgttgtggtcattggcatgacttccctgtattccaagtctatacttaaaagcaagcgattggccgtaattattcttctattcttcagcatcatttacacctttgtgtacatagtgttgcaattggaagactatgctttgctgtttggcagtattggccttctattggtgcttggtgtttgcatgtacatgtcaagaaatatcgattggtacaacctgaaacctaaagaaaccataaatcatgcatgagcaaaaacttaaatacctattgaaaacgctgttgatagctattcgcatttattgctggttcaggcaaaaaaagaataaagaaaggctcctggcagcctttcttctaacgcctgccctattcatgcttattccaagctatacttttgggcttactctgctgcagtcatttctatttcaagccatgttggtctatggtttattgagtgtcatctggattattaagcaccattatcgactggcaggcataaatttcatcatctactttctgctcttggtgaaaatcagtggtcccatcaacaaaacatacagaattgatcagggtgaagaaactttgaaagtgctacagttcaatgtgctttcggtgaatgacaaatacacagagactattgaccgggttattgaactggcacctgactttgtctcttttcaggaagtaagccatcaatgggcagaagttctagtgacttgccttgctcaagattacccctattacaaggtggttgaacatgaagatcagggacagggcattgcggtgttcagcaagtatcctttgcaggatgttgaagaaattcatgtgacagccactgccaacattaccggcaaaattctggtgggcgatgaagccatcaactttctggctttacataccaaatctcctaccaccaaactgaaatggcataacagaaacaatcacctcaaatgggcggaagactatgtgaaggagcaacctggggagtttctggtattgggagactttaacacggtgccatgggataaccgaatgttgagttttcagtcttcgaccgagctaacagatagccgcaaaaagcttacgccaacttacccaacctggaatccatttgtagcacaaatacccatagactacatcctccactccaagggaataggctgcgactcgctcgatgcggttagaatcacttctgaccacaaagcgattatggggagttttttggtggctggtaggtaacgattccaggcttcacttcgagtgaagcctggaatttcaccgcccaacagaaaggatggtagccctttcttcatgatgcatactaccatccttaaactaatgcagcgccctttcctatcctgagcttgccgaaggatcggcccagcctaaggtggcatctctatattcatattgcaaacaggagtgctctaaaactttgagggcaaataatcatcagcgtcctctgcgagagatactgatggcgatacgagcggctattgcagtcattgttttaatattcatctggcaatgcttttctccttgagtctatcctaaaaaatcaattttgatcaagattaaataagtggtgttctagcatcaatttgtcattgcattcctgttttctaatttctgttcaactgataactacttctacgaaactttaatcattccacctcagttgtaattgcgttggtaaatccagacctttgtggattctgctctggcagcctgctctgatggaaaaattcaaagaaaatgcgacaatagaacctgctcctgtagacatctcaggtcatgaaaatattgaggtttttggtgccagggagcacaacctgaaaaacattgatgttactattccgcgcaataagcttgtagtcattactggtatttccggatcgggcaaatcatccctggctttcgataccatctatgcagaggggcaacgcaggtatatggaaagcttttcggcctatgctcgttcattcattggcgatatggaaaggcccgatgttgacaaaatcaatggtttgagccctgtaatttccattgagcaaaaaactacctccagaaacccccgctcaacagttggcacactgaccgagatttatgattttctaaggcttttgtatgcccgtgccggaatagcctattcttacctgaccggtaaacccatgattcgccagtcggaagaccagattatcgatcacctgatcaagaatttcgagggtaagaagttgatcattctggcccctgtggtaaaaggccgaaaaggccactaccgcgagcttttcgttcaaatccgcaaaatgggtttcaccaaagtgagggtggatggcgtggtgatggacatggtgcccaaaatgcaggtagaccgttacaaaacacacgacattgaaattgtcatcgaccgtataattgcagacccaaaagaccgcttccgcattgcccaaagtgtgaaaaccgccatgagccatggcaatggagtgatgatgattcgcgatgaagaaaaccagattcatcatttttctaaatacctcatggacccggaaacggggttgtcgtacgatgaacctgcaccgaacaacttttccttcaactctccatatggtgcgtgccctacctgtaatggcttaggacaaatagaagagataagtaaagagagtgtggtgccagaccccaacttaagcatcagccggggcgggctggctccgctgggcgactatcgcgacatttggatattcaaaaagctcgaagccatactcaagcgacacaaggccaacctgagcactcccataaaagacttacccgaaggggtgctggaaaccattttatatggagacgatgtacctgttgccgttagctccaaaaaatatccgggaaccaactggaacaccaagtttgagggaataattaagtttctggaaaagcaaatggaagaaggcactgaaaaaacacgtcagtggattgccgactttatgaccgtgaaaacctgccctgaatgcaacggtgcaaggctaaaaaaagaatcgcttcactttaaaattgccgataagaacattgccgaattagccgaaatggacattgagtccttaggccactggctggtaggccttgaagaacggctcaccgaaaagcaaaaccaaattgctccggaggtattaaaagaaataagaaagcgaacaggctttctgctcgatgttggcctggactatcttacactcaaccgtccgcttcgaaccctttccggtggagaagcacaacgtattcgtttggccacacaaataggcactcagctagtgggagtactctacattatggacgaaccaagtattgggctgcaccagcgagacaatgtgaaacttattaatgccctaaaaaacctacgcgacattggcaacaccattatagtagtagaacacgataaggacatgatgttggcctctgactttattatagatataggtccgggagccggacgtcatggagggcaaatagtggcagccaatgaccccaaaacctttttgaaagaaggaggaaccaccgccaaataccttaagggcgaaaaagcaattgaaataccctcgcagagaagaaaaggcctgggtaaaatgctcaccctgaaaggagccagcggaaacaatctcaaaaaagtagacctgaaaattcctctgggtaaaatggtgtgcattacaggggtttccggtagcggtaaatctaccctgattcacgataccctcttccctatcctgaaccatcatttctataaatcgcgtaaatcgccccttccttacgaaggtatttccgggttgaaagatgtcgataaggtgatagaagtagaccagtcgcctataggtcgaaccccaaggtcgaacccagccacctataccggagtattctcagatatacgcaccctgtttacagaacttcctgaagccaaaatcagaggctacaaagcaggtcggttctctttcaatgtgaaaggtgggcgctgcgaaacctgtgaaggtgccggaatgaagctgatcgaaatggatttcctaccgaacgtacatgtaccttgcgaaacttgtaaaggaaagcgttataaccgcgaaacacttgaggttcgattcaaaggaaaatctatctcggatgtgctggatatgaccgtagaacaagccgttgaattcttcgaaaaccaacccaagattttgagaaaaattcaaacattgaatgatgtaggcttaggatatatctcattaggtcaacacgccacaactctttcaggtggtgaagcccagcgggtaaagttagccacagaactttctaaaaaagacacgggcaaaacactctacattctggatgagcccacaaccggcctccactttcaagacattcaacatctgctcgatgtactcaacaggcttgtagacaaaggcaataccgttttggtaattgagcacaatttagatgtaattaaagtagctgatcacattatagaccttggccctgagggtggcgacaagggaggtcaaatcatagctcaaggcactcctgaagaggtcgccaaaagcaagaaaagctataccgctaagtttttgaaagaagaactaaccgcccaaactaaagccggcaaggcttaacccccttaaaacgggaaggaaatactggggtaatcctgaaacgcactcctccaagctaaacgaaaccagagcggctctctttccatgctgagcttgccgaagcatctctctaatctcatgctagccttggtgtcctcaccaagacattgacaggcgaatcggtgaggacaccgattccggctagagtttagcgagtaaagtcatctttctatgccgaacaaaatcaaaagccgatccctttccatactgagcgaagccgaagcacctgtccaaacgttctaagctgacagatacttctgccatagtcgggatgggaatgaagcagtgtctatcaaagtcctctatgagagactttgatgggggcactagaagcatctgtctaaccttacgccagtcttggtgtcctcaccaaggcattaaaaggtgaatcggtgaggacactaattccggctagagtttagcgagtaaagtcatctttctatgctgaacaaggccaaaaccgctccctttccatactgagcgaagccgaagcatctgtctaacctactaacttggtagattcctcctcaaagtccggattagaaatgggaacgtaagaagtagctacaaaaaaatagtgctgccgcaaccgcggacagcaccatcttcaaccaaaacattaaaatcaacactgtatctaacacctcaacgtcaggctcgttagcctgacttcaaccatcgattttaattgcctttttctgactttataacggcagctaagaactgctattataaccgtcttcttattatttgctcttttaacactttttgacacaccaatgttcccacaaaaactcacaagtatgcgaaccgaaacattttgccctatgttatgcttccaaacccacaggctatgagcagctttgaacatctccacctggagattccgaagtccgacaagcaaagaatcgtaataataggcggaggctttggcggtattcaactggtaaaaactcttcaaaaatccaacttccaaattgtacttctcgatcggcacaactaccatacatttcagcccttgttgtatcaggtagccacagccggtttagaacccgactctattgcgggagctttgcgccagctttttgcccggcacaaagacttttactttcgtatggctcgcgttaccgggatagactcggaaagaaaggtaattaagaccctggtgggggagttagaatatgaccttctggtaatagccaacggatctaaaaccaactattttggcgataaggaaatgtacaatcgtacgtttccgatgaagcaaattccacaggcgttggatttgcgcagccacatgcttcaaaactttgaacaaacagtgctttctaaagaagatgaagaaaaagaccgtctgaccaactttgtaattgtgggtggaggccctaccggtgtggaagtagcgggggcattgggcgagctcaaaaagcatgtgttgccaaacgactatcctgatattgacttcgacataatgaaactgcacctggtagacgcaggcccaagactgctggcgggcatgtctgaaaaatcgagcgccaaggccgagttatacctcaaagattttgatgttgacgttaggcttaacactcgcctggtctcttatgatggtagagatgtggtgctaaccgatggcaccgttattccggccaaaactgtcatatgggctgccggggttacgggcaatattatggacggtttgccaaaagaaagcattggcggtggacgaataattgtgaacgagttcaatgaagtaaagggtctgcaagatgtattcgccctgggagatattgctggtatgtatactgcgcaaactcctaaaggacaccccatggtggctcccgtggccattcagcaagccactaacctcggcaaaaaccttatgcgggcacaaaaaggcaaatcgctaaaaccgtttgtatataaagacaagggctcaatggccaccattggccgtaaccgcgcagtggtagacctccctaagtttcattttggtggcttgtttgcctggatggtctggatgttcattcacctaatgtctattgtgggttttcgaaaccgattggtcattttggccaactgggtgtggaattacctgacctacgaccgcggcaccaggctcatcattcgtacctttgttagaaacaaagactacaagccgggagatacgctctgatttccagccatattggttgtttacctcttgcaacaatgctttgttttgattgggcaggtttgcttatttttcgggttctaccatgggcaagaaaagactatactggattctccaaatactcggctgggggctctactttggctccaactttatctctcagggcttagatccctttgagctgggagaaaaggccgtacaaaaccagcgcaccgagttggccattcatagcctattcttttttcttactacccacgtcttcatcagaaacataattattaagcgcaagtgggtacaaatcaacattgcgcgggtaattcccagaattttaggtgtcattcttttggcttctatactggccaacctgctcacctttctcatgtactatgtgtttggcacccgatcgttcaacgacccaagcctggttaccgaggtactcctactctttgccacctccattgtgcttttcattctatggtctaccgtatactttctctatcactacctggaaagtaacaaccgttcgctcaagtatgaggcggccatgaacgaaatgcacctcaaccaactcaaagcacaactcaacccgcattttattttcaatgcccttaacagcatgcgggcgctggtagacgaggagcccgctaaggccaaaattgccatcactcaactttctaacatattgcgcaactcgctcattaccgataaaaaacgagtagtaaattttagaaatgagctgaacaccgtaaaagactacctcgctcttgagggtattcggttcgaagagcgtctgaaagtaaggtatcgcatagaccccagctccgaccgattcgatgtaccccccatgatgctacaaaccctggtggagaatgctatcaaacacggggtttctaacctgatggagggtgggcttattgaaattcagtcggcagtacatgatagcatactggttataaaaatcagaaatagcggccaattgcttccgaacagaaaaaaaaccagcaccagaagcggtgtaggtttggtgaacaccaaagaaaggctgaaattgatttatggcgatgccgccacatttaatatttataacgaaaatgataagtttgttgtgactgaagtgaaaatacctcagcgcatttaaatataaattctatgagagcacttattgtagatgatgaaagactggctcgtaaggagcttaccaatcttttgcaggaatttcaggaaatagaaattgtgggcgaagccgtgaatgctgaggacgcggaagaaaaaattaatgccttaaagcccgacctgctgtttttagacattcaaatgcccggtaaaacaggttttgaactgttggaatcgctcgactctgtcccggatgttgtatttaccaccgcatacgatgagtatgccctaaaggcattcgactacaatgccatggactatctgcttaaaccaattgagccagacagactcaaagaaacggttcaaaaactgattaaccgcaacagcaaacccaaggccactaccgaaaacaaccctcagaagctgggaccaagcgatagggtgtttgtaaaagacggagacaaatgctggtttgtaaagctggagaacatccgcctgttcgagtcagatggtaattacattaaaatatacttcgacaactataaacccatgatccacaagtcgctcaatgcactggacgaaaagctggacgaccgttcgtttttccgtgccagccgcaaacacattattaaccttacctgggtagaaagcatagaatcttggttcaatggtgggttaatggttgtgctgcgtggaggcgataaagtagaagtgagccgaagacaagccgcccgctttaaagaaatgatgagcctttagtgctccaataatcgtgtggaatggaacctgaccctggcggaaacgtcagggttttttttgtggaaaatcaagttccggaaaccctgaaacctgaatccccaaacttgttgaattttaggcgcactttgatagtttatattttttagcgaaattatttcacctaaatacccgaagactctcaaagactaaaaaagaaagcgacccgtaaaggccgctttaaatgttttcacaacggaataatccttattgtgactagtattcaaattgtatttgaagctacacttaattttttaaatataaaatagcacacgatgaaaagaatattaggactggatctgggtaccaactcaattggttggagtttagtaagacttgattatcaaactaaaaaagatacctatttagggtctggtgaaatcttaggaatgggtagtcgcattatccctatgaatgaagctgcactctcagattttggtaaagggaaaaccgtttctcaaactgccgaaagaacaaagtatagagggataagaagactgcgacaaagacatctactaagacgggaaagattacatagaatactgaatatactaggttttttgccaaaacattacgcacaagagatagattttgacaatcgcttaggtcaattccttgaccacagagaacccaaagttgcctatcgaaaaaataaaaatcaaaagtacgagtttctctttaagagctcttttgatgaaatgatacaggatttcaagaaaagccaaccttcattgttctataaaaaagacagtggtgaggaaaccaagatcccgtatgattggaccatttattacttgagaaaaaaagggctttctgaaaaactaaccaaagaagaacttgcctgggttattctgaattttaaccagaagagaggctattatcagctgcgtggggatgaaatagacactgaaaaaacaaaacaaacaagacaatactttatcactgaaacaataacgtccattgttgatactgaacaaatctataaggggctgagtatttttcagatttccctgtcaaatggagaggtaggcaaatattactcaaagaaaagacctagttggattggagaggaaaagaatatcattgtaaccgttgaacttgacaaagacggaaaagatagattgaacgatcacggtgaagtaaaaagaaaattcactattccttcagaagaagattgggataaaaaatggccattaatcaaagctaaaacagaagatgatttaaaaactagtggcaaaaccgttggatgttatatatacgataaactacttcagaaacccaatcagaaaattagaggcaaactggtcagaaccatagaacgagacttttacaagtatgaattctcctcaatattgaaaaaacaagtaggcctgcaacctgagttgtttacggatgaattgtttgaagcatgtgtaaagcacctttaccctaataacatcccccatcaaacagatttattgaagaggggctttgtacatctatttaccgaagacatcattttttatcaacgtccactaaaaacgaagagatctctaattgctgaatgtaagtacgagaaccgggtttataaagacaaagaaaccggagaagagaagaagcaatggttgaaatgtattgcaacgagccacccattgtatcaggagtttagattatggcaattcgttcaaaacctaaaaatctatgaaagagaaaaacgagtaaacgggcttttacatgctgatgagcatgtaacaaatgagtttatttcttccattgaagataaagtaaaactctttgagcaactcaatgaccgaaaaaacattaagcagagcactttcctcgggttttttaaaaaagacggaaagaaattaacagagaaaacccatcgctggaattacgtagaagataaggaatatccatgcaatgaaacgcgcgcaggtttcatcactgttttaaagaaaaacaaagaatttaactggcaagaatttctgactcagaaagtagaggttgaattatggcataccttgtactcaattaataaaaaaaatgagttaaagagtgcattggaaaaattagctaagcgactgaatgttgaggatgatatccttaaaccgtttcttgatttccctccttttaagaaagaatatggagccttctctttcaaagcacttaataaactgttaccacttctacgctctgggaatcattggagtgaagagcaaattcacgaaaaggtaaaagacagaattgataaaatactcactggtgaggaggacgattctgttgataataaaataagagagcgtttacaaagcttcaattcgattgaagattttcaaggattgccaatttggcttgcttcctatgtggcttatgggagacactcagaagttggcgagagaatatactggaaaaagccaagcgatattgaacgactagcacaacactcgcttcgcaacccaatagtggaacaggtcattaacgaaactttacaggtagtaaaagacatttggaatcactacggaaatggtgaagaaaaattctttgacgaaatccatgttgagcttggccgggacataaaaaacaccaaaaaggaaagggaacgattgacaaaacaaataactgaaaatcagaacactaatcttagaatccgagcaatattaaaagagttaatggatgatccaaaggttgagggcgatgtaaaggattactccccaagccaacaggagctactcaaaatatatgaagaaggcgtgttaacagcctctgcaaaactacctgacgatatcgaaaaaatcagccgaaaagctgagcccaccaaaacagaaattcaaaaataccgcttgtggatggatcaaaaatatcgttccccttatacgggagaaatgattccattgaacaaactatttacccctgcttatgaaattgaacacattttgccacaatcaaggtatttcgatgactcgctaaataataaggtgatctgtgaggctgtcgtcaatggcaatccttataaagacaatcaaactggatacgaatttatctcgaaaaatgaggggcgaatcgtacacgaactatccacgactcaaaaaacggtgaagattttcacgaaactggaatatgaaagctttgtaagcagatatttcacaggaaagaaaaaagccattcttctaatgccggatattcctgaatcatttaccaataggcaattgaatgactcccgttacatcagcaaagttgtcatgaaactcatgagtaacctggttcgagaggaaaatgaagaagaagccacttcaaaacatgtaatacctgttactggaaaagtgactgcgcaacttaggaaggattggggatttaatgatgtctggaacgaattaatagccccacgtttccaacgaatgaatgaactgaccggaaccaacgattttgggtattgggatgaaaaaggtgggaataaatttttccgaaataacgtacctgacgagctgaagaagaattttgaccctaaacggatcgaccatcgccaccatgctctagatgctcttgtggttgctctagccgatagaagacatgtgaattacctgaacaacaaacatgctcaagaaaggggaaaagaaaggaaagattaccgtgccaatttatgctttaggaaatatgatgattcaggcaaaaactacaattggaccttttacaaaccttgggaaagcattaccaaagaacttaaagacaagctggccacaacagttgtaagtgtgaagcagaataaaagaatccttactaagaccagtaattactatgaatcctttaaagatgaaatggggagtttaagaagagataaatcaggtctacccaaaaaaggactaacaaaacaacttgatggaaaacaggggagtgataacaagcgaaacatttcactcaggaaggattatcatgacccaatgccttatggaaaaatagaattagcctttgatgttttaaatatttatgacgccctcaacaaaagagattatataattgatgaagcaatacgtaatcaagtaatcagactgatttcgtattatgatggaaaagaaaccttagcatcaaaagaatctaaaaagcatttcaagcagtacaagaaggcaaaagctgacttagataagtttcaatcaaaaatagacaagctaaatcttgaagaagaacctgatcaaaaagaaatatcctcgttaaccaaaagaatagtcgaaaaggaagaggaagttctccatataaaagaaacactcattattgataaaacaggaaatgcaatagataaaactcattatcaaataaaaacggaaaaatatgggaagagacagccgttggcaaaagcattatcaggggaaacctacgatgctgttgtaaagtcaatttttaaagtagctgattatcagttacaacttgatttaattgatcacttgaacagctattatagtgaagggaatttagattttgcattttcaccggatggaattgataggtttaatagaaatagaaaaacgcctatttactctgtacgactagcagagtcaggaagtagtagatttgaacttggcgaaaaaaaagggaacaatcataaatatgttgaagctacaacagggaataacatatattttgctgtttacaaaaacagagaaagtggtgaaagaaagtttgaaactatcccactaagagaatcctttgaaaggttaaagcaaggagaaaaaacaccagcccctaggcttaataaagatggctacaaactattatttactttgagtccaggagaagttgtatttgtcccggatgaagaagaaaaggaaaacatagagcgtgttgatttttcaaacttgacaaaaagtcaaattggccgcttgtttactgttaatgatttttcaggatacacgatttattttacaccaacctcatttgctagagctattggaccaaaggaattggatactagttatgatcataagttgtcaaaagtggtgttgggagatcaatctgtcccgattaaagaccattgttggaaactagaagtcgatcgtttaggtaacttgaaaagagcaagatagagtccaatagaacatttatctctacacataaccttgaagatcttaagcaaacgtctaggcccctgcttaactagcctatgaatttatacacaataatccatgcaaccagagaagctataccacatttacaaccatgccaatggcaacgaaaacctctttaaggaaacagagaactataattacttcttagggcaatggtctaaatatatcgaacctattgccaacaccttggcctactgcttaatgcccaatcattttcatgctttggttttaatgaagaggcaggaggaggtagaagcaacttttggaaagtttagaacttttcaaaagttcaaggttcttaaccataattaaaaagacacggcacatgcaaacagaaaagtactatcacatttacaaccatgccaatggaagagacaacctttttatctccgtagaaaactatgaatactttcttaggcagtggaccaaatacattaatccgattgccaacaccctggcttactgcctaatgcccaaccattttcattgtttggttctgataaaggatcaagacgagatagaagcatcttttggaaagtttgaaactttccaaaagctagagtaccgcctaagtaagcagtttgcaagtctattcagcagttatacacaggcttttaacaaacggcataaccgaaaaggaagcctctttagccccaactttaaaaagaaggagattacttcgaatgactacacctccaaagtaattgcctatatacacaccaaccctattcaccataggtttgtacaaaacataaaagactggaggttttcaagttatcagagcattctatcggataaacctacacaagtcaaccgacaagaagtgcttaattggtttggtggcaaaaacgcattcgaagactttcatcagtcatatataaacacattaccaagtgaaatagatatgaatatttagacgctaaccttccaaaagtttagggtttttggaaggttcaaacgaaccgcatatgataaaacgcacactcttatttggcaacccggctcacctttctaccagcaaaaaccaattggttgtcaaatatccgaatgacgaccaaaagaaaactatgcccattgaagatataggtgtggttttattggaacatcctcaaatcaccattagtcatacattgataagcaagcttttgggcaaccaggcggccattatcacctgtgatgctcatcatttacctcaaggtttaatgttgaatttgaatacgcaccacaagcaagttgcacaaatgagcagtcagctagccgctacagactccttaaagggcaagttgtggaaacaaaccattaaggcaaaaatccggaaccaggcggcattgctcaaagccaatggtattccggcagaaaacatggaacactgggcaagaaaagtgcagagcggtgacccagataaccttgaaggaagggctgcagcatattactggaaaagccttttcactgaccttataaaaaactttaaaagaggccgttttgaaggagagcccaacaatcttttaaattatggctacgctattctgagggcctccgtttcacgctcactgatggtctcgggtcttttgcccaccattggctatcatcatcataaccagtacaatagttactgcctagcggatgatgtaatggaaccatacaggccttttgtggatcaactggtattggaattagtaagaaccgaagacaactatgctgaactcaccccagctctgaagcaaaagctcttacaaattcctgttcttgatgtgaagataaatggcttaaccagtccattaatgatagcgctgcaacaaactacatctagtttgcaaaagtgttattccaaggaattgaaggaaatcaaattccccagcttttgagttttgacaggcttaatcaatatagagtcatgtgggtaatggttctcttcgatctaccgacagaaactaaaaccgacacccgcaattatcggaagtttgtggatatgctggaaaaagatggcttcactcgttttcagttctccatttttctcaggcattgcttaagtatggacaatgcaaaagttcatatgaaaagggtgaaaatgaaccttccacccaaaggacatgtgggtatttttcatattacggataaacagtttggcatgatggaagtatttatctcggccaaaaaagaagaattgccccagccaacccagcaattagagcttttctaaaagcgagaaccccctagctaagtctctgaaaatatgaggcttaacttggggtatcctcagctaagatacaatttgaatgctagtcacaaccaagcggacacggactagcaacagcaccagcctcagctaagatacaatttgaatgctagtcacaacaacaggttggggataacctttaaggcggaacctcagctaagatacaatttgaatgctagtcacaacactactctagccgaaccaaccagtccacaacctcagctaagatacaatttgaatgctagtcacaacggccggccagccgggcattcaatatagccacctcagctaagatacaatttgaatgctagtcacaacgagtagatacacaattgctcgatgatcagcctcagctaagatacaatttgaatgctagtcacaacgctccgatcatggtttaaaaccaataaatccctcagctaagatacaatttgaatgctagtcacaactggtatatgttctatgccactgggcaagaacctcagctaagatacaatttgaatgctagtcacaacgcggttcggatccgagagtcgaaaaagattcctcagctaagatacaatttgaatgctagtcacaacatgagagtctattgggtctaagagaggcttcctcagctaagatacaatttgaatgctagtcacaacaggttgtctcgaacgaaaaccaaattgcctcctcagctaagatacaatttgaatgctagtcacaaccggccatgccacctttagaagcaacaagttcctcagctaagatacaatttgaatgctagtcacaaccgtcccctggagaatagtctgggacgaatgcctcagctaagatacaatttgaatgctagtcacaaccagttataacgcatggattatcagcctgaacctcagctaagatacaatttgaatgctagtcacaactcaacaaaccttcagacctgggctattcagcctcagctaagatacaatttgaatgctagtcacaactgcttggtggtttatggcttggtttgcccacctcagctaagatacaatttgaatgctagtcacaacccagtaggctagagtattcattcaccacaccctcagctaagatacaatttgaatgctagtcacaacgcccctcaatcaatagactatgacggaggtcctcagctaagatacaatttgaatgctagtcacaaccagccttgcttgtttgctaaggtcttcattcctcagctaagatacaatttgaatgctagtcacaaccaccaggtggttaggctgcacaaaaatgctcctcagctaagatacaatttgaatgctagtcacaacaggcagaaccgttgatcattttgaaaagcacctcagctaagatacaatttgaatgctagtcacaactattactggattagattctacccagttaagtccataggctccctcaccccaaacccaaacaatatttggattgcgtagataatcttccaactttattgagcaaacttgcaaatgctttatattgaagagtaatgaaaacgctgcttctccttgtcagtttcttttggcaaacggcacagcaaccgatggttgttgatagtgcggtacaacaaaagaccattcaccctatggttgaaaagggtgggtttccggtagatgccgattctaccatctttctgtttaaaggtattggcccatactctctggaagaacgggcagcccgcgtacgcgagaagctcaccgcactggaaaacgtaaacctggatattactccgcttaaagtggagtataatcaggaggttaacgacattctgtgccaagaccaaattatacttagtataaacgatgccgatgcgcaggccctgggccttagccgcagagctaccacagagtattacaaagacttattgaagaatgcccttactcaggaagaagaaggctttagtaacctgctatttgtaaatattggtatagccctgctcattatagggctgtttatttttggtttaaagtactataaccgcctgttcagactgctggcttttaagctacaggcacaaaaaggcaaggtttttaaaggctttaaggtaaagcaatatgaattgctcactgtagagaagcaactgcttatagccggttggctgctcactgtggcgaaatatgccctactcctttttattatttatctgctgctgccggcactttttgctcttttcccatggacccagggcctggccaataagcttatacactatgtggtagacccgctggttgccttaggccacaaaatagtgggatatatccctaacctgctgtttatcatagttatagtggttattttaaaatacttcctcaagttgcttagcttctttaaaaaagaggtagccacaggcagactggaaattaagggcttttacccggagtgggcgagccccacttttaatattgtgagggctatctttattgctcttgcttttattggtatttggcccctgttgcccatgagcaactcagagatattcaaaggggtttctaccttttttggtttgttagtagcattgggtggtgccggagcattctctaatattattgccgggttggtgattacttatatgcggtcgtttaaaattggcgaccgtgtaaaaattggtgaggtaattggcgatgtgaaggaaaaggctttactcaacactaaaataaaaaccattaaaaacgagatcatcaccattcccaattcgcagatgatcaacagccacaccataaactacaccaccgccaatgaagaagaaggccttatattgcataccacagtaactattggctacgatgtgccgtggcgcgaagtacacaagctgctggtagaggccgctctggctactgagcatataaagaaaaagccacatccgtttgtgctgcaaaccagcctggacgatttctatgtgagctaccagctcaatgcccgtacgcgtgagattcagaaaatggcactaatttattcggagctgcacaaaaatattcaggacaagtttaatgaggctggggtagaaattatgtcgccacattatggcgcgcatagagatggtaatcaaagcaccattccgcaaagctatttgccggaagattatagagcccctagtttcaggatcaaaactgaagaatgagttttagaaagaagctttatataatcatattcggtacagatacaccagcaggtaaggctttcgatgtcggcctgctgattgctattctcattagcgtattggccgtaatgctggaaagtgtttacagcattaaccagcggtatggcatattttttaagtatctggagtggttttttacggtaatttttagcttggagtacattgtgagaatctacgtaaccgacaaaagaagaaggtacatcttcagcttttacggactcatagacttactgtctctactgcccacttaccttagtttcttttttgccggaacacaatatctgctcattatccgggctatgcgattgctgcgtgtattccgaattttaaaacttgggcgctttgttggtgagggagaacaactgggtagggcaatcaaagccagtagacacaagattacggtatttatgggtactgtgcttatgctggtaatcatgctgggcacggtaatgtatctggtggaaggtagagagaatggttttagcagtattccgctgagcatttactgggccattgttacgctcaccactgtgggttatggagacattgctccgcaaaccattctcggccaaaccatagcttcttttgtaatgattttgggctatgccattattgctgttcccacaggaattgttaccgtagagcttcagaaagaccaaaacaaacagaaagaaaaagcatgcctgaagtgcgcctcgaaaggccatgacagtgaggcgctattttgtaaattttgtggagaaaagctgccggtatgaaaaagcctgcaactacagaagcctatagcccaaaagaggaacttgccaatgccctttcgcatggtttaggcatattggccggcattggtggaatgatttacctgtttactaagcatcaggagattgattcctcggtgttttggagttgtctggtttttctgctctccgtggtcacgctttatctggcttcaacactctaccacagtgtgaagagtaagaaacagaaacttctgttcaaaaaactcgatcatatttctatttacctgctaattgccggcacctttactcccttttgttggggggtgctgggccacacagcactgggcaaaaacctgctttgggccatttggctaattgcgcttgcgggtattgtttttaaagttttttacacgggtaaactagaaaagctctcgttggcctcttacttgggtatgggatggctgggcttcgtgatgttcgatgagctggccaccgtgcttaatgctcaggtggtaaaccttatgctttgtggtgggctgtcgtatacgacaggagtcattttttatgtcatgaaaaagctccccttccaccatgccatatggcatctatttgtgttggggggaacagggtttcatctgtatgccattcttacctacgtggtgggttagtagccctattcgtattgtacatagttttcccacttttcaattaccgccctgaaatcgtccggtagctctgagtcgaactgcacaaacttacccgataccggatgcttaaagcctagcgatttggcatggagggcttgtctcggcatgagcttaaaggcattttctacaaatgccttatacttagagaattgagttccttttagcactttatcgcctccataggtagcatcgttaaacaacggatggccaatgtgcttcatatgtgccctaatttggtgtgttctgcccgtttccagattacactgaatgagggatacgtaccgaagatctttcagtactttatagtgtgtaatggcatttcttccgcgagaaccatcttcaatggccactgttactcgtctgtctttttcgcttctgcccaaatgcacatctatggttcctttctcttgtgctggcacaccccaaaccagcgcatagtaggttctttctatgctatgatcgaaaaactgtttggccaggctattcatagccttatcggttttagcaattaccagaaggcccgaggtgtctttgtctatcctatgcaccagtccggggcgtccatcattaccttccatggtgggcaactgctgaaagtggtaagccaatgcattcaccaaagtgcctgtccagttattataggccgggtgcaccaccatacccgcttccttatttacgaccagtatatgatcgtcttcgtaggcaatattgagcggaatattttcaggaactacatcggtgtcacgcggtggctccggcagttccaccacaatttcatcgcccggatgtaccttgtaattgggttttacctctttaccatttaccttgacaaaaccatctttaatgccctgttgcaccttattgcgggttacgttgggtagtcggtccatcaaaaacttatcgatacgatacggctcctggcctgggtcgcacaccagtctgtgatgctcaaaaagctcttcctgttcttccattcagctacaaatttaggtcaataattgacaatcgcatttgagaaaattctattcacctctcttctcgcttgtttatatgggtgcccaactcagaaagattaaccaattggcgtattttgtatgtttgcctcatgaacttttcagtgatcaacgaacggcttccgatagaaaaattacttcacccgattgctgaagagaaccaggtagacttgcgaattctacggttggataaaacccaccccaaaatttcgggaaacaagtggtttaagctgaagcataatttaatgcaggccaataaagagggcttcacctcccttctaacttttggaggagcttattcgaatcatatttatgccgttgctgcagcagctaacctcttcgggtttaggagcattggcctaattcgcggagaagctcagcagtctctcaaccctaccttacaatttgcccaagaacagggtatgcaactgaggtatgtagatagaaccagctacagggctaaggacacgcctgagtttctagagaggctcagagatgagtttggctatttctaccttattcctgaagggggaaccaatacgcaggccatcagaggctcacaagagatagccgcacacattcccgaaagcttcgattattattgcttgcctgttggtaccggaggcactatggcgggcttaataacgggcttgcaaaatagggggcaggttgtaggtttcagtgccttgaaaggttcttttttggccggtgaagtcaatcgtctgttagaatactgtggagctaagcaccaccacaattggtttgtacagaacaattaccattttggaggctatgccaaagtaaagccagagttgatgcagtttataaaaaccatggaggccgaatttgaccttttactcgaccctgtgtataccggaaaaatgctttatggtatgctggatatgattcacaaaggagaaattaagaagggctctaaggtgctggccatccacaccggggggcttcagggtagagctggttttggactctaacccattaggtcttcaaatacctccttgagtttcgaaaacggctttatgtttacctttttgccctttaggtctagccctttggtgttgaactttgaaatatagatttctttaaaacccagcttttctgcctcggcaattctactctcaatacgattcacggctctaatctcccctcccaggccaacttctgcggcaaaggccactttatcggagatggctatgtcgtgatatgcgcttaccagagaagcacaaacggccaggtcgagggcaggctcatctatacgtatacccccggcaacgttcagaaatacatcctgtgcaccaaaccgaaggcctccacgtttttcaagcacagccaatagcatgttgagcctcttggcatcaaagcccgttgaactgcgttgtggcgtgccgtatgtagctgagcttaccaacgattgtatttctataagcaatggcctgttaccttcaatggtggcaccaatagctatgccggtcaggtcatcagccttctgagaaataagaatttccgatggattcgaaacctgacgcaatccattggtttgcatttcgtaaatacccaactcagatgtagagccaaaccggttcttcacagtccgcaaaatgcggtacgagaggtgcctgtctccttcgaattgcaacaccgtatctaccatgtgctccaacacctttggcccggctatgcttccttcttttgtaatgtgacctattagaaaaacaggtgtttgggtttccttggcaaacttcattaactctccggtgcactccctgacttgcgacacagagccggctgcactttctattctttcagtatgtaaagtctggatagagtctataataagtaaatcaggctttatatttttgatctgatagaagatgttttgtgtattagtttcggaaagtacaaaacattggtctgtttgaatgcctatgcgctctgccctcatcttaatctgttgctggctttcttctccacttacatagagtactttcttcttgcgtgcggccaaggccaactgaagcatgagtgtagatttaccaatgcctggttcgccaccaatgagcaccaatgagccggcc

SEQ ID NO: 841 - DNA, 24998 bp, synthetic construct
  source 1..24998: mol_type = other DNA
  misc_feature 1..24998: note = Synthetic
gcagatcaaggatgtcaaaaaaggcgagcacatttccagcgtggcggtcagcgacacccacgccgtcgaaattgacaacaaggactgcgtccgctgcatgcactgcatcaacgtcatgaccggcgcgctggccactgcatcaacgtcatgaccggcgcgctggcccccggcaaggacaagggggccaccatcctgatgggcggcaagcgtacgctcaagatcggcgacctgatggggacggtggtcgtacccttcatcaagctcgaaaccgacgaggacatcgagaagctggtggatctcgcgcaacgcgcgatagatttcttcgccgaaaacgcgctcgagcacgaacgcactggcgaaatgatcgagcgcatcgggctcaccaacttcctcgaagcgttggagttggaggtggatcccaacatggtcgcgtctccgcgcatgaacccctacgtccgcatggatggctgggacgaggaagtcgcaaaagtcaacgccaggaagcaagctggcggacgcaattaagttaccggggagaacgaaatggctcaaccacaaatgcgccgtcccatcgaaagcggcgttcccgacaacaagcagtatctgcacccgttgctggcgaagaactacggcaactggaaataccacgaccggccacgcccaggcgtgttgcaccacgtctcgcacagcggcgacgaggtgtggtcggtgcgcgccggaacgcagcggcaaatggatgtcggcaccatccgcaagctgtgcgatatcggcgacaaattcgccgaaggccacgtccgcttcaccatccgctcgaacatcgaatacatggtatcgagcgcggccaaggtcgccccgctgatcgccgaactcgaagcgaacgggtttccggtgggcggcaccggcaattcggtatccatgatcgcccacacccaggggtggctgcattgcgatatcccgggcaccgatgcgtcgggcgcggtcaaggcgctgatggacgagctcatcgtggagttcaagcgcgaggaaatgcccaaccgcgtgcatctgtccacctcctgctgcgagatcaactgcggcggccaggcggatatagccgtcattatccagcacaccaagccgccgaaaatcaaccacgatctcgtggccaacgtgtgcgaaaggccttcggttgtggcgcgctgcccggtggcggcgatccgcccggcgatggtcaacggcaaaccctcgctggagattgatgaggcgaaatgcgtgtgttgcggggcctgctatccgccctgcccgccgatgcagatcaacgatccggaatattccaagctggccatctgggtgggaggaaaaaactccaatgcacgcggcaagccgactttcatgaagatggtcgcatcggggctgcccaacaacccgcctcgctggccggaagtcagcgcggtggtgaagaaaatcctgtacacgtataaggaagatgcgaggtcgtgggagcgcatgtctgactggattgaacgcataggctggccgcgcttttttgagaaaaccggcctgcccttcaccaagtacctgattgatgattggaggggttcgcgcgccaacctcaacgcatctacccatatccgcttctgacggggaaagtcaccatgaaattcggcattgtcgtcaacgaaggcccataccagcaccaggcgagcgattcggcttatctgttctgcaaagccgctatcgaaagagggcacgaagtctggcgcgtatttttctatcacgacggcgtcaacaacgccacgcgcctgaccgagccgccgcaggatgaccggcacatcgtgaaccgctggggcaagctggccgaggaacacaaaattgatctcgtggtctgcgttgctgccgcgttgcggcgcggcatccgggatgaaaacctggcacaggggttccgcatatccggcctcggacaactggtcgaagccggcatacagaccgaccgtctggttgtcttcggcgattgagggaacgctatgagcgacatcaaaaaattcatgttcgtcaaccgcaaggcaccctacggcacgatttacgcgctggaatcgctggaggttgtgctcatcaccgccgcattcgaccaggatgtgtcgctggcttttctcgatgatggcgtatatcagttgaaaaagggccagcagaccaagggaatagaaaccaagaacttctcccctacctaccgcgcgctggaaggctacgatgtcgagaagctctacgtcgagcaggaatcgctcgaagcgcgcgggctgaccgaagcagacctgctggtggatgtaaccgttttgggaagcaaggaaatgggcgcgcttatggagcagcaggacgtggtgttgagcttctgaaggtatctgcccggacaaataacagggaatgaatatgctgcatatcatcaataaatcgccgctttgccacaatgcgctcgaatcctgtttacgcactgtcggctcgggcgatattctgcttatcgaagacgctgtctatgcggcaaccaaagggaacgcgatggaagaccggatgcgtgcggcggcgggccagattaaagtgtatgtcctgctgcccgatctcgaggctcgcggcttggcggatcgcattattgatggaattgcatcagtggattacggcggcttcgttgacctggtcgccgccaataaaaactgccaatcctggctgtgattgtagttaaagttgaaagaggagaatcgccatgcccagcatcgaaataaacggtaaagcctacgaagtcgacgaggagggttatctcatcaatcttgccgactggaataccgatgttgccaactacatggcacaacaggaaaatctgaccatgacagacaaccactgggaagtggtcaatttcctgcgcgaatattacgaggaatatcagatcgctccggcggttcgcgtactgaccaaggccatcggcaagaaattcgggccggaaaaaggcaacagccagtatctctacgagctgtttccctacggccccgccaagcaggcctgcaaggttgccgggctgcccaagccaacgggctgcatttgaggcgacaggagccgggcctccagcaggaggcttacccggctccctggctcctgaccccaggttcctgccataccaaaaatgagttcgctattcgccatcctgctctatctcgcgcttctggtgctggcgttggggctgggatacaaaatttacgactttgcgcgcacacctgcgccgctgaaaattccgaccaccccggctcccaccagcacgggcggggtcgtgttgcgcatggggcgggaagtcgtattgtttgaaagcctgttcaaatccaacctgtggacgtgggcgctgggctgggttttccacttaagcctggcgctggtgctgatacgccacctgcgctatttcaccgaaccggtctggttctgggtggcgctcgcgcagccatttggcctgtatgcctcgctggccatggtcgccgcacttgccgggctgctgaccagaagaattttcgtcgagcgcatccgctacatttcgaccccttcagaccatctcatgctggggttactgcttttgatcgctctttccggggcgctcatggtgttcgttttccataccgacgttatcggtgccaaggcgttcgccctcggccttatgcgcttcgatttgcagccgctgccctccgactgggtactttatcttcacctgctgctggtcgcgctgctgctgattatttttcccttcagcaaactgctgcacgcgccgggaatcttcttctctcccacccgcaaccagacagacaacccgcgcgaagcccgccatctggctgcctgggcagcaaaactggagtctggaaagcaaggttagcgctgaaactgcgttgttagggcttatcccggcggcgcgatcagatgcaaacagatggattccagcacccctgcgcattgattgcggtttcttttttctggttatcggtaaaacccgctcttccctctgttcggccatactgaacctgcccaacaccatcgggcagcctgcttgcttaaatttaacggcgcactataattagcgccttgggaaccaaaaaccactagatatagtagtttttggtttcgtgatcaaaccggctcaaagggagttgcatgcggatcaccagcgcggatactcggtttttccagtcgccctcgcgatctccccgcatcttcttccccgcgatattaccgttcggctgtctccgcttctctatgcccagcgcaaaatcagcgatagcttgctgcgctaccatggtttggccgccattaccccaaaggagattctgatggctacctcccccgcccatctcaagaaatcccatacccgcatcgcgacaaagcaggcactttttatcaccatgcttgcagcggcctgctttgccggaaatgcggcagcaataccacaggatggaaacatctcgtgcgaaaaggaaagctgcgcggccctgctaaagcaactcgaactgcttgcgtccaatggcgacgctgatgcgcagtttgccgtcggggcgatgtatgccaacgggcaaggcacaccgcaggattacccgaaagcggcggcgtggtaccgcaaggcggccgagcagggtcacgcgcgcgcgcagtaccatatcggtgccatgcacgacatcgggcagggtgtaccgcaaaactatcggctggcggcaatgtggttccgcaaggccgccgaaacggaagctgcaaacgcacgcacacccctctcggagacgcccggcaaagctacggctgcgcgcgcacccgcagcacccgagcgcaaaacggcaaaggtcgaagcggcaagcaagactgtcggcgtcgcggccacaaccggggttgccgcagaagcggcgcgccagaaggcaagcccggaggtggcgcacaagaatcctgctcccgctgaaagcagccgggttgcaccgttagccctcaacggcgacgataccgcaacgcggtaccgcaacgcggcagagaagggaattgcggatgcgcaatttgtgctcggcgcaatgtacgccaacggccaaggtgtcgaacgcaactaccatgaagccgtggcgtggtaccgcaaggccgccgaccagggttacgcaaaagctcagtacaacctcgggcgaatgtatatcagcggccaaggggttccatatgactacctgcaagcggtaaagtggttcaaccgggcagcagcgcaggacgacatggaaacgcacagccagaaagaaatgcttaagcgcacagccagctttcgttagggaagcgcagattagatcatccgttcgcccagtgtcgcgtcacgcatgatatgtcgcatcgccgtgtgctgtttttttgtagggtggattaagcgcgtagcgcgaatccaccaaaaacggtggatacacgccttcggcgttttatccaccctaccgatactaccccgtcacttgatacatgacgtgacactagagattgtcgaagggttggcggcaccaattggtttttatagagttaatccgatcatggttcgacataaccaacgacttggctgacgttttctggcagcctagtcggatggctagtagtttcatcaggctcaccacgaacggattaaatctgcgtttcgctagtagcccgcttgcaaagataagggacgctgttcatgcatgaagactccttgataccccggcaggaattcaaaaaagaaccccatcagtcggtagcttggctgctggtcgtgttgaccggatcagtgtttctgacggaagtgctggtgatgttgctcctgaccgccctcccctccttaccaaggctgaccagtgtcctgctggatgcaacattgctgtcggccctgctgtttcccgtattttatttcttggtatttcgccccctgctgcggaacattaccgacctcaagcaggcaaaagatcaattgcgcgtggccgcagtagctttcgagatcaaggatcccatcctgatcaccgacgaccaggccaatatcgttcgagccaacaaaatgttctcgcacatcaccggttaccgcctggaagaactggtcggacaaaacccccgcatcctgaattccggaaggcaaagcaaggccttctacgagaaaatgtggcaacaactactgcgcacagggttctggagcggcgagatccgcaacaagaacaaggaggggcacgtcaacccgtgccgggtgaccatcaccgccgtaaaaaacgagaagcaggaaaccacccactatgtagccatctacaaccgcatgtagcgggctcctccctgcccgccacgcttcaaagcgcttcgtctttacccttctggccgatgttcttgacgcggtgcagcagcggcattgccgcgatgtattcctcgcgcgtcaccttcccgtccttgtcggtatccacctgttcgaaatacacctgcatcaccggcatcgcctgggcctcgttgtaatccagccccccatcgcggttggtgtcggcggaggcaaagcggtcatcgagatgtttcaggccatttttcataacctggttgaccctgacatccatttcctcgcgcgtcaccttaccgtccttgtcggcatccatttccttgaaacgtttggtgttaaaaccctgaaactcggccttggaaaccgccccgtcactgttggcatccatcctcttgaacatcgtatcttccatttgcgccctgccctggccttgcgctggctcgcggcacgcccccggttccgcgtgggccaatgccgcccccagtacgatgggcaaagccaaaaaaatattgatcgcttttttcatgaattaatccttgtcgagtaaattaagaaaggtggacgctcctgtaactggagccatggcgcacctcttggccgtcagcgaggaaaagaccgccccgccgccattaagttcaaaacgggggcgaagttcaataccggcaaaggcgctgcggtataatctcgcgcctattttctgctgactccgatgaacattctctacgaagaagatggcgccatcaaagtcggcgccatccttgccgacaacaccacctccctgcaagtggaaagctcgcacggcaagcgcagcaaaatcaaggaagcgagtgtgctgctgcgcttcgcccagcccggcctgacggaatttatggcgcaggcggaaaaaaccgctgcggacatggatgtggaattcctgtggtcatgcagcccaccggacgaattcactttcggtgcgctggcgaccgaatattttggccacgcccccaccccggtcgaggcggcgggcgccatgatccggctgcactcttcgccgatgcacttctacaaaaaaggcaagggcaaattcaaggccgcgccgccggaggcgctcaaggcagcgctggcgggcgccgaaaaaaagcgcctgctggccgagctgcaagcgcgctacaccgacgagctgaacgggttcaaattgccgccggaatttgccggcaggctgccgcaactgctgtacaagccggaccgcaacaccgtcgaaaccaaagcgctggaagccgcctgcgccgccacacacttgtccgccgcgcacctgctgcaccgctgcggcgcgctcccctccatccacgattaccacttgcagcgcttcctgttcgaacattttccgcgcggtaccggcttcccggaagtaaccgtggatccccaccccgaattgccgttggccgaagataccgccttcagcatagacgatgcgaccaccacggaaattgacgacgccttctcggtccggcaactcgacaacggcaactggcgcatcggcgtgcatatcgccgcccccgcattgaccatcccgcccggctcgccggttgacgacatcgccagacagcgcatgtccacggtttacatgccgggcggcaagatcaccatgctgccggacagcgtggtgcaagcctacacactgtgcgcggacacggtctgcccctcgctctccatgtatctcgaagtggaggctgcaaccttcgccgtgctccgcagcgaaagccgcatcgagcgcatccacatcgccgccaatttgcgccacgatacgctggagccgctgttcaacgaagacacccttgccgcaggcaagctggattacccctttgcgccggaactggcgctgctgtggaacctcgcgcaaaaactggaagcggcgcgcggcaaatcctccgacaacagcgcccagcaggacgaatacaatttttacgtcgagaatgaccgcgtcaccatcaccacgcggcggcgcggatcgcccatagacaaagtggtggccgagctgatgattctggtcaacgccgaatggggcaagctgctcgcggaacatgatgtggcgggcatctaccgcacgcagaacaacggcaaagtcaaaatgagcaccgtacccgcaccgcaccaggggctgggcgtggcgcaatacatgtggtccagctcgccgctgcgccgctatgtggacttcatcaaccagcgccagatcatcggcctgctgcgcggcgaaccgccggtctacgccaggaacgacaccgcgctgtttgccgcgatgcgtgatttcgacgccgcccacaccgcctacaacgaattccagcgcggcatggagcgctactggtgcctgcgctggctgatgcaggaacaagctgccagggaagccctctccccaaccctctcccgcgttgcgggattgccctctccccaaccctctcccgcaagcgggcgagggggcgaacgagaaatgcaatcatcaactcttggggcaaacgaaccgctgcgcgggcttaccgttgaggcgctggtgctgcgcgaaaacctcgtcaaactcgcgcgcatcccgctggtggggcgcatttcctcgctgccggaactgccgcccaacacccgcgtcgtacttgaaatcggcgagattgatctgctcgacatgaattttggtgcgcgcttcgtttcggttatcgaagaggcaacggcttgttgaccctgctaaaacagccgctctcggctgctttggccttttcgctggtgctgcacaccttcgtactgttcggtatcggcttcgccctgcccgacccgcgcaaggccgccgatctcctgcaaccgctgcaagtggtactggtcaacgccaaatcgaaatccaggccggtgcaggccgacgcgctggcacaaagcaacctcgatggcggcggcaacacaccggaagagcgccacgcgaaaaccccgtttcccgccttgagcgacgacaaaaaattcgctcccgagcaagccgcgcgccgcgtacaacaactagagcaggagcagaaacgcctgctgacccagatcaaaagcagccacagcgtgccgcaggaacaagccgaagaaaaaccgcaacagcaggaaagcgagcgcgcaaccggcgaagacctggtgcagcgcagcttggagatcgcgcgcctggaagcgcagatcagcagagatttcaacgcctatcgcgcaatacgtcgaagactggcgcatcaaggtggagcgcatcggcaacctgaactaccccgaagccgcgcgccagcagaaaatctacggcagcctgcaactcaccgtctccatccgcgccgacggcagcgtggaaaacgtcgaaatcagccgcccttccggccagagcatcctcgacgcggcggcgctgcgcatcgtcaagctcgcctcccccttcgccccgctcccgcccgacatccgccgcgacaccgacatcctcagcatcacccgcacctggaccttcacccagtccgacaagctggaaagcgagtagctacccgcctcgccagtcacaccctgaagctggcaggggggttgagttgtgcgcgatcaagaggcaatatcaccccactcaacacaaaaagagaaagcccagcgggttcgccgctgggctttcggatacagaatctttcgattcttttattgtagcaacggctctcaccccggatgagctacaacgattgcattatcagggagaacaaaatgacaagcaagcagaaaaatctcggcccgctcacgttcggattggacatcggcatcgcctcggttggttgggcggtgctgacggagaatcgtatcgttgacctcggagtgcggtgcttcgattcgggagaagatgataaaggcaagccgcataatcaggctcgccgcgcggcccgtgtcgcgcgcaaccgcaacgaaatgcgccattggcgcatgcagcaactattgcggctatatgttgatgttagtttgctcccggaagccaatgcgcagttgctggttgcgccaaatcgcccgaaatcgaataacaaggaaggtggggcttggcatattgtggatgaatccggaccatgggctttgcgagcgaaggggctgcatcacgaattgcagcccatagaactggcgcgtgcgatttaccacatagtcaaacatcgtggagttcattttttccgtaaggctgaagccgaaaacgcgctgccggatgccgatcaagcaatgacggaaaaacccaatgcggaagaatcagatagtccttcagtcgccgccagccccaatgaagcggatagcgatacaactgatgacaatagcgaaaagactgcgaaaaaggagaaagaggcgctgacagccctcaaagcctcgaatgagcggctggagaaatatcgcaagcgctggaacgcccccaaacttactattggcgctctggcttatcgcttgattcaaaaacctgatgcccaattcccggcagacgagaatgaccgaaaaatattttccaacgccctacgcaacaaaggcaaggaataccagcatgcgttttatcgcaaggatttgcgcgatgaaattaactggctcatggatttccaggcgcaataccactctttcctcaatgcccctctcgcggcagaaagcagttatctgcgcgagatgaaccgccaacaaagagggagcattcccattggcccacaaactcgggggatcggggaaacctttcgtcaggccgtactggatttgctagacatgcagcaccccccactatatgaagtgcaaataaaggggatgatcggggtatgtgagtttgccggtcaaaatggaataccagtaaacgcgccgagagcccccaaaaatgccttcaccagcgagcgcgcaacctggctggaaaaactcaatggaataaaaatccggcggaatggtccagaaaaacttacgcctgaagaaagacaatgcctgatagacctgccctataaacccagcaaagtcaccataaagctggtgcgcgacaccctgatcgaaaaggttagcttcccacccaattggcagcaggcctcattcaatatggtgagctaccggatgaagccaacaaaggacggcacctggctttttgtagttggagagaatggcgagaagaaaaaactcaaagactggacaggcaaagccaaagagcgaaaagacaggctcaaagcggtcataggtaaattgagccactccaaaatcagctttgccgagttgcgacgcgaactgggattaaccaacggcgagcatttcgcctatgaggtcaaacaaccagaaaccatcccacaggttgaggaacatcatgaatacctgcccttcgaccacgagcaaggccatatccttaaatctggcataaggtatcaactggccgcagataacaaggccaaagaattgcctaaacctgcttgggtaattttggctgaactgaaaaaggcgagtcgtcaggcgaccttgcacgattggcggcaagcaattttgcgcaacaagaaacccatcaatctacccgcgcaatgggaattcgtaaaagtcagcatcaatgaagcaagcgttgcgcaggcagacgaagaaaaaaccatcgttcctttagaatatgaggatgcacaggctgcagaaaccaccaccacactgctcgaactcaaaggctggcatacgttgcggaaaacgcttgcggagaaatgccccgaactatggcaaggctggcaaatagcctggcaacaaccggaaagcgaagaaggcagggcggtcgccaaaacgattgatgatattgtttctgtgctggcaactgcccagaccgatgaggaggtcactgccgggctggcgaatctcaatttgggtttgcagccagcgcacatttccaccctgcaaaccatcatcaacttcaacaaataccgcaacctgtgccgcgaagcgctaacccaaattctgccgcatcttgaaaaaggtttgatatatagcgcggcctgcaaaacggcaggtttcaatcattccgagaagcaaggaatcgaacgtcaaaaatatttgccgcctctggcaacggtgttcttccagcgttatcggcacggcaagcccaccaaaagagaaaagcgctacaagggactgaccaaccccgtcgtcgcccgctccttcagtcaggctcgcttggtgtttaacgagatagtagcaaagtatggctcgcctcattttgtgaacgtcgagactgcacgtgacttgtcgcgctcccggaaagatcgggatcaaatcaagaagacgcaaaatgccaataaggcgcgcaaggaagcgttgcgcacagaatatcaaaacaggctcgaatacctcgccaaacagcccggcaacgaaacgctggatagcgagctggctgcaccacaactcatcaaaatgcgcctttacgccgagcaaggtgcccaaagcgcctacagccaaaaggatctgaatccagacctgatcctgtccgatccgttttataccgagatagatcacatctggccgcgctccaaaaccttcgataacagcttcgacaatcaagtgctggtgctggctggcgaaaaccaaaacaagcaggatcgcataccctatgacttcatgaatggcgctggcgaccccacgcgctggcggcaatttgaagcatgggtcaggggatgccatgagatgagcgcggaaaagaaataccggctgttagcccaacagatgagcgacaccgatgaattcaaggcgcgcaatctggtggacacacgctatgtcacgcgactgttttcccgcacgctccgggagcatatccagttcgccggaaatccagttgatgaagattttcaggaaatactgccagatgattccggcaaggagcgctacgaccgtttcatgcgcgcgcgtgtgcgcagcccgcaagggcgactcaccgatttcttgcggggcaaatggggcttggcgaaactcaagaatcgtgagaaaagcgacttgcaccacgcgctggatgcctgtgtgattgcggcttgcagccccaagatcatcgagcaagtcaaccgccactttgccaacgaagagcggacgccggatcgctatcacttcaagaaaaacaaggatggcagctttacagtacgtgccaagggcgaaatcattagcccacagcaagcaagggaacaagggctgttattgcgcgagccatggcttggattctaccaagaggttaagtgcaagctgggcgaggtttttgtctcgcgccgcccgaagcacaaacgcaaaggcgaagtgcatggggccaatccgcaggctcaccgccgcatccccgtcccgttggtgcagctcacagaaaaaatgctgaatgacgctctggttgccacgcaaccgggacgcaggcgcagcaactatgaagcggtgctgcaagccctccatgcccatcacggagatgccaaggcagcctttgccgatggctttgacattagagcaaggcatgacaagcccgtcacagtaaatggcaagcaaggcgtgccgatgaagacaagggtaattcatttgcctttgtcggcatgcccggctgatttgctcaaggccattgaagaagaacaaaccagaaaggtcaaacaggcgcaaaaagctggcacaaaaaatcatgggaagaaggcccataaagccgatgagccgatcttcacagaaaccctgaactcattgatgaggaagtcaatcccgctcgcggagctgaagcgcgctgacttaactcttgaggcgcttcaacaggcggacaccccggagaaaaacacgggcactgatttttacacgcgcaacaaaaagttgctcgccgcactggatgagcgccttgcccaacatgacgacgttggcaaatcagctttcgccaaagatttcttccctcccaacaacccagctaaacccatgcgggctattcgcttgccgcaagcacagattcaacagcgcttgcagaagaaagagctggaaaagacggttcacaaaacaattgacctgaccaagctcaagaaaaaacatttgcaggaatctgaagtgggcagcagcttctaccatcgcaacaaagacctgctcatagcgctagccaaaaagctcgaagattttaaggatgatggcaagaaggcatttgacgagccttttatccctccccccggcaagagtggcaaggcacgtccgcccattcgttccattcgcttgccgcaagcacaaggcagcggcctttatgttcgtggcggcctgcctgaagtaggcgaaagcttgagaaccgaggtttattgggataaagaacaaaaacgttatttcttccgccccgtttatcaggcaaacaaccggcagctattcggggtagtgccgaaaccagaaaaatctgatttcctcttcaacctgtacattgatgacccgattgaagtggtgctcaacactggagaagtaattcccggcaatggcaaacctggctactttgtcgtctatgaaggtgacggtcgaatgcgaatcagaacccatgatcgtccagggaaaagcatggagaagaaaaataaaaccggaacatcagatgaaacgcctgaaaacgcaatagctaaagaagaaaatgaggcttcgcaagctggtgataaaactctgtttcgctttcagacaggcagtaaagacagccatatccgggaactgcgactattcaaggtaggcattctgggaggggagccagtagaaatcacagctcctgtaaaacatgacctggcgtagcgtcgtcatctcccgccccgccaagctcaagcgggatcattactcgctcgctatcgagcaggagcggaccgcctgcgtgccgttcgaggacatcgcggtgatcgtgctcaaccaccgcgagatcacgctcacgcatccggtgctctcggcctgcggcgagtacggtatcagcttgttcgccacgggcgacacgcatcacccatgcggcgtgttcctccccttcctgccgcattcgcgcgccacgcgctggctgcgtttgcaactggatttgccacgccccgtcgccaaacaggcctgggcagccatcgtgcgcaagaaaatttccaaccaggccgcctgtttgcggctggcggggcgcgacggcgcagacaggctggattcctacgcacgacgggtgcgctccggcgatgcgggcaatctggaaggccaagccgccttcttctatttcacacaactcttcggcaaagatttccgccgcgaccaggcgcgcttcaccaatgcggcgctggattatggttatgcggtgctgcgcggcaccattgcgcgcgggctggtggcgcatgggctgatgccttccatcgggctgtttcatgccagcgaacagaatgccttcaatctcgcggacgatgtgattgagcctttccggccattggtggatttgttcgtgtacaaaatgattccgcaacccgatggcgaactgcaccccgaagacaaggtggcgctggtgagcctgctcaatgtggatgtgggcatgccgcgcggcaagatgtccgtgctttccgccatcgaacagatgatagaaagccttgcccgcatttacgacggcggcaatgaaacattactcgaaatgcccggcatcatcgggctggaacaacatctgctggagtgctgaaacatgcactccctattgatccggcacgcaaacagtagcgggtcataccggcgaaggccggtatccagtggcgcgcaaagcgcgccgttattgtccatgactggattccgggtcaaacccggaatgacggcgtagcgatgagcacggagacacgacgatttatgcgcctgctcgtgttcttcgatctcccagtcgtcaccaaggcggaacgccgcgcttacaccgtattccgccgcttcctcatcaacgacggctacgacatgatccagttctcggtgtatggccgcatcctgaacggcaatgacgcgctggaaaaacacttcaagcgcctggtggataacctgccaccggaaggctcggtgcgctgcttgtctgtcaccgaaaaacaattcgccagcatgaaactgctggtcggcctgccgctttttcaggaaaaagccatcaagaccaaccaaatgctgctgttttgagccgcttttttaaaagcaaaacgcccatccagccgaggctggacgggcatctgcgagaggcttatggtagctcatccggggtgagagagggagtgattcacgtctgtccatgatggtagctcatccggggtgagagagggagctacaacactaatagataaaaacgtatccagattctcatggtagctcatccggggtgagagagggagctacaacggatcacgagcacgggcttctcgctcttgaatggtagctcatccggggtgagagagggagctacaaccaacggtacgccctacggcacctggactacatggtagctcatccggggtgagagagggagctacaacaacgtaattgtcggcagcacgaatttaccaatggtagctcatccggggtgagagagggagctacaacgcgatgacatgcgcgaaggtttgaccgcagatggtagctcatccggggtgagagagggagctacaacctcgctacatacacatcgtcgtgctgtactatggtagctcatccggggtgagagagggagctacaaccaccgcgatggtttgcactctctccgacttatggtagctcatccggggtgagagagggagctacaacgagcctgggtcagttttgcggccgccgcgtatggtagctcatccggggtgagagagggagctacaaccgggatcgcacagcaccaacggcggcggcaatggtagctcatccggggtgagagagggagctacaacgtgtccatgtttattttcatcactacaacctcgacttcgccgccatcgcggctgcggccatggtagctcatccggggtgagagagggagctacaacgtgaccggcgtcgacaccgacggtgtgtggatggtagctcatccggggtgagagagggagctacaacgctggcacggacgcccccgcaaggggggcatccgaccagcgtcgcgcttcgcgcagttttgcaaaaatgtcccaaaccacgctcgtttttccccgtgaaaattccggtaacgctttgcttgctaaccgcaagttggaatgcctgttacagagtcggcacgctcatctaagaatccgctcgcattgagcttgccggaatgcgaacgggttcttgcgtttccttgatagtttcatcaggtccagcacgaacggttttcaagttctattcggcggcccggtagccgggcctttgcgggtgcgtcttgacgtcgccgcgctgctggcgcgcgtagtcctcaagctggcgcttggcggcatcgaaggcgtcgcgcaaggccacgtaaacgtcctcgtcatggtcgcgggtggccacgatttcgcgacccggcaagccgatatcaacccgcacgttgaactgcttgccttggcgctggtgcttgtgcggctctcccaccaccacgcggcacgaagtgatgtgatcgtaaaactcgccgagtttctccgctttctcccgtatgcgtttttcgagcgcttccgaggatgcgatgttgcggatggtgatttgcaatggtgtttgcatggttataacccttcccgttcaattccggttaacggcggttcaacgcctcctgattccgttcttttctcttaacgcgaccagtttacacgcaacagatactcatccgggttgtagtgaaacttcagctcgccccggtaagcgcgttgcaatgcctcgcctatgccgatggcgagatgggtatcggtggtgctcaacagcgccccgccattttttgtttcctcggtcgccatgatgcgcttgagcgggtgttccgcctgttcgtgtttttcctcgttgcggacgaggcgcatgatttcatcgcggtgcgcggtaaaaaattcgccctgcaacgtaacgaagccacaggggtaatcgtcgtgtatgcggcggcaggcggggcagcattcctggcgtgcgcctgacggggccttcagccactgccagcgcccttcatgaaaaaccgcaccgcacttcgggcaaactgtcggcccggaaagcttgccctgcgccctgtacggatcgtgtacccgctcctgcaatagcctgtcatggcgctcggggtgaaaattgggtgaagcattctggttgctcatggcgccctccctcaacctggaaaaaccgcgtcttccggtggcagtatttcctgcacccatcgctcgacccgtggcctgagccttttggcgatactgatgcgctcatccatgcaggtcgggctgtgtcagcacgatatgtctcaacaccgcatcagccgggtgtgcggccagcagtttgttgcaattcgaacacaccacgtcaaccggcgccgtgacgaaataatgaaacgtcggttgcgccaagtaaataagcatattccttattcttggccgcatttcccggatgccggctattgtgttacccgggcggagcgctgccacgacccaaacgcgaaacaccacaaaaactccggttcatgccatctgccgggcttacctctataatgccgcaccccgtggccttgcctctcccgtttttcacatgctgttcgcatcgaaacattcccgcccgcgttacaccaacctgcacggctcgtccgatgcgctggcgctggcgcaatttgctcaagagtcaaaatcgccgctggcggtaatcgccgccagtgcgttggaggcacagcggctggtggatgaaatcccgttctttggccccaacctgcgcgtccacttattgccggactgggaaaccttaccctacgaccacttctcgccccaccaggatttgatctccgaacgcctggccacgctgcaccacattcgcagcacccgcgaggggtacaccaaaggtgggcaatccgcctccagcctgcggctgggcggaattgacaccgccggcggggaccccgctgctgcgcagcgaccctcccgcagcaatacgtgcgatgtgattgtggtgccggtcgctaccgcgttgtacccgctgccgccggtggaatatcttgccgcttttacctttttcctcaagcgcggcgaaaagctcgactccgggaaactgcgcgaacagcttgtgctggccggatacacccacgtgcaacaggtgctgacgccgggcgaatactgcgtgcgcggcgggctgattgacctgtttccgatgggcagccccgtaccctaccggttcgatcttttcggcgacgagatcgaaactatttccactttcgacgtggatacgcagcgcactctctatcccgtgccggaaatccgcctgctgcccgcacgcgagtttccgctggacgaacaggggcagtcgcacttccgccagagcttccgcgaacgcttcgagggcgacccttcccggtcgcgcatctacaaggacgtgagcaagggtatcgccccggcggggatcgaatattacctgccgctgttcttcgaacgcaccgcctccctgttcgattatctgcccgcatccaccacgctgtgcctgcaccacgacgtggggggggctatcgccgcctttgccggggatgcggcagcgcgctataacctgctgcgcggcgacccgcagcacccgttgctggagccgcacgaactgttcctgagcgcggaacagttcttcgtgcgggtgaaagagtttgagcggctggatgtcgtcgtcaacaatcagtcaaccattcgccttgagcctgatgaaactactggtgaaactactagccatcccaccaagcaaccaataaacggtaaccaagccgctggttatcagcacgaacggcttgatggagaacggccggaaagcacacctaaaaaccttaccccctgccacaccgcccccttgcccggcattgccatcaaccgccgcgccgaaatccccacgcaggcgttccatgattttttgcgcaactatgagggccgcgtgctgctgctcgccgacagcctgggccgccgcgagatcatttccggctacctgaaggaatacgctctcgcgcccgccccgtgcgaaagctacgccgcattccttggcggcagcgagaaattcatgctcggcgtcgccgcgctgcaaaacggcttcatcctctccggcgaacgtgtcgcggttgttaccgaaaccgaactctatgcctcgcagccccgccgcaccgggcgcacatcgaagaaaagtaacgtggaagccatgttgcgcgatctgtcggaactcaaagtcggcgatccggtcgtgcacgaacaacacggcatcgcgcgttatcgggggttggtcaacctcgacttcggcgaaggcgagaacgagtttctgctgctggaatatgccgatgccgacaagctgtacgtgccggtggcccagttgcacctgatcggccgctacagcggcggcgcaccggaggcggcacccttgcacaaactgggcagcggcacatgggacaaggccaagcgccgcgccatgcaacaggtgcgcgacaccgccgccgagctgctcaacctgtacgcccagcgcgccttgcgccagggtcacgcattcaggctcgaccaccatgactacgaggcgttctgtgccggattcggcttcgaggaaacgccggaccaggccgccgccatcgaggcggtgctggttgacctcaagtgcggcaagccgatggatcggctgatctgcggcgatgtcggcttcggcaaaaccgaggtcgcgctgcgggccgctttcgtcgcggtagcggacggcaagcaggtggcggtactggcgcccaccacgttgctggccgggcaacactttcagaatttctccacccgctttgccgactggccggtaaagatcgccgagctgtcgcgcttccgcaccggcaaggaacaggcgcagtcgctgaaagagatgggcgaaggcaagctcgacatcatcatcggcacgcacaagctgatccagaagggcgttaagttccacaacctggggttggtgattattgatgaagagcaccgcttcggggtgcagcagaaagagcggctgaaggcattgcgcgcggaagtggacgtactgacgctaaccgccacgccgatcccgcgcacgctggcgatgtcgctcgaagggctgcgcgacttctcggtgatcgccaccgcaccgcaacgccgcctttcgatcaaaacctttgtggccaacaccagccagggcgtgatccgcgaagccgtgctgcgcgagctcaagcgcggcgggcaggtatatttcctgcacaacgaggtggataccatcaccaacatgctggaaaagctggaggcactgttgccggaggcgcgcatccgcgtggcgcacggccagatgaacgagcgcgagctggaagcggtgatgcgcgatttcacccaccagcacttcaacctgctgctgtgttccaccatcatcgaaaccggcatagacgtgcccaccgccaacactatcctgatcaaccgcgccgaccgcttcggcctcgcgcagttgcaccagttgcgcggccgcgtcgggcgctcgcaccaccaggcttatgcgtatctgctggtggataacaaggaaggcctcacggcgcaggcgaaaaaacgcctcgaagcgatccaggcgatggagcagctcggcagcggttttttcctcgccatgcacgatctcgaaattcgcggcgcgggcgaggtgctgggcgaatcgcagagcggcgaaatgctggaaatcggcttctcgctctacaacgacatgctttccgccgccatcgcctcgctcaaacagggcaaggaaccggacatggcgcacccgctcggcgtcaccaccgagatcaacctgcacacgcccgcgctgctgcccgacgattactgcgacgacatccaccagcggctggtgctgtacaagcgcatggccaactgcaacacggcggaggaactggatgaaatgcaccaggagctgatagaccgcttcggcctgttgccgcaagccgcgcaaaccctgctcgactgccaccgcctgcgcattgccgccaaacctctgggcatcaccaaagtggatgcctcatctgaggccatcgtcatccagtttgcgccgaacccgccgatagatccggctaaaatcatcgccctgatccagagcaaacggcacatcaaaatggcggggcaggacaggctgcgggtcgagctgaaatatggggacttgaaacagcgggtgctggcgatcaggaatttctttggggagctggaatagggtgaaattgttttcgcttggctcactaaaccacatgcggtttgcgccgaaacagtggcgagccgaacttcccttaagggcacttctaaaaattcgtcacaccggcgaaagccggtgtccagcctattgaaaatactgggcagaatacacttacaatcaagcaagaagaacgagtattctcgaagttgttgcaagctgcgataatcgtttatccttaagaccgtaattcgagccacaaagaatacgggtcacacggggaagttgcggcactcaccacctggcgcgccttcaccctttggatgagatgcggtttgccagtaattgattagttttcccggtgatttctgtgtgctctatggtcaattaaggttttcaggtttacccttcaacaattgagcgaatatgtatctttaactagtgccgtagcatgagcgactacgaccttctcatccagttcttaaaaattcttaccctattcggtggcgtcagcgccgccttattttttttctggtggaaaaactattcgaggccggttctggcaaccgacaggcgccaaatgaatatgaaagtggagatagatcgccggaaaggcgagcgccggagacaaccccgacgtatggcgtacccggcgtaaatcgctcgggaaacacgagcgcgctcccgaatcaaaaatgggaaatctgccattggcaactcccctcccatacgggtatccgtttcctgccagcgacatcatccgccggataattgccaacagaccctagctttttttctggttttcatcgtaggggtagcgcacatgcccaaagcgaaccatgaacaccgccagggtcagcagcaagatcgagcaagataccgccagcatgcgccatacatccatctctttcatatcgagcaccagataccgcgccagcgccaccatgccgatgtaaagagggaagcgaaccggcattttgccggtgctgtaatgcaagcccaccatggctaaaacttccatgtaaagaaacatcatcagcaggtcggcaagcgaaacgttccttgcgctcaacatggatagaacctcattgagcatggcggatacggtggcaatggcgatcaccagcagcccgatattttcaacgaacgaaagcagccgcatgtttacgtgtttgatttgattcatcatgttagtttgcttccaaaaaactatcttgttggtcactgatccggcacaaatcaaaaagcggttccgttcgacctaaacttgccgaaggccctgaatccgcaaatacgtggcgtggcaataggctgcgcaccccgcaaataaaacctacacctgcgggtgcgccctctccgctccggcgtgcagtttgttcagcgcattaaggtatgccttggccgaagccaccacgatgtcggtatccgcgccttggccgttcaccactcgcccgcccctggacagccgcaccgttacttcgccttgcgcatcggtgccgctggtaatgttgttcaccgaatacagcagcaattctgtcccgctctgcgcgacctggtctatggccttgagcgtggcgtccaccgggccgccgcccttcgcttccgcgatgcgctccttcccgtccacgctgagcaccaccctggcagaaggcgcttcgccggtttccgaatgggcgcgcatggacaccagacggtaatgctcgctgacatgcgccacggtttcctcgttgaccagcgcctgcaagtcctcgtcaaaaatctccgacttgcggtcggccagatccttgaaatgcgcgaaggcggtattcagcgcttcctcgctttccagcacgatgccgagctcatgcaagcgagagcggaaagcgttgcgcccggaaagcttgcccaaagtgagcttgtttgtgctccagcccacgtcctctgcgcgcatgatttcataagtttcgcggtgcttgatcacgccatcctggtggatgccggactcgtgcgcaaaagcgttcgcgccgacgatggccttgtttggctgcaccgggtagccggtgatgctggataccagcttggaagtcggcacgatctgcgtggtgtctatgcgcatcaactgcctgatgcgctcgccccacaaggccgggatgctgtagccgaccgtatccggcacattgagcgttttcgccccggcctggatcaccgcatcaaatacgcgcaccagaaaatccatctccgagcgcaccgcgtcttcggcggaaaattccacgtcatcggtatattccagcgcgagcttcaccgccttgactgcgttctcgacaacctggtccggcgtcatgcgcagcttcttttccatgtggatgggcgaagtggcgatgaaggtgtggatgcgcccggatttcgccggtttgatcgcctcgcctgccgcgcgcacatcgcgctcgttcgcccgcgccagcgaacacacggtggaatgctcgatgattcttgcgatggcctgtatcgcgcc

SEQ ID NO: 842 - DNA, 23219 bp, synthetic construct
  source 1..23219: mol_type = other DNA
  misc_feature 1..23219: note = Synthetic
acgacagcgtatttgtttttaacggtactacatcgggggtacgagtacctgatttaaactggattgacaatgaccgtgacggccttactatttgtgacgccacttcggcggttttttctcaatccattgactttaatcgattggatgttgccacctggtcgtggcaaaaagcacttggcggagaggccgctcacggtatgattgtcttgtcaccgcgtgctgtaaatcgtttggaaagttatacacccacttggccaatgccaaaaattttcacactgaccaaaaacggtaaactcaatcgggatatttttctcggttcaaccatcaatacgccgtccatgttgtgtgttgaagacgccatcgacgctatgaaatggttgcagtccatcggcggacaagccggtgctcaggccattagcgacgaaaacttggcgattataagcgactgggtcgccaaaacgagctggattgattttttggcaaggctgccggaaactcgttccaatacatcaatctgtttaagcattaccgataagcgttttaccaccttatctgacagtgaacaacgcgataaaatcaaatcactatgcactttgctcgaaagtgaaaacgcagcctatgatatcaatgcctataaagccgccccgccggggttgcggatttgggccggcgctaccattgagcccaaaaatgttgctgcactgctaccgtggatagagtgggcatttagaaaagtcatctaagcaaattatgtaataccgcctgtaagaaccggttgccttattgtctttcgttaacattaaattaaccgacgtgactatagaggcaacattgcgttgcctaaagaaatacttcgtactcctcgggcgatattgacacgatcatttcaacctcggttgtggtgagatactgctttgacaaagcggcttttagcattgccttgttaaagccaatcacactctcagtggtcagataatcatcgacatgcatccactgggcaatgccaatttcttcgggacacggtgcaatggctgtacttaatgccgttaaatgacacagaaagtaaaagtccgaagtcccaaactgacctttgtgatagtggcgaaaaccgacaataccgttaaattttcctcgtatgcctgtttcttcgtaaacttcgcgaacaaccgcatctcttaacatttcgtggcgatcgaccgctccgcccggaaacttaaaatgtcccggtcgtctttgcatatcgtgcttttcaaccactgtcagcacttgcccactattgttaaagactatgccgccaacaccaattcggtgattggcaaattccgggataacagcatctgtctgtaagcgcctagtcagcaccaatgacttaccatctgtatgagagacgtgatgaaaatcaaaaccctgctttacggcaatcgcaataagtgacgacagatatgacggtattgtcaaccaaacaacctttataccttgttgttgccaaacctgcaaagaatagtacagccgttgtgagaaaacggccggttctgccggtaattttggcgtcacccagcaccctctgtaacgattgattttagctgctaataccgtcatcagttcacttccaataacgatcaatcaccacaatcttcaatgacatcttccagtacattttgattcatttctttgtacgaattatcatctttgggctgccctactttgaccgccggcacgccgacaactgtcgttcggccttcaacattactgagcacgacactgccggcaccgactttagcgccctcacctatttcgatattgcccaagatttttgcccccgaaccgatcatgacattgcgacgtaccttcggatggcggtcaccaccctctttccccgtaccgcccaaggttacgccctgtaaaatagaaacattatcttcaataaccgccgtttcaccgacaacaatacccgttgcgtggtcaaacatcactccctgaccaatacgcgctgccggatgaatatcgacaccacaaacggttgaattgcgactttgaatatacagagaaagattttggcgattgttgtgccacaagaaatgagcaacacggtgcacctgaagagcatggaaaccctttaaataaagcaaaacagtcaaatattcattaacggcaggatcacgttcgacgacggccatcatgtccatggcggctttgcaaacaatatcgcgtgttgtttgataagcctctaaaaacaactcatacaatgtcattgccggcataacaccatcggccaatttattcgatagaataaaggccaatgccgcatccaaatgacggtgttttagcacacaggcgtgggcaaaactggcaagcagcggttcttctaataacagctgttcggcttcttgacgaagcgacgcccaaacacgctcggtcgtttgttgacaatattccggcgtcaatggtttttccatcttttctttcctcatcattcggggttttctattatagtcgtgccaagaatttttcgatacaaggcgcatattctcagacagtatgcctaagtacggcaagaagatacaacgctgtaacaaaaaatttctggtatgtccatatagtgagatagttcaaacaaaaaagcctgagcaacccttcagtgtcacccaagctttatcagccaatggccaattcacagaacactttgatcaacttatagagcagttcaattttcagcctgtccagcaattatacctacttgagcaccgctcaacaaagcaattgatctgtgtagattagttttacaaagctttcttgccagttagcgaaccggtgcggcatacatgataccgcctttattccatagacgatttaagccacgaggaatttttaagtgagaatctttaccaacgtatttatcaaaaatttcaccgtaattacccgccgccttgatttggttagcacaccagtcgttgcttaaacccaacgccttttcacccagatcaccttcgacacctaataaccgtttgatttttggatcgttggattttttcatctcatcaacattggccattgtgacgcccaactcttccgcatcaactgaacagttacgcgaccagcgagcaatatcggcaaatttatcatcaccttcacgtacggcaatagccagcggttcctttgaaataatctcgggcaaaataatatgctcttcagggtttttcatgcgagaacgctgaacggccaaaccggaagtatctgatgaatagacatcgcagcgaccggcttcataggctgctttgacttcgtctgatttctcaaaaataacgggtttaaattccatattatgagaattaaaatagtccgccatattggtctcggtactggttcccgtatttgaacaaacggcggcgccgcttaattccagggcgcttttaacacctagatctttgcgtaccataaaaccctgtccgtcgtagtagttaacgccgacaaaattaatccccaaaccgtcacgcgacagcgtttccgtcgtcacgcgggcaagcacatctatctcccccgattgtaatgccgtaaagcgttgcttggaagacaacggtacatattcaaccttcgagccgtcaccaaaaattgcagccgccagaccgcgacaatactctgcgtccaatccatgccactcgtttttatcatccggggcagcaaaaccggggagtgactgtacaacaccgcatttaatcaccccattcttttttaccgcatccagattttcaccggcactcactgtcgctaccgcagtcattaataaggccgaaattaatatcctcttcatttaacgctcctaacttgttagacaatacactctttgccatactactcatatttatattttatacaagaattttctcggtatttttgtcggcagatacttctacaaccgacaacattattaccgctaatatgctatactggggttgggtagcctcgctcttcaccgggctatcagatctacaaaattgttcaccaagtagggaggaaactacgatgaaatatgagcatgtgttattcgttaccgatttgaataaggatagccaaattgttgctgacaaggtcaatgaggttctttccgcttgtgatgatgccaaactgtccgttatccacattatcctggacaatatcattgccggcggatacgagattatgcctttgtttaattatgctgatgataaggaaaatcttcaggaaaacgctcaggcattaaaaacgttcttgaaagatacaaccctgcacgccgatattaccgacgtcgttcctgccctgtcaacggccgggggcatttcagattatgccgaggaacacgatgttgacttaattgtcattggattacatagaaaaacaggactgcttaatacgttgctgggcaatacggcaacttctgttttgaacagcgccaaatgcgatgttctttcagtattgatccctgaaagccgtaactaaccgcgattgcccgctttcaacgacggaaagtgcgggtgttgcgtgatttaaaagtagcttttgtccatagcttttagtcgtgcctgctcgtaatcgaccacacccttttggcacagtttgagtaggtgctgatccagtgtttgcatgccgtggcttcgccctgtttggataagtgaatatatttgtgcggctttgtcttcgcgaattaggtttttaatcgcgggtgtagcgatcatgacttcccatgccgctgtttggccgtctttcccctttgctttttttactaaagtttgggcaacaacggcacgcagggattcagacagtattgaacgaactagctcaacttcctccccgggaaagatatcgataattcgatcgactgtcttacttgcggaggcggtgtgtaatgtcgccaagacaagatgccccgtttctgccgccgtcagagctaatcgcaccgtttcaaggtcgcgcatctcgccgaccataataatgtcggggtcttcgcgcagccccgaacgcagggcgtcggcgaatgacagggtatcgcggtatacctcgcgctgattaatcagcgagtatttggattgatgaacaaattctatagggtcttcaatagtgaggatgtgctgccttttattttcgttcaagtaatcaatcatcgccgccaatgtcgttgacttacccgaacccgtggggcctgtaacaataatcaaaccgttcggtgcttgtaagatttccttgaacaccttggggctgtctattgttttcagtgtcggttttacgttggagataatgcgaaaagcggcacttatgccacggtgctgataaaaaacattgactctaaagcgggcaatatcccttaacaccagtgcaaaatcaatttcccgtcgttggcgtaattgcttgagctgttcttccgttaagatatcatcaatcagtttactgacataaagcgcatcaaaaacgggaagcttaatgcgcttcatttcaccgtcaacgcggatcatcggaggcagtccggcactaatatgcagatcagatgcacgtttctcaacggcaaattttaataattcgtctaacttcatggttagtttatctggtaaactcgacgtaatcgaatggttaacaattattcatccagcgtttataatactcgacttgacccagaatcgcacgtataacttgttcgttgccaaataatttaatcgcatcactacttttttctaactttctattttttcatgataaaagacaacttagcagacgtttatcaacaaattgaacgggcttgtaagcaagccaatcgcagcgctgacagcgtaaaattgattgcggtcagtaaaaaacacggcgttgcaaaaattcgtacagcctacgcgttgggccaacgcgattttggggaaaattatcttaatgaagccctggaaaaacaagcacagctaaacgatttatcaattcattggcactttatcggccatattcaatcgaacaaaacacgcaaaattgccgaacatttcgattgggtacacacagtcgatagtttaaaaattgcaagaagactttcaacacaacgcccaccgaatctagcaccaatcaacatctgcctacaaattaatatcgataatgaagacagcaaatcgggtttagcagaagatattgatcatctattatcgttggcaaaaagcattgccgaattaccccacatcaaactgcgcggtttgatgtgtattcccaaacccaaggccgacaaacagcaagaaatagatacattttctcgaatgaaagcattgcaacgcgttttaaatgacaacggtgttcgtgtagataccttatcaatgggtatgagtgatgatttacagtcggcgattgaatgcggagcaactattgtccgcgtgggaacggcaatttttggaaaaaggatgtaacaccgacaacgtgttaaagaacattactggcacaccatgaaaaatcacgtcaataacagagaccgtctgatcacccactcaacccgaggacaataggactaatgaccacttatcaatacgcttttatcggtgccggcaatatggccaaaggcattatcggtggcatgattcatgccggtactcaagcgaaaaccattattgccagcactcagacggcccaatcggggcaacaattgacagagcagttaggtgtcattaacacacagaataataatgactgtttatcggctgatgtcatcgtcctggcggtaaaacctcaaatacttcccgctgtattgacgcagctagataagccaaagatggtcggaaaattgataattaccgtcattgcgggaattccctgccgagcttatcaaaaacaccttggccaatcaattcgtctggtcagaacaatgcccaacatgccggcaaaaatcggcctcggcatgaccggactttatgcgataaattgcagtgaaacagacagacacagcgccgatagtatcatgcgctgtgtcggaaaaaccttatggttggaggatgaaagtcacattgattatgtcaacgccatctcgggttcgggacctgcttatttttatcgttttattcaccatctggccgaagccggtgaaaagttggggctcagttatcaagaggcactgacactggcaatacaaaccgcaataggtagcgccaagtttgccgaacaacagaatgacggcacgcccgattccatgaaaaatctaatcaaacaaatcacttcaaaaggcggtacgactttcgctgccatgcagtcatttgacaaatcagattttgccaccataattgaccaagcagtagaggattgttatcaacgcgccgttgagctcggtcaataacaaacgtagaaaccccatactaacgactaactaaacttatgaatagcatttttcttttaaaaacactattaatcatcatgcaagtgatatttattggccgatttcacttggaactatccaatatcaacgggtttattgagcctgtcagcaccattcgaaagttgaccaacccgctggttatgccaattaaaaaattgttgccggcaaccgttaaaaaattttcagccattattattgcctatgtcactacttttattgtcttaataatttttatccccaatgttgccgtgcaaaatatattgatttgggcacttattatgttcgtgggtacgtggattagttttttacaatacggtatgtttttgtttgttatcggatcctgggtccaaataccggcgttacagcgcatcaattatttgctgtacggcatttttgagcccatgttgcgacccattcagagaatcctcccgagttttggcggacttgacttttcgccgattgtgtttttgcttttactttccgttgcatccagtgcattttcacaacttgtcagtcgtattttctactgatttaacaaaaccattactatgaaatacccggaacagtttgatgttatcgttgttggtggcggacatgcaggcaccgaagccgcagctgcggccgctcgcatgggggcaaaaacgctgttgttgacgcagaatctggaaaccgttggcatgatgagctgcaaccccgctatcggcggtatcggtaaaggacacctggttaaagaaattgatgcaatggacggattgatggcaaaggccgccgaccgcgccggcattcaatttcgcaccctaaattcgcgcaaaggtcctgcggtgcgcgccactcgtgcccaagccgaccgcaatctttaccgcaccgccattcgccaactgctagacaatcaggaaaatttacaactgtttcagtcgatggtgaacaatttggtcatcgacaatcatcgcgttgtcggtgtcgatacccagcaccaagtgcgttttatgggaaaaaccgtaatcattactgccggaacatttttaggcggcaaaatccacgttggactgaatcattaccaaggtggacgcgccggtgacgatgcttcgttgacactggccgacaatttgcgcgatctaccgtttcaggttgagcgcttaaaaaccggaacaccgccgcgactggatgccaaaaccattgattttagccgctgccaagaacaaccgggggacaaaccgcgccccatcttttcttttatgggcagtcacgccgaccaaccgcgccaaatttcctgttggattacccataccaatgaaaaaacgcacgacatcattcgcgcgggactggacgaatcaccgctttacacaggggttattgacggcgtaggaccgcgttactgtccgtctatcgaagacaaaatcgtacgttttgccgacaaaacttcgcaccaagtatttttggagcccgaaagcctgaccaatagggaaatttatcccaacggtatttccactagtttgtcatttgaaacacaaattaactatgtacgcagtatgaagggattggaaaatgccgttataacgcgtccgggatacgctattgagtacgacttttttaatccacaggatttacacaatagcctagaaactaaatcgatagaaaacttgtttttcgccggacaaatcaacggtacgaccggctacgaagaggctggtgctcagggtttgttagccggtatcaatgccgtgctgaaagttcgtgggcagccgagttggtttccaaggcgcgatattgcctacattggcgttatggttgacgatttgatcacgcaaggaaccaaagagccgtatcgcatgttcaccagccgtgccgagtatcgtttgttattgcgcgaagacaacgccgaccaacgcctaacggaagtcgcttatcgcatgggattggtcagtgatgggcgctaccgccgttactgcgaaaagatggaacagattgaaaaaagcaaagcggtattgcgcggcatatggatacagcccgacatgattggcgacgataccgatattcaaatcgcccgcgaagccaacgcctacgatctgctaaaacgccccgaagtgccgtacagcgaattggaaaaagttgccgtgattgatgccgatatccccgatgtggtcaaagggcaactcgaagttgaaatcaaatacgaaggctatcttaaacgccaacaaggcgaaatcgacaaacaaaaacgccaagaggccaaacgcattcccgcgtcctttgactaccaaggtgtcaaaggcctgtcggctgaggtgacggaaaaacttgaccgcatccgcccgcaaactatcggacaggcaagccgcgtaccgggcgtgacgccggcggcaatttcattaattttagtgtatttaaagaagcacggcaagcaatccaaaatatagcagccgccccctaaactaagaacaaagacaatctattcaattggttatcagcaataaaaaattaagagtggctttaaaatgagaaacggcacaccgtagtgtgccgtttaattttttggatttagtcacaaggacaatcaccttgttaacgataataaacccagttcttttaaagtgctgaccatgataatataccagccataaataatcaacaggaaaatctgaaatgactaaaacattcaactatcgcttgggatttgatttaggctatacctcgctcggttgggcgtgtatcttactggacgaagataatcgtccttgtggtgttcacgattttggcgtacgcattttcccttcggggcgtgatgacaaaagcaaagcccccacctcaaccgagcgccgagaaaaacgtggagcaagacgtaaccgtgatagatacttaaagcggcgaaaagccctgttaacgtacatgattcaaattggcttgcaacccaaaactaaaaatgagcgcaagcaattggctgaaattgaaccccttgcactacgagccaagggtgtcagtgaacagttaacgttacacgaattgggacgcgcattatttcatctcaatcaacgccgtggctttaagtcaaatcgtattgccgagcgcagcggtaacgaagatgagtcgggcttaaaaaaaggcattagcacactggctaagcagcttaaagaaaatcagcaaactttggggcaatacttatttaagcgtttgaaaaatgaacaaagtacccgtctaaaagcggggaataatgccgaagaacgttggacttcacggcaaatggtcgaaaacgagttttggactttactcaagcaacaacaaggttatcatcccgatgtgttgaccgataatgtaattaatcacttgcatgatattattttctatcagcgtcatttaaaaccacaacaagcaggactttgtaccttgattgatggtgaagaacgtgcgcgattggcttatcctcaaacacagctattccgtattctacaagaagtcaataacctagaaaccattaaagaaacatcacatacaccaagcattacacaagcaatgcgaaataaactggtacagtatctgacagaggattttagcaaactacgcaaagacggcatattaagttggtcaaaaatagaaacgattatcggcgtcaaaaatgtgaaattcaacctggactgtttgggtcgtaagggattacaagctgatatcacaacgcgagaaatgttaaatcacgtcccggattggtggggaagtttaacagttgagcagcaaagacaagcgattgatgaaatacagtctgcccaaaccgacgaggacttaaaacagcgtataggagaaattgatgttaaaacgccggttgaggtattggaaaagctcaaccatattcatttggttgatggttacgggcgtatctcggtcaaagcgatagaggcaatactaccgcatctacagcagggacaagtttatagtgatgcttgccagtccgcgggatttaatcatagtgacgattatgatggcagtgtattccctgacggtaatttacctttttatggtgaggttttaccgaagcaagtcattggtggaacgtatgcaccaaaagataaagccaatcctgagaattactacggcaaaattaataatccaaccgtacatatggcactcaaccagttccgtttggtacttaatgagttggttaaagaatatggctgcccaccccgtgaaatttatttggaaatggctagggaaacggccttatctgccaaagagctaggcaaactcaatagcgagcatacaaaaaatcgcaaaaccaacgaagcgatcaataaagaactggaaaaactgagcattgctcagacctatactaaccggatgaagtataagttatgggaagatttggatattgatccaacgggacgatgttgccctttgagcggaaaaaccattagtcttgatgagctgttctctccgcaagtcgaagtggagcatattattcctttctctcgtagttttgacgatagccgcaacaacaaaatggtttgctataagtcggccaatcaaaccaagggcaatcaaacaccttacgaagtttttgggcaaacgcctgaatggaaacatattctggcacgggcaaaaaaaatggcaaaaggcgccaaacatgcccgtaactttaacgtcaataaatactggcggtttttaccggatgccatggagcagatgcaaggagacgaaggcagttttcttgccagacagctgaatgacaccaagtatatgtcgcgtatggcgagacgttatgcagaatttgtcacggggaaatacccgggtgaacgccgcgttcatgcgatcaaaggcaaattcacctcggatctgcgacaccattgggagttagatgaactggtcggtgattttaaagacgggaaatttaccaaagaccgtaccaaccatcaccatcacgccattgatgccattgttatcggcttaagtgaccccggtgctattcaaaaattagccaaagccaataaaaatgcacgtattatggcatcgagtaaagtgtatatagatgttccgccaccgtatggcggcttttccactcgaccgattaaagagcgattgaaaacattggttatttcccataaacttgaccataaaaatcctgaaaaagcgcgtcgatctggcacaagtatcgggcaactacacgaagatactaactacggacacgtgtgtaagaatctttatgcgacgcgaaaaccgttatcagtagataattttgcttcacaaaagcatattggcgagattgccagccccaatattcgtgaggccgtcggtgatatttttgcacgctatgccgatatcaaaggcaaattaaagtctgcttataagaaagactattttgacgcattagaaagttataaatcatcaaataacattaaaaaagtgcgcatacatttacataaggacaaccttattcccatccatgatagagccggtaaagcttatcgtcatgtcatcggtggcaacaatttttgtgctgaaatttgggtcaacgacaaaggcaaaaaggcaggcaaatggcagtgcgaagtaattcgcaattttgatattaatcaaaagggttttatgcccagatggcgaaccgaaaatccaacggcaatgaaagtaatgcgcctacaaatcaatgatatggttgccattgatagaaacggcaaacgagtcatttgtcgagtgcagaagatggcaatgagcggacaaattattttgcgttatcacaatgatagtacaactgagaaaaagactgaaatttctgttgcaggttcatcattacaaaaacaaaatgcccgtaaaatttttgtttccccaacgggaaaaatatatgatccgggacatgctaaacgtccgaaatggaataaataggttttgtcacaatgccggtattagagattagcgaattgggttgtcatttggccacttttcgcggctttattaccctatcggctaggggggaagagataaaacgccttccctttgaacacgtcagcgccattatcaccaaagcccacggcattacctacacccagaatttattggtcaaattggcaaagcacaacatccctgtagtaattactgatagctctttgatgccggtatcgatgattttaccgatagggacacaccatgccacagcaaaacatttatcggcacaagttgccgttaagatggcccagaaaaatttgctgtggcaaaaactgattcaatctaaaattagatggcaagcggctgttttagattatcttcgcatcacacatcatctacatatattggtcaaacaagttaatagcggtgatacacgcaatattgaagcccaagcagccagaaaatactgggagaaactgtttggtcagcagtttcgccgtgaacgtgaaggctttacccccaatgaaatgctcaactacggctacaccatttttcgctcagcactggcacggcaaatttgtgcaacaggtttacatccggcactgggcattcatcacaaacacccactgaatacattttgtctgatagatgatctaattgagccatttagacccttgatcgacctatgcgtcgcaaattgtttgagccttggcttacacgaactagacaatacggtaaaggcattgttagttggacagttggaacaaaccgtccgggtgggcacaaaatgggtgagtgctgaagatagcatgagattgttagcgcaaagcttatctaaagcttatcttaatgaaaatactgcattaaaattacccaaagcaaacttgacgcggtgccggtttgaagtagaataagcccccctaattaaaataattaacggagtgttaaaatgaaacgctcgggatttagaatgatgtggatggttgttatgttcgatttacccacactggatgaagcagatagaaaaaaggccaatcgctttcgtaactttttaaaggacaacggctttgaaatgtcgcagttatccgtctattttaagtttattggcgtcagggaaaacagtaaacgaatcgttcgactgattgaaaataatacgccaacaggcaaagtgagcatcctattttttaccgacaaacaattttctgaaatcatctgcattcataataatcaaatcgaaagaatgccggaaaaaccacagcaattgctattattttagtaaaaccagataagggaaatgacggtatctctctgtaatattgaaagaataccgtccttattttactttaaaagaacttggtttaaaaccacaataaagcctcagcatttcagggagttatcaaatagctatttaattgtatgaagaatccactttttcttgtgctcttttaacatcttcatctgtaaaaccatcagggcgaacaccccatttaaatttggcaatgtgctcatccatttcaatttctgttttttttatgtattcaacccaatcgtcatagttatcaaagcccatccccttagcggaggccaattgtttttccatcggcaaatccaataagcctatcatgccgttggcttgattttctaccaattctttccacatatcaaagggcatcccggcacgcttagctttagccttttgagcgtctaaaggaagtgcgagtaactctttagcaaccgcaatatctttttctcttgtcattgttcacgtaactctatgtttaaatcaccattttcatcagttttcagttgtcaccaccaatgcaaaaatgctccgctaacaccaaatttacagaaacaacggtacactggttctatgtgtcaaacttttgtgatgtttggctgtcagattctttcgtagcataatcatctacattaatacgccaagccataatccagaaaataataatccagactacattaaagccaataacaagccctttaagcatactgactaccttgtagatttcgtcttcaattgaataagccagacgcaacacgcgagcattttcgttgcttatcagaccgtgtttttcacatgcgtcttcaattgcgtcataggagtcatcttcctctgttgccacagccaccttgaaatcggtattaaatagcaatgatggtggacttgttctgtcacttgtataacgaacggtttcaacgaaaacagcccaagcgggaacgggcttatcctcagtccagtcaggtgaaactaaaggcactgcataagtgaaaatatagcttatggagccatcttcgtcgtccgtgtacattatttcacccatgtactcactacgaacagtggcatcggtaaatacaaaggcgacggcatcttgatgttgaggagccatgttcaccggaattccctctataattttaccggaagccagaacattatgctccactgctaaatacgagaccgatattcccagcattgccgtgaaaataaaaagcgtgattaagcgaatactgtacacgccggagagtatagcaatgggtatgcaggaaaggataaggacaactacactaagcgtaagactgatatatacgcctatcaaaccagataatgccgccatgccgttagccaccagtaaaccaataagcagttcttttataatggctatatagtctctgccatttggtttcttatcaattcttttatcggactgctttttattgtcctttctattgccttttttactgtctttactagacatggtttatcaaattattgagatttcgcactaacaaacatttcaatagaatataggattactatttaaaaatgcagtataatagttttatttaataacattacttttactgccttggtagtctcccattctactttaaaagaacttggtttaaaaccgcaactttttaactttgggttgacaccgcaactttttaatcttctatccgagtaacatataaattaaagtgttaacggttaacttttatttgatacgacaatttgatatttgactacgctatggttagttggcaaaaattttattcttatccggttaataatggagtattattcgtggtattaaaatttttatgcagagaagacgcgtatgatctctttttctataactgattggctgtattggggtgatatattttgttgtcaaagcaatatcgaaccaattgccaaaagacaacccgatttaagtaatattcctgccatccaaagaagacgtctgcccctggttgccagacgcattaatcagtttgtactgacagcaaaaaaagaaaatatccccacggtttattttccccaacagggagaaatctcacagacattggccatcattcgtagttatgagaatgaggtttcaccggcgaaatttagcttgtccgtgcacaatgccattgcgggcatactttctgtcattcatcaaaacaaacaaagttatcaagtaattgacagtttatccggtggcatagaaatggccatcgtcgaggcagttagtttgttgtcacagcataaacgcgtcaatgtggtctattatgatgaagccttgccgcaagactttcgtgttttttaccaagatggacattccggtgaactgccatcaacaatggtactcggattaacgatttgtcaagggaatgaccttacgctaacaaaacaaaaaacaacgcccgccaacaagtaccaactatccactgatttttctgccgttcaacaagttgccgatttcattcgccatgctgaaggaagaatcttaaacaatcactatgccagctgctattggcaatggaaacgtaatggcaatcaagagaagacttaactatattcagcgattaattgcaactgcaatctgttactcagcttttggtcttggtggtttattgatctatgcgcaatatcctgttttaggattgttgccgatatccattgataaaaaacgtcattacggcaggcgtttgattcattacaatttccgtgtttttatcggattaatgcaccgattaggcatttttacctatgaagtacacggtatcgacaaattaaaagcccctggacagttaattgtcgccaatcaccctactttaatcgatgttgtttttttgctgtcttttattcctgaaaccaattgtatcgtccgtcatggactgagcaaaaatctatttaccagaggtccgataaaaacagcaggctatattgtcaacaaagatccagagcagtttattatcgattgtacggatactttacgacaaggccattctttgatgattttccccgaaggaacacggacaagacccaacgccccgatgacgtttaaaaaaggcacggccaacattgccttgcgggctgcagcagccgtgcgtcctgtaatcattacctgcaacccaccgatgctgcaaaagggtatgaaatggtacaagatccctcaaacccgaccgcattttattatccgagttgaagaatcatttgatataactcgttatctaaacaaggaaaaaacgataggcatccagtctcgcaggctgacgcaagatttattacactattttcaacaaaaactcgaaaaagacaactaaacatatagggtattattttgatataatccctttcttacgtcatttgatgacatattactcgggggtctcttggaaaacttacaacaagaaataaagcaattaattattgatgcactgtctttagaagatattacggctgatgatatagatgcccaagcaccactctttggtgagggcttgggtttggattcaattgatgcactggagttaggtgtggcaattaaacagcaatatcatatcaatattaaaggtaaagatgaaaataccatcaaaaaacatttttactcagtgaaaactttggcaaattatataggtggctattcagcacaagggaatagaaatgaataaagaagagatttttctcaaattacaaaatattatggctgatttattcgaaattgatcctgaaaaaatcaccctagaagccaatttatacgaagatttagacatcgacagcatcgatgcggttgacttggcaattgaagttcgcgacttgacaggtaggggtattaatccggacgattttaagaaagtgcgtactgtcgctgatttggttgatgcagctaaagatatccttgatagctaatgcttgttgccatacctatccccaaaaattaatatataaaactcgtcgtccatttggacaagaacccttaaattgtatgctattaaaaattcgctaacacagggtattaaacggtctgtttgaatttggcaacggtggattgctattgtcctattactctctgtcacgtacttaaatgacgattcaaaaaatatttagtattttctcaaccactctgtctatcgcttatccatttatcgtttggctgatctttactcgccctgacatggcgaaagcgtttgcttgggtcttgctgacaacaggggttattcgcctagcgcttgcccactatctctcaactgaaaaaccggcgataataccattggtgttgtcgtatgtattgagtatatcaatgatattgattggtggctgggtaataaagtttggtacagctatcgcattccagatttatccactgttgattaatatcggcttgtttactattttttcttattcgctcagaagcgagcaatccattattgagcgttttgctctattgtacgaaaaaaatatcactaccactaaacgcgcctatatgagaaacatcacacgaatatggtgtctgttttttgttattaactttttcatttccgcatttacatggttggcaatgagcacaacggcctgggcaatttacaatggtattgtcagctatgtactaataggtgttttactgaccggcgaatacctttaccgccgctggatattttaccccaaaaacaagaatagctatgaataacacaattgcccatttagccttttcacagttaaatcaattatggcaagatgaaacccgtgtgtgggcgatcaattccgaggaaaaggtcaccattgccaaactaaaacaacaaacagcccaaaaagtacaggcgctacaaaatacggacagcacacgttgtctgatttatcgccgagaaaaaatggcttttgttagtgattttatggcatgcttaatcgctcaagttgatatcgtattaccggctaatggtcaacccaatactatcgagcaggcgcgcaaagatgctaatgctgataccattttagctgatagtaccagcatgttagcgccagaaagtatcaatacagatataatgtcaagcaccgtcaccgatgtcaatattacggtttttacctcaggatcaaccggtaaacctaaagcgattaccaaacgcttatccgcttatctgctggaagtggaaatgttagaaacactttggggtaaacattttgccagtgccatagtattgtcgtcagtttcacatcaacatatttacggttttatctttggcattttactacctttgaccttttctcatattatttggagtgaacagattacttttgaagagcgcctgcattatctagccggtcaaacaaaaaaatgtgttttcattgccagtccatcgattttagtgcggcttagtgaaacgctagcaaaatcgagtttacaatgtgttttttcctcgggaggtgtactgacgacagagcaggcaaaaaaagtcgaacaacaccttaacgctccgtgtttacgaatctttggcagcagtgaaacggggggaatcgcctggcagaatagccaaagtgacttttggacggcatttccgaatgttataattggcgagcaagacggtttattgttgctgacttcaccctattcgtatcaaagtccgcttgtcgttgccgaccgcattcgctatttagacagtcaacgcttctttctgttgggacgcgccgatgatattgtcaaaataggagaaaaacgtgttgctttaacggcagtcgaacaaaatctggaaaaacacgactgtgtccaaaaagctaaagtcatcgttctacccaagccacgaaactgcttagctgccgtgttggtccttagtcccgaagggaaaaaacaacagcaaatctcaccgcgtatcttttatcaatcgttaagacaatcgctcaaccgacaattcgaaagggcaacattacccaaatatttccgttgtgtcgaagcatttccggaaaatgcacaagggaaaacgcttaaagtcgatttattagctttattttcagaaatattatgaaatataatgaagcgatgcaattgccaacttaccaaataactcaacaacagggaaacactgtcagtgttgacataaacttcccggctgcacacgacttttttaatggccactttgaagcaatggcgttattaccggcggttgcccagctgtttacagcagagcaaattgcccgagcaacctggggagaattatcagggttttgccaactcaaacgggttaaatttcgtgaacctatttttccggatactgggattactctaatactaacgttagataaaaaaagcgactgtacagaattattgttccgttatgaaatggacaagcaattaaaatcgacaggcattttggtttatcggacaaataataatgagtagtttatatcgtccttgtattgttgtgcccttttataatcacgggcaatttgctcataaacttatcaatgagttggcagtgtatcaattgcccgttattattgttgatgacggcagccaaaaagaacatagacaacagctagaagcggcgattagaaataaggatgctgttagtttaaccacgcttaaacataaccaaggcaaaggtaaagccgtaataacaggttttaagcttgcacaacaagcgggttatacacatgtgatacaaattgacgccgattgccaacacgattttagtgtattgcccgattttttaaagatctccaaccaacaccccaatgcacttatttgtggctatccccactacaacgagacggtgccgagatcccgactgtacccacgctatattacgcatttttgggtttgtattaacacattatccaccgccatcaaggattccatgtgtggttttcgctgttatcctctaagcgcgacgttaacaacgattgaccaatgccatattggcttgcgtatggattttgatatcgaaattgtcgtacgtttatattggcaaggcctaccgataatcaatctgcccgttgcggtaatttatcatcaagatgcttcatcgcactttcgtctttggcgtgataatatactaatcagtcgtacgcacgctgtgttattttttggtatgacaaaacgcttgcccacattgttgatgcgcaaatggtggcgtgtatgagttggcagcgacaacaagaacatggcagcgtcttgggcatgcgttttcttatcggtgtttataaattattgggtgcaaagatgtgttgccttatcacttatcccgttttgcgctacttttattggattaatcgcaatgtccgccaggcactgcgagattactatcggcacttgcaacacgtggatgaccaaatcgttgcagcaccatttgccaatattaagcagttcggttttggtataatcgatcgccttagtttatggatgggagattctcgcaggattgccatcgtacgccacaaccatgaggtgctgtatagtcgggcaaaatcaggaaaagggggcattatcttttcttcgcatttgggaaattttgaacttagccgagcggcaggaagagaaaagttaccggctgttataaatgttattgtcgactatgaaaatgcgaaaaaaattaatgcgaccatgaaggcggttaataatgattttatggcaaacattatccccgtcgaacacattgatataacattagccatacagttaaaggaaaaaattgatgacggtgaatttattgttatcgctgccgaccgcactaatcaaaagagtgctgaacacagtctgtctgtaccttttttaggtcaggatgctgcttttcccacagggccttacattttggccaaagtgttaggttgccctgtgtttaccttatatgcttttcgacggggattggggaaatatgagatttattttcaccaattatttgaacgtgttgaactgccaaataaaagtcgtgagatgaagataaaacaatatatggcacaatatgccgaacaactggagagctactgtcgacgctatcccgatcagtggtttaacttctatcatttttggcaaaaaccactccattctgataaccatgatcgcaacaaataactcgtatacactagatttgtgccggtcagaccgtcccaatcgttacgataccatatggtatatatttattaataattcaaacaagttaatgctaagcaaagatgactgagaaaaaaaccattattcttgacaataaagacgttgacttggcgactatttataaaattggtcggcagcaaatcaatgttcggttaagtgacgatgaaaaatacaaaaaaagcattaatcgaggtgctgattttctgcagtcactcctaaaagaacaaggtcacatttacggagtgacgaccggttacggtgactcttgtgacgttagtatcgacagtgccttaattaatgaattgcccaaacatctctacacttttcacggttgcggcacgggagattttcttacgcccgaacaagggcggatggtgcttgccgtgcgtttggtctcgctcgccaaaggtatgtcgggtgtccgataccgcctactgcagcaattgacacgtttattacattatgatgtcattccggttatcccctgcgagggatcagtcggggccagtggagatttaacaccactatcttatgtcgccgccgtattgtgcgggcaacgccaagtctatttccaaggagagaaacgtcccacaaccgaagtatttgccaaaatcggc

SEQ ID NO: 843 - DNA, 7288 bp, synthetic construct
  source 1..7288: mol_type = other DNA
  misc_feature 1..7288: note = Synthetic
ggtaaaacgcaccgagacgcgtgcgtcccggcggaatggggcggctggcattggttgcgctccttatcgttctcgctgactgaaaggccgtgttcccggttcccagtatagcgcgacaaggagccggcggcaacgatgtccgccaggtggcggtcggtaacgcggccttggaggctcgggagcccaataggagccgcggagtcggcgcgagaagggcgccgacggggggattactcagtcgcggagggctcctagtggccgtctcggttttttcgccgcgtgaaccggggcttcgcaagaaggcctcgggcgatcgcttttcccgcgtgctgcgcattttgctgagcctgctcgccgacggcaccctcgattgcgaacggtgttgcacgcgcttcgaaatttcgctgcgcgaattacagcgcgatctcagcgtgctacgttcgcttggccgggacttcggcttttccctgagcaatgcgcgcagcgggcgcatcacgctcgtacgtagcgcgggacgtctcgcgaagctcggcaacgcacaagcggagacggcggcgatgcttgcaggcatcgggcgcgcgctcggcgggccggtcgagagcgaggtgcgttcggcgctcggcgatgctgccggcgggccggggtttctcgatctgcgcgaaccgcgcccgcgtgccggcgcggaggtcagcgcgatgtttgccgccgtgaaggacgccgccgccacgtcggcgcggctagcgttttcgtatacgactgcgcgtgagggccccacgctacggcgcgtcgagccctatctcgttattgcgcggtcggggcgctactatcttgtcgcgttcgacctcgcgcgcaaggattggcgcaacttcgcgctcgatgcgatcgcggaaccgatccgccgcgacggaaccttcacgccgcgcaaggttcccgaccgctttcggcgcgagggcgcggtcggctggattcgcacgggcgagccgctggaggtgacggttcgcgtggccgctaccatcgccggtgccgttacctcgcgcgagtggcaaccggagcaacgaatcgagcgcctcgccgacgggagcgccgcgatcgcactgcgtttcgacgaccaaggcgaagcggtgcgatgggcgctgcagttcggcgccgaggcggtcatcgtggcgccgccggaggtcgcagcagcggctcgcgagacggccgagcgcatcgcgggaaactatgcgacaaacccttgtcgcgacgagcgggtaagctagataccgtgatagcattttttttgagcaaaaaagcagggccgttacaaaaagcacggccccgattgtcggtatcttgcggccgtttcgctcaaccttgtcttactttacttccccaagtgagagaaccaagaacggcgtcccctcgccgcaataatactcgaaaggtccggtgcaatgcaagcccaagaatcatataagccgtactcgcttggtctcgatattgggacgaattcgcttggctgggcggtcctcgcggtcgatcctgacaatctcgaccggccgaccgagattcttgggatggggtcgcgtattttctcggacgggcgcgccatcgacaaagcgcatatgggcgaaagtctcggcgaaacgctccagagcgaccgtcgaaagaagataaacacgatgcgcgcgcaccaacgcgatcgcgcacgtcgtgggcggctcctgcgaatgctctctgatggtcttggtctagtacgcaccaatggctgcggccgaggcctccgagttgactgggtcgatcccttcaaagcaaccgcttccaatcgtgacgcgtggctgcgaagggagtcggtattcgccgcgcgtgccgcgtgtgccacccatccgcttgattcgacgaataaatacgaccgcgcacgcctcgcacgctccctgtattcattgctagttaaccgtggcactctgctcaccgacgacggcgaaattgaagagcctgaaccggaggctccgccgaaaaagcgaaagggtaaggcgaaggaagtcaaggcaaccattccaaagggcgatgatcccgcttcacttcgggcggaatgcacgcgccgcgaggagatcgtcgctgccgcatttgggatcggggggctcggcatttggctgtcggcgcagtttgagcggaggcacccgtttgcgccgattcgcgcacgtcgaatggactccgacaggcgcaaagaccattggaaaaatctcgacgacgagacgatcgctcgtattgggtcccaggccctgcccgggcgatcgagccggaagatggtcgaggaagagtttgctcggattcgcgagacgcagtccgtggccttcgaaagcgcgggtatcggggccggagagtgggataaactccgagcgttaattttcgaacgcgcaccatataatgccgtgcggtggccgtgtccgtatgtacccgccgacgaacgcaccccgcgtttcgatcccagtgcgcagcaatatctcgcatgggaaaaagcgtggaatcttcgtgcattcgacggccaagcgaacgaaattgacctcgatgtgacgtccgggccgggctccccatcgctccgtcgtcggttctacgctacgttattaacccaacctcgccttacgtggaaacaagcatcagcggccctcggcttgcccgaatcgacttcttttaatcgagtgaatgcgagcggaaaggaaacgcactggtcgggccacccgttcccggaacttggccgttggatatctgaacgcgaccgtggaacgcgagacgatggcagagagcgtgtcgaatggccagagctccgggatcgcgtcctcaatttgttctccgccccgattcgaggagaagatcgtgatttcgctacgattccatcagctatcgctgtggagatccgtgacctcctggtggcgccgccgagaggatcgatcccgtatgggcggtcgatgcttcagggaatgctgcccttactcgaaacgatgcgcccgcacgcggcgagagatgccgcgcttgcgagaatcaatgaagaacgcgagcttgacacctatgcgctcgacgaatatcgggccgggcggttgccgtattacggtgcagctttcttagggatgcttccgcgcctgccgtcgcggaggaaggggccgtacagtaagggcaacgggcccacgcgcgtaatttgcgacgtcgaggcgaagtatgggcgagtacccaatccgtccgtgcacatcgccttgaaccaaacgcgacgcgtggtgaacgagatcgctcgaaaatatggacgcccgtcgcgtatcgtcatcgaaaccacgcggcagttacacctttccgaccggggccgaatgacgctgttgaagcgtatagcagaaaacgaaaaacgcaacagagaggccgaggcggcggttcgaagggtccttggaaacacctcggccgagggcgaagagaatcggcgcgccgtccgacgctacaagttgtggaaagaattgaccctgtgcggggaacgggaggcgcgcctttgcccgtattgcggcaatcatgaagtcacgatgtctgacgccatcaacgggcatggcgtggacatcgaccatatctacccccgttctcttggtggcggcgacgaaatggggaactgcattttatgttgtaaaccttgtaatgccgaaaaaacgaatacgaagacaccactcgatgcatttggaaacgatgccgaacgatgggagcgaattagcgacgcaacgcgctaccttccggcgcgcaagcggcggatgatcctcaatcccgaaaacgagcggtcgaaatttctcgccggacaactcgagtcgacgtcctgggcgtcgaagatgttactccagtggctgcgcccgctgtgcctcgtcgagacgaatgttcttgcatcgcgtggagagctaacgggtacgttgagaaagcggtgggacctagaagatcttaagaaagacgaaagtggtatgcggatcgacgataaccgccaccacgctatcgacgccttggtgaccgcggcgcttagtcgatcgctgctccagaaagctgcgcgcggcaacgaccttgcggtaaagaacttcgatctttgggatggctttaaagcagacgtggaacgggcccacaagcgcatcgtcacgagccataaggtcgaacgccctcgcatcttgtttaccgccgatggaaggcgggcggcaagcgttcccggagcgatgcattacgaaacgatatacgcgaggtcgggcgtacgagaacaaaaggcgagcgccttgctcccgccgcccttgaccaggggacgactgccgctaaacggaccggacgcagctgccgtactgatgaaagcgcacgaccttcttggacggctcgtagaaagtcccgtcgcggggaaatccacctacgattcctctcaagtggcgcgcttgtgcgacactttttcactatggtttggcgctgaaaatccaagtatggcgtattttcgagaacgtattgacggacagtccgagatctggcttcgctgtaacgggaggaacgggccgaagctaaatgcgcggccaccttcggagaccggtgaaatctgcacgactccctggaactgcgaacatggcacactttcgggtgtgtttcgcacggccttcgacttcctttgcgctcggaatggggtcgcaaaaatcgcaattcgtccgacacgcgggcccgacgagagtggaagcgaatatgatagcgagttttacggcccgcccgacgggcgtcgggagacaatctacggtttgtggcggtcggcggaaaatctttgcgcggtagtagaaaacatcatgccgttacgtgttcgcctatttcagctgctccgcgttatcgccgaccccgaggagttgcacgcttttgcggtcaccaaacctgaaatgcgaatatacaaaaatgacgcgatccgcatcgaccggcgtgtctgcctcattaagaccatgagaatagatcaggggcggtttaggatcggcctcgaggacatcaacacgcgcgaagacgttggctccgaacccgccctccaaaccctcctcaagcgccacgagcgggtcgagctcggggtaactgggctgcttggcggttttcgcctaaagatgcgtctcgacggataactgagcttaggtctttatgcgcatcgttgatgtggcgagcgacggggccacgctcgcgaaggatcgcgggttccttgtcgacctccggacgggccgccggacgccactcgaagatgtggacgtcgtgatggtgagcagttggtccgggtcgctcggcatcggccttctgcgatgggccgccgacgcgggagtacctgttgtactctgcgacgaaaaattccatccttcgggcctttttctaccgctcgttggcacgcttgcccacccttccgtgctcgccgatcaaattgatgcgagcgttccggcaaagaagcgcttctgggcctcgatcgttcgcgtgaagattgcgatgcaggcgcaagcacttcgcttgttctcgctgaatgacgcctcggtgcgaaagtgggccaagctcgttcgctcgggcgacccggagaaccgcgaggcaacggccgctgcggcgtatttctcgctcatgttcggccccggattccgacgggggcgcgactcggcggtcaatcgtcacctcgactacgggtatgcggtggcgcgcgccgcgacggcccggggcgcggtggccgtcggcttacatccatcgctctccatccatcactccagcacgcttaatgcgttcgccctcgtggacgatctcatggagccatttcgagcggtggtggatgcggcggtgcggctgcacgattgttccgaagaagatctcctgcccgcctgtaagagcgcggttatagcgcatctgaccggactgctgaaaataaaccatgaacgtattgtcgtagccgacgccatgagggctgtcgccgcggcttggagggccactctgcgagagggaggagtagaatgcccatctataatgttcgacgaggcgcaatggtcgccgaccgataccgaaacatgtggttgatggttgggttcgacctccccgtccgaaccaagaccgagcgccgcctggcaagccgatttcggcacgatctgcaaaatctaggcttcgagcgggttcagtattccttctatgggttccacgcgagaacgcgggagcgccttgacaccatcgagcgcaatgtcgagcgcctgattcctccgggagatggctgggtcttgatactcgacatgaccgatcgccagtttgtcgaaattcgccattataggggcggtaaaatcgccgaaaaatcgcccgtggaggcgccaaagcagcttgttctcttttgattttttaacagccagtaatgcgaaagggcccgtcctgcgggccctttccggggatctatgatatcaccgaatcgttatttggggaagtaagaccagacctcagccgcgcagacctcagccgcgatgatatcaccgaatcgttatttggggaagtaagacgaaggattcagcatcaaggatgaagagaaaatgatatcaccgaatcgttatttggggaagtaagaccctgcagcgcaatatacgcatcgcgaccgatgatatcaccgaatcgttatttggggaagtaagacagcgccgacgaagcacgcgacatcagcgtaatgatatcaccgaatcgttatttggggaagtaagaccagacggcaagcaccggcatccagtacggatgatatcaccgaatcgttatttggggaagtaagacgatacctacgctatgccgagtcttatcgtatgatatcaccgaatcgttatttggggaagtaagacctcacgcctcggcgttgcgaatctacatcgatgatatcaccgaatcgttatttggggaagtaagaccgcttactcgccgacgttgcgatcgcgcaaatgatatcaccgaatcgttatttggggaagtaagaccgtactgttttggcggttgtccaaagaagatgatatcaccgaatcgttatttggggaagtaagactaagcgttcttgccgatgccgctcttcgttatgatatcaccgaatcgttatttggggaagtaagactgcaccgcctgctgcaatgcgttaatcgccatgatatcaccgaatcgttatttggggaagtaagacccagatgtatctgcgcgcccgttggcgaccatgatatcaccgaatcgttatttggggaagtaagaccctcgcacgccgaatgatgcgccgagcgtatgatatcaccgaatcgttatttggggaagtaag

SEQ ID NO: 844 - DNA, 16959 bp, synthetic construct
  variation 2608..2613: note = n is a, c, g, or t
  misc_feature 1..16959: note = Synthetic
  variation 8162..8178: note = n is a, c, g, or t
  source 1..16959: mol_type = other DNA
  variation 13395..13450: note = n is a, c, g, or t
gtgggtgtcgagattattgcaggcggcgtcggtaatcctttgttctttgaactcgtctatcacgagtcttgcgatatcgtctattatctcgcatttttgttccgcctgtccgttggaattgccgagttcggtaagcccgatgagagaaagttcgagatcgcctaacactttcaggtcccgcatgcccctgtacgcccatttatagaaaggttcgtaagcattgttaagcaggtatatcaccgaaatacagtgtcttacgaactcgaaaacggcgagttgcgccgaacccgattcttctcttttgataagtctttggtaattatactgtccggactgcgccatcatggcggtgtgcgccgctatcttttttaggcgaatatcttcgggatatccctttttcagtacttcacggatggcggaaaactcgcctttatcgtctttaaacaccttgccgcaggacgcggtaagaagtgcggaagacggggtgtaaagccaccgtttcacgctgtcgggcgcgtttgccgcgccgagaaatctcgtataaaagtcgtcgataagaataacgccgcgacgattcccgcccgaaggggagagcaccgaccttttaagccccataaactccttgggtagtttcgcgtaagccctttcgagcttaaagccgaattcgtcgtaatcttttttgttcagccagatacagaatccggggtcgaaatcgtggtctttcgatatctcgtcgtcgtagccgagacactccgacccttctccgaccagccctacggcgatatccgaaagcttgtcgggaaattctgtttcgagcattacttttccgtaagtttcgtaaaacagttcggcaatctcaagacctttcataaattttctccgataggtttttaagttcttcggctattttggcgtagccgaaatacccgaaactcggatagcacttggagtatacgaaagcaaggtaagagtcctgcgggtttttctcgtcgcacaaaaggttgtaagccttaaaaaggcagtcggttatcttgtctttcggggttttttgcgcgtcgtaaaggtgcgcgagattgatataggatattgcggcgtctatcttgccgttctccgcgttttccattatttctatcgccgaaaggtacagtttttcggctttttcggtttctccgacgtcggcgagcgcaagtgcgaaattgttgtaaagccccgctttaagggggtctttctgcgttaagtttccgtcgtaaattttttggaccttttcgtagagcggtacggctttatccgcttttccgaaagccttaaaaagggtagcgacgttaagtataatagtcgccgcggaaacggagcccgaaagattcaactcttctatgagagaaagggcgtttgccgccgcgtccgtgcctttttcggtgtttgccgtcttgcggtaaacgccgagaagttcgttgattacggaaagttcgccgtttttatcgtttaaagcccgcgcttcttcgagccagtattcgaggtgtgccgccgcgcccgcaaggtcgttctttttataaaacccgtcggttttttccgttattcttttcacggggatacgccccgcggcgggggatagttcagggttgtaaaattctttgccgccgcataacgcacaggcaggttctttgtaatcgaaaccgtctatcatacctttattgtaacacagcggaaaactttcgtcaagagtaaactccccgccgcggaatacgcggcgggaaggggtttaagcgtctttacttatataatcgttcgctatctttttgattttaaggtgataggcaagcggcaaggcgaccgccgcgccgactactgcctgtaacagttcgaaaggtatcttatacaccgcgtattcgggtgtggaatatatgaacgcgctgcccaaagtatatcccgtaaccattattattacaccgatagcgcacccgaccgtcgaaaataaaacttccttctttttcccgatcaggttagaaaacaccgaaataacgagcgcctgaacgcttctcgtgataagggtggtaaacatagccgcggggtaaaagaaaaggtcgccgagaaacgccccgcctccgcccgcaacgacggcgagcacgggattaagggttattcccgcaaggcacacggcgatatcggtaaggtacagatgcccgccgaacggcgtgggcacggaaaaagtcgaaagaattacgttaagtgccgtaaacacggcggcaaaggttatttgccttacggaaattttcatggttttacccgttgacatttttatgaaaacattatacaataaaaattgataatatacaatatccaaaaaaggaaaattttatataaccagatttatgaaagaaaggaaagaaaaaaagtacgaagagatatatcgcaagataaagggcgacatagaagcggggcggataaaggaaggcgaaaaactgccgtccaagcgcaactacgccatgaataacggggtaagcgtgataacggtagacgcggcgtacaggcttcttatcgacgaagggtacgtctattctaaggagcggagcgggtttttcgcgctgaaaacggagcgtaaaaacgggtnnnnnnggggaagccgccgattttactgcggaacgggtaacgaccgcggacgtggattttaagttttcggtactgtcgaagataatgcgtaaagtgataacggattacgacaaagcacttttgttaaagccgcccgctttcggttgcgaagagttaaggcgtgcgatatcggaatatctctaccgttacagggatatgcgggtggataaggagaatatcgttatcggttcgggttcggaatatttttacggtatgatagtcaattttttcgggcgggacaaggtgtacgggctggaagatccgtcctacgaaaagatagcggcggtgataaaggcgaacgggggaaagtgcgagtttctgaaaatgggcaagaacgggatagaaagcgacgcgcttaaaaaaagcggcgcggatattctgcacgttacgcctttcaacagttatcctacggggataacggcggattttaagaagagaaaggaatacgtagagtgggcgaacgcaaaaaaaggctatatcgtggaagacgatatagactcggaattcgccgtaggcgcaaagcccgtgcagacggtattttcgctgtcaaagggtaagcgcgtgatatatcttaataccttttcccgatcgcttgcgccgtctatgcgtatgggatacatgatactgccggacgatcttatggaagaatacaaggaaaaatcggggttttattcgtgtcccgtgccggcgttcgatcagtacgttcttgcggaatttattgcgggcgggtatttcgagcggcacttaaacaggatgcgcagaaagataaaagacgccgcaacccgtaaataaaaatttaatataaaaagttcgaaaaatttttcaaatatgacgaaaactgtcaatatatggtgataaaatggtagaaaaggttacaaaaaacaacatttttatttaaagacggataaaaatattgacaaagggaagaaaatattgtatcataattttgcaactataccataccaaatgataaaaggttgctaaaataagggatttttcccgaaaagctctatccctatgtcaatgacgtagggatatcttttaaaacgcaggaggaaaatatgaaatacagattagggctcgatataggcataacttcgataggctacgcggtaatggagaccgacgacaacggcgaacccgtggcgatagaagatttaggggtacgcattttcgaaaaacccgaaaacccgaaagacggatctacgcttgcgtccgcaaggcgtgcggcgaggggcgtaagaagggttatccgccgccgtgcgcatagacgtgagcgcacggaaagcttgttgatatcacaattcggggcggagattttagatagaatacacgagaatacggaagacgtattctatttaaggtataaaggaatcgaagaaattttgtcagacgaagaacttggcagggttttactgtattttgtcaaacaccgcggatttttatcgaacagaaaatcagagaagaacgataaagaaggcggcaaactgttgcaggcgacgtcaaaaaacagtgaatattttaaggaaaagggctatcgtaccataggtgaaatgctgtacaaggatgaaaagtattttcactttgaaaacggcaaaaagatatatactgtaagaaataaagagagtagttacgacaatacttttttacgtgacgaactgaaagcggaaatacttgcgatattagataagcaggatgaaaacgggagactgggaaaggaatttatcgagaaatacctgtacatattctatactaaccgtaattttgacgaaggaccgggcgagccgagtaagtacaggggcggctacgctatcggtaagtgtccttttgaagaaggtgagttacgtgcgccgaaagcggcttatacttttgaatattctacggcgttgcagaaattgaacaatttacgaattaagtttttaggtggcgaaagagggctgaccgaagaagaacgcaaaaagataatagatttaataaagactaagcaggagataaaattcggcgcgttaagaaaggtgcttgccgtcagcggggacgaaacgttcaatttgcttaactattcgcgcgataaatccgtagaagaagtggaaaaggcgcgttttgtttcaatgtcggaaagttataaaatacgcaaggcgttgagtgaagagaacaaaggcgatatcgaattacttgacgaaatcgcgcttattttatcgatgctgaaatcagacgatcgaagaattgcggaattaggcaagatagccgttttaagcgaagcggaaaagtcggcgttgttagagatcaacgtatccaaattcggcggaacgagtttaaaatttctgaaaaacattacgccgtatctcgaaaaagggtgcaaatacaatgaagcgtgcgaaaaagcgggatataatcatactttgcagagatatagcggcaatcgcagtaaacttttgaacaccaaagaagtgcacgaactcgtggacgagatagccgtacctgttgtcaggcgttccgtatcgcagaccataaaggtggtgaacgccgtgataaataagtacggttcgcccatggctgtaaatatcgaacttgcaagagaattgtcaaagacttttaaagaacgcgataagattataaaagacaatgaaaagcgggcacgagataacgaaggcgtaaaagcgctattgcagtcggaatatcatttgactatgcccacggggcaagatatgataaagtactttttatatgacgaacagggcgggaaatgcgcttacagtttagagcctttggacgcaaggcggttgtttgaacctgattacgtgcaggttgatcatataattccgtacagcaagtcgtttgacgacagtatgaataataaagttttggtgctgacgaaagaaaatcaggacaaaaggaacaggttgccctacgaatatttcggtagcgacggagagcgctggaaaaaattcgaagactttgttgcggcgcaatataaaggcaatcgcaaaaaacaggaacgcctgttaaagaaagagttcggcgaagaagatgcgaaagcgtggaaagaaagaaatctgaacgacacgaaatacataactacgtttgtgtataacctgcttgacgccgatggcaagtcgaagaaaaaggtgacggcggtaaacggtgccattacttcgtatatgcgtaaattatacggactggtgaaagaccgcggcgaaagcgataaacatcacgcgttggacgcggcgataatagcttgcgtgacggacgggagtattcagaatataacgaaatataatcaggacaaagagaactacgttttcgacggaagcaatcttgtggataaaaggacgggtgaaataagagttaaggaaccgtatatcggtttcgcaaaagaactaagataccgccttgcggaagatccgagatattatacggacttttttgtaaaattcggctacggcgataaaaaactcgacgggttaaaggaagtgtttgtaagccgtatggtaaataaaaaagccaaaggtcagatacacgacgcaacggtcagttccgcaaggatttacggggaaacgggtaaagtcataaccaaaaaggcgcttggtgagattaaacttaaagatgacaaaaagggcgagtattacgtcgaaggttgcggagattattatatagaaaactattaccgcccgcaggacgacaggctgttatatgagaaacttttgaaaatgcttattgcggcgggcggcgacgccaagcaggcgtttaaagatcccgtttataaacccaaagccgacggaacggacggcgcacaggtcagaaaagtaaagatattgagtaaggcgacgagtggcgtacagtttgacaacgtaaaagggttttccaagaacggcagtatggtaagattagacgttttctataaaaacggtaaatactattccgtgcccgtgtacttaaaagatatctacgcgaaaaaacttcccgataaagccgtcgttgccggaaaagactataaagactggataacggtggacgacagtttcgagtttttgttctcgctttataaaaacgaccttatttacgtggaacataaaaagggcatagaacttaccaaaacgaattccgataataaggacgacaagaaaaagatgcaagaaggtcatttgtattataattctttcgatatttcaagggggtccgcaacttgtattacgcaggacaacggttatgaaacccgtttaagtttacttacgcttgaaaagttagagaagcgttgcgtggacgttttgggcaacgtttcctctgtgaaaaaagaagtgcggcaaggggtgtgatatgccttttatcaacgtttttatagaaagcccttgcaacgtaagcgtaaaaaacgcttcactggtaaaacaaattttcgtttattaaaatatcggtgtagattataccataccaaataataaaagggaactaaaacgcttgttctaaaacgttttttatgtcgtttattataccataccaaataataaaagggaactaaaaccttactttttagaattaactattgatattaattataccataccaaataataaaagggaactaaaacagagtttcactacgacatagtcgacgaaagattataccataccaaataataaaagggaactaaaacgaatccagtccagtttccaaaaaatttataattataccataccaaataataaaagggaactaaaacaggtcgagtatgattaaacgattaagccgaattataccataccaaataataaaagggaactaaaacatggcgcgggtttataaactttacacttttattataccataccaaataataaaagggaactaaaacctacgacagcccccttggtgtccattgtccattataccataccaaataataaaagggaactaaataatacggtgtaggtcggcgtgttacaataaaaacggactgaatatttggactttgcctaaaggttcagtcagtttcaaagcagttccttgcaaagaagagatatctgatcttcgttttcgttagacattgcggaatttatcctgacgactggttctgcgtaggaaatattcttgcatttttcaaggataccttgcattacctttgcggcgttgggcgcccagctgccgttttctatcaaagccactttgcggttctggtaatttctttccgccaggcgttctaaaaagtcccgcataaaggggaacacgtccatattatatgtagttgtggcgaacaccgctttatcgaactcgaacgccgccgcgacagccgccgacatatcgcatttcgacaagtcgtaaacttgggtggtaacgccgaccttttgcagtttttcgttaagcagaagaacggctctttcggtgtttccgtaaacggaagtatagaatatcccgactcccgttttttcgggcaagtaggaagaccatacgttataaagtccgatatacttttctacgttgtcggtaagtatctcgccgtgcaggggaagtacggcgtttatttnnnnnnnnnnnnnnnnntaaattcgccgtctttttaagtaatgcttgcacctgcgcgccgtattttgcgactattcccatataatatcgccgcgcttccgtctcccagtcgggacagggggtattttctccgaatctgccgaacgcgtccgcggaaaacagcatcttatcggttttatcgtaacaaaggtgtacttccggccagtggaccataggggcggcgataaaggtaagttcgtgtttaccgagatttatagtagcgccttccgctatcactatgcgtctttcggcaaaatcttccccgaagaaatttttcatcatggcaaaggactttgcggaagacacgataacggcgttttgatattcccgcataaacgttaaaacgttggaagagtggtcgggttccatgtgcaaaacgataagataatcgggggctttgccgcccgccgccgttttgatatttttaagccatttttcgccgtagcgcatatccacagtatcgaataccgcgattttttcgtcttttaaaaggtaggaattgtaagccataccgtttactttatactgcccttcgaaaacttttaccgtgccgtctgatacgcccacgttaaaaacgtccttgtaatttatcattattgctccttttttataagacgagagttaccgtcattgattttccgaacaccgattcggcggaaatattccagccgttatccgtcgctatgcttttggctatcgaaagccccagtccgttcccgccgtattctctcgcacgtgaatcgtcgcggaaaaaccgttcgaatattctgtccgacatctcgtcggggacggcgctgccgtcgtttttcaccgtaaggacgacgcgttgtcccgattttttaagggatacgcgtatctcgcccttgtcggcggaatattttacggcgttgtctaaaagtatatttactatgcgtttaagtcccgccttatcgcccgtataggttatatcgggcgttacgtcgctggtaagtcgtttatttttttcgtagcacagcgcgtcgaaggtaagcattacgtcggtaacttcttcggacacgcagaattcttcctttaccgtttctttgcgaccttcgtcgattttagcgagaaaaagcatatccgccaaaaggtagtccatacgttcgacctgtttttttatgcttttgacgtagggcgaagaatcgtctaaaacttccgcgttggcggaaattatggcaaggggagttttgagttcgtggcttgcgtcggatatgaacctgcgctgttttaagatagtctgttttatgggcgaaaatatcttcgtcgaaaccccgactaccgctaaaaacagcaaagcgtccgcaataaacagggtaataagcagcgtatttaacgatctgtttaaaagcgccgctttttcccccgcgtccacggcgtatattttaagcgtagcgccgtcgtaggcgcgcctgtaaaaaatatccccgcaagagccgtattcgtagtcctttaagacggcgcaagatacgacgtcgtccgtttcttccgcggtaaagtcttccgcgccgaacactacttcgtggacgttttcggcgtagacttcggcaacaaaaaacctttgcggaagagccgccgcatttccgctgtcgtaattttcgcaggcaaagtccaaacaggtcttgctttcccgcactaaaacgttacggttttcgtaggcggcgactatgaaaacggcggcgaacgccaacgttatcaaaatcattatcgccgtgataaatcttattttcgatcttccagtcatttcacgcaaagcgtatatcctacgccccttatggattttatttccgtttcggaattaaccgccgcaagtttttttcgcagaaacgaaacgtatacttctatggtattgtattccgcttcgctgtcgtaaccccatattttttcgataagaagttccttctgtacgcatttggcggcgttaagcataagtatttcgagtatctggaactcttttttgctgagcggtatcttcttatccttgcatataagttccacggtgtccctgtcgagcgatatatcgccgaaagaaagggtattcaaagtgaaattcttgttgcgccgaagcaaagcctttatccttgcgagaagttcgttcatattgaaaggcttggttatataatcgtccgcgccgatatttaaaccttctatcttgtcccgcgtttcggaacgggcggtgagcatcagtacgggcgtggttatcccttcggcgcggagtgttttaagtatctcgaacccgccgattttgggtagcatcacgtccaaaagtatcaggtcgtatattcccgccctgcaaaagtccaagcccgtttccccgtcgcaggcgatatccaccgagtaattgtttctcgaaagtatcgcggaaagcgcgtcgcacagttccttttcgtcgtctacgataagaaggttcatattataatagcggaatagtggcgagatattctacgtcttgcctgtttttggcgtcgccttccgcaaggacgaacgcctttttatatacgataccgcccgctttaacgacgatatcttcgagacctttaaggctttcgccggtggaaataacgtcgtcgacgatagcgacttttttgccttttataaggtctatatcgtgtttggataaaaacagttcctgtgcctttcccgtcgttatggaagagccgtaggttaccgaaatgccgtcctgcatatacagttttttggactttctcgccacggcgtagtagggcatattaagttctctcgccgcaacgtgggtgagttgaagccctttgctttcggcggtgataagcacttccgccccgctcaaaagtttcgctatttctttaccgcagtgttcggtgagaaaagtagcgccgtgcaggttgaaaaacgctatgcgtattcccgacggcagggtaaggataggaagttccgccttaacgcccttgatatcaacgcaaaaaatttccgacataataattcaccttccgtattaaatcactataaaagtttaccacaaattcgcggttttgtccatataaaatcatatatttaaggcggcgggcataatttttacaagaaagtttaagaggggcgtatggattattaccttaaaaaacccgaaacggcgataaaagacttccgttccgacgcgcgtcgcggacttaccgaagcgcaggcggaaaaaaaccgcgttaaatacggcgacaattcgctttccgtaaagagcaggaaaaacgttttttcaaaaatcttcgccgcgcttaaagaacctatgcttataatacttcttttcggtttttttatcgcgctcggcgcgaatatcggaaaggaattaaagacgggcgacggagatttcgcggagtgtttcggcatacttttcgccgtcgtgctttcggtcgggataaccatatttatggaaggcagttccgaaagggcgttcgaagcgctgaataagatatacgacgacatagcggtaaaggtgatacgggaaggcgaaataaagataatcaacaaaaagaacgtcgtaaagggggatataatccttctcgatatcggcgacaagatagttgccgacgggcggcttatagaaagtcgggatcttgaaatcgacgaatcggcgttcacgggggaaagccgcaaggtgaaaaaagacgctgttaaagagtgtcttaaaagcgtgcctttgggagaacgcgttaacttcgtctattcgggaactttcgtggtttcgggcagcggcaaaatggtcgttaccgaaacgggcgacggcacggaaataggcaggatagcgggggaactgaaagacgacgcgggctcgtccccgctttccgcaaaactcaataaactcggcaaaaccgtaacgctgataggtgcgctctgcgccgttttggtgtttatcatttccgctgcgcggctgtttctcgcgggggaattttccgcggcgaacgtgtccgacctgtttatatcgtgtatagtgcttatagtcgcggctgttcccgaagggcttcccacgatagttgccgtgtcgctggcgcttaacatgataaaactcgccaaggaaaaggcgcttataaaaaagatgacggcgacggaaacggcgggggcggtgagcgttatatgttccgataaaacgggaactctgacgcagaacaaaatgagcgtggtggcggtgtgcaacaacgatttctgcgttcaaccgaagttagcggtgaatcccgcgctgtttgaaaatatcgtgcttaattccacggcggaaataacttcgggcggcaaaataaagggcagcggtacggaaagcgcgctgcttgccgcggcggcggcaagagacaaaactttaaacgtcgcaaaattcagggaagagcgcaaaacggtctaccgcctgccattttccagcgaaaacaagtatatgataacagcggtaaagacgggggataaattcagggtatatgttaaaggcgcgccggaaaaggtgctgtttcactgcaatataaccgaagggcaaagggagaaacttttcggggacatattaaaggaagaagaaaaggcgagaaggatactgtgttttgcgcattacgactgcgaagagttttcggaaaaagacgcgccttttaagaactttacctacgacggatacgtcgcccttgccgatcccgtaagaaaagacgtgaaagaagcggtgaaaagttgcaaggcggcgggcataaaggtaaaaatgcttacgggagacaacgtagttacggctttcgcggtggcaaaggaactgaaaatagccgatgaaaggtcgcaggctatcaacgcgcaggatatagagcatctggaaggcgaagccctcgtaaaggcgttgaacagagtaacggtcattgcgcgtagtacgcccataataaaacttaaaatcgtaaaagcgttaaaggaagcgggggaagtcgtggcggtaacgggcgacgggataaacgacgcacccgcgataaaacacgccgacgtgggattcgccatgggcgagagcggcagcgagataaccaaggaagcggcggacgtggtgcttatagacgacgggttcgacagcgtggtaaaatcggtgtctttcggcaggggcgtgtacaggaatatacggtgttttatactgtttcaactgtcggtgaacgcgtccgcgctgatatttacggtggcggcggcttttttgggacttccttcgccgttcannnnnnnnnnnnnnnnnnnnnnnnnnnnnnnnnnnnnnnnnnnnnnnnnnnnnnnncccttaccttgggattagagcccgcccccgcgagccttatgacgcagaaacccgcgccgagaaacgaaagcatcgtggacaggaagacttttttaaggatagcgttcaacggggcgtttatttcggcggtaatggtgtggcagtacctgcataattttctcggggcgttgccggaagaaaaaacgagcgcgtatttcacgctgtttatagtctttcaactgttcaacgcctttaattgcaggaaattgagcgccgaaagtacttttaaaaatttcggaaaaaacaaaataatgctgggcgcgttcgcggcggtgtttgcggcgcacgttcttatagtggaaatactgtataaacccttcggactgtttcccatgcggtggataatatgggtaagatgtctttttgccgcgctttcggtggtggcggtatcggaagcgtataaactcgtttacagggcgttaaagaaaaatttcggcaaaaaaacggatattcggggacttcccgcaagcgtaaaagaataaaacgtaaataaaaatctttgcgaggcgtaaactataaaatatgactgaaattcgcgttaccgacagagcggaaaattacgacaattttatatatctggaaaaatctttgcgggaagtgttcgaggtaacgggcagcgacaagagcgtggagagagagggcggcagggcgatatttaaagtcttctgtccggaagatataaaagaaacggtgaaaaacgaagtgtgcgacaaagcggcggaaataatcgccgtaaactataagtacaaacacttgaaagagcatgtgaaagcggcggggcttaccgcggagcagaaagacatctttttcgcgggggtgataggcgcggatttttacgaagacaaaaaatatatctacgaaaccctgaaaggcttttacgatatcgcgctggacgggatatataatttccgtctcggcaggataaaggaaaagactgcggaaatagtaaggtgcataccttcctgttttaccgaaggtcaactttcggattttataacctttctcactatggataagagaaacaaagtatacgtcgataagggcatggtgttcgacgggcgattccgtcggcttaaaaggagcacgcttatgggcagaaaagaaccgtccgtcgtggcggaagtgcttatcgccgaaggcggcgtggtggaagtggacggagaaataggcgagaccgacgagagatacttaaaagagtttttcgggagcagggtgtatttttcgcaaaagaattaccgttaaacggttgacaaaaggcgtaataagttataaaatggtattacttttacaggtaaatagccgtaagaagcggacaagtaaccataccaatcggtttttcagcgagcggggggcggtgtgagccccgtagaacttaggtagggcgaaaccaccgtttcgggcaaggcgtgtcggaccttttccgacgaagagcggtcggggcaactcggcaattaaggtggaaacgcggaaaatatttcgtccttactatttacggtaggacgattttttattacggagaaaaaatatgaaagtaacgttaaaagacggttccgttatggaagtcgaaaataattcgacggtggcaagcgtcgcgaaagcgatatctgaagggctgtaccgcaacgccgtgtgcggcaaggtgaacggggagcttgtggatctttctcacgttttggacggggattgcactcttgaaatcatcacccttaaagacaaggaagggctgaacgtctatcgccacacctgttcgcacgttcttgcgcaggcggtcaaaaacatttttccgacaagcaaacttgcgataggtcctacgatagaaaacgggttttactacgatatagagttcaaaacgccgatagcgaaagaagaccttgccaagatcgaaaaggaaatgcaggagataataaagagcgattttccgatagaaaggcttgtttacaacaagtccgaagcgcttaaaattttcaaagatttttccgaaccgtataaaacggaactcataaacgatcttccgaaaggcagcgtgatatccttttataagcagggagattttatggatctttgcaggggaccgcaccttccgtccacgggcaggataaaggcgtttaagctgacttccgtcacgggcgcttactggcgcggggacgaaaagaacaaaatgctcacgagaatttacggcacggctttcgagaaaaagagcgaactcgacgagtatcttgcggctttagaagaagccaaaaagcgcgaccacaacaaactcggaagagatcttggaatattcatgaccgaagaagttatcggtcagggacttccgcttcttatgccgaagggtgcgaagatattgcagatactttcgcgtttcgtggaagacgaagaagaaaagcgcgggtttatgataaccaaaacgccgaacatggcgaaaaacgatctttaccgcatttcggggcactgggatcactaccgcgacaagatgtttataatcggcgacgaaaattcgccggaagcgatagcgcttcgccccatgacctgtcctttccagtatcagatatataagaacgggcttaaaagttacagggatcttccctgccgttacagcgaaacggcgacggaattccgcaacgaagcgagcggggaaatgcacgggcttataaggatacgtcagttcaccctttccgacgggcatataatctgcgcgccggagcaggtggaagaagaattcaaacgctgtctggatctttcctattatttcctcgaatgtctcggtatgaaggacgacgttactttccgtttcagtaaaaggggaaagagcaacaaggcaaaatatatcgacaacgacaaggcgtggaacgagaccgaagcgcttatgaagaaaattttggacgatatcggcatagactacgtcgaagccgacgacgaagcggcgttttacggacctaaactcgacgttcagataaagaacgtttacggcaaggaagacacccttatcaccatacagctggattttgcggcggcgcactctttcgatatgacctacgtggacgagaacggcgaaaagcagtatcctttcgttatacacaggagttctatcggctgttacgaaaggacgctggcgttacttatcgaaaaatacgcgggtgcgttcccgctgtggatatgccccgtgcaggtgaaggttttaagccttaccgacaggacggctgactacgcgaaagatatagtggcaaagttaagggcggcgggacttcgcgccgaagcggatacccgcaacgaaaagataggctataagataagagaagcgcaactcgacaagataccttatatgttcatagtgggcgataaggaaaaagaagacggcacggtttccgtgcgttcgggaaagaaaggcgatctcggcgtctgcgcaacccaagagataatagaaaaactcgtgaaagaagacagagaaaaaaccgtttaacaaaaagcaaaat

SEQ ID NO: 845 - DNA, 8156 bp, synthetic construct
  source 1..8156: mol_type = other DNA
  misc_feature 1..8156: note = Synthetic
aaatggccgttggcaacaaccatgattaagcagcggccaccggaatacgacggcggtggcgagggtcggcggttacttctttcaactcgcctattaagtaaaagttgcccgcatcaataatctcaacgtcggcataagcacccacccgcaagccaggggccgccggcaagttaaccatcttgttttgacgggtacgtcccgttacttgattcggttcacgcttagccgggcctccgatgatcaccgactccacccggcccacccgggccgcatgggtaagggccgacgatcgactcaagaccgttcgcaaccgttcgtaacggtccacgctcaccgcatggtcaacaaactggtcggtcatttctgccgcctcggtacccggtcgaggcgaaaaaatataggtgtaggcagcgtcaaaaccgacttcggctattagcgccaaggtttctacaaaatcgtcttcagtttcgcctgggaaacccacaatcaagtcggtgctaacggccaagtcttcaatggtggcccgggcttcgtttagccgttctaaataacgttcagcggtgtaaccgcgatgcatggccgccaacacccggtcgctccccgactgcaaaggcaagtgcaggtgttcgcagacctcgggcacttcggccatggcggcaatggtctccgggcgtaaatctttgggatgaggactgacaaagcgcacccgttcgatgccctcaacttggccggcggcccgtaagagatcagcaaacaacgggcgcgggcggcgggtctgatcttgagcccatagttggcctgcttcagtttggtcggtgtcgctcggagcctcgggccgtaaacgtaaagtgaggtcacggccataagagtttacgttttgccccaacaaggttatttcggttaccccgtcgccagataggtcttccatctcagacaccagttgaccaaagggacgactgatctctgggccccgcaccgaagggacgatgcaaaaagcacaggaattgtcgcaacctatttgcaaagtcacccaagcactgtggtcttcgtcgcgccgggtgggtaaggccgacggaaataactcagcatcgccacgcactacttcttcaagaatctctatgaccgaaccattttgccgtgcttcatctaagagttcgaccgctcgatgaacattgtgggtaccaaaaaccacgtctacgtggccggcccgttgttggattaaatctcggtctttttgcgccaaacagccgcctaccgctacttgcacgtggggacgtttttctttgagcaccttgaggttgcccagcgctccgtagagcttgttgtcggcgttttcacggatgcaacaggtgttgagcacaataatgtcggcctcgtcttcagagaccgcccgggtaagcccatcggcttcgagcaaaccagcgatgcgttcgctgtcgtgttcgttcatctgacacccgtaggtacgcacggagtaagtgcgtggtgcaggaagttcaggggtttcgctcaccccactaggttatggggcgctcacccagcggccaccacgttggcctaaccgctctcacggttaggccaaccggccagcgttagtcctgaatagcgatgggcacatcgtcagcagcggtgaactcatcggttgccgctccatcctctgcttccataaccggttcttcttcttcaacttcaggagtcacctcacgccacacccggtcagtgatttccatcatcacctcagggttatcaaagaggaacttcttagcgttttctcgaccctggccaagttgctcgccttcgtaggtgtaccaagcaccagacttcttgacgatgtcgaggtcgaccccaaggtcaataaccgaaccttctcggctaataccctggccgtacatgatgtcgaactcggcttgcttaaagggcggagctaccttgttctttaccaccttgactcgggtgcggttacccacaatgtctaagccatctttcaatgcttcgatgcggcggatgtctaggcgaaccgaagcgtaaaacttcagcgcacgtccgcctggggtggtctctggcgaaccgaacatgacaccaattttttcacgcaactggttgatgaaaatacaaatggtgttggacttgtttaggttggcggccaacttgcgcaaagcctgcgacatcaaacgagcttggaggcctacgtgggtgtcgcccatgtcgccttcaatctctgcccgaggagtcaaagcagccaccgagtcaacaacaatcacatctaacgcaccggaacgaaccagcatgtcaacaatttctaatgcctgttcaccagtgtcgggttgcgagataagcaaggagtcaacgtcgaccccgatggctgccgcatagaccgggtccatggcgtgttctgcatcgatgtaggcacagacgccaccgttgcgttgggcctcggccaccacgtgggtggcgagggtggttttacctgaaccttctgggccaaagatttctaccacacggccccgaggcaacccaccgacacccaaagccaggtcgagggccaaagcgccagtggggacggtctcgatagccatggaggctttatcacccatcttcatgacggcaccggtaccgaactgcttttcaatctgactcaacgccaggtcaagagctttacttcgacctacggcatctgcgccgatttctggaactgtcttaagtggtttgttcattttctttgccatgattaactccgttatttttgtagaggggtaagagaagttgttacgtagagaaacttagtagaggggtgtgacaatgtgcccttgcgaataacaacagcgtaattgcgaacaggtgttcgttgcaagcatttcgccaaattcttttctttactccttaaaacaggtaggttttggtcatgaacgaaatcccaaaatctcaagaaactgaccaacaactgcgctcacggctaaccagccaacaatatgactgcacccaagaggcgggcaccgaagctcccttcaccggcatttattgggacgaaaaccgggctggcacctaccgttgcatcgtgtgcgatgaggccctctttgccagcgccaccaagtttgacgccgggtgcggatggcccagttttgacgccccgctcagccccgacatcatcgacacatccgaagaccgcagcaccggatacctgcgcaccgaaaccctgtgccacaactgcggcgcccacctgggccacgtattccccgacggccccactcccaccggcgaccgcttctgcatcaactcggcttccattcgccttgaaactgacgaatagttcgggaaatagtaaagccacccgtaagggtggctttatccgagatgccccgtagagcagagcccgcgaattgaaatcttgtcgagacaagacacctattcggttcaagtggtttcaccatagcacgaaatttccggtagtcaaaagtttccgagcgcctgtcacgccaacgttgtactgtttccttagcaacagacggttaaggagttttttatgaaacgggtacttggtttagatttgggcaccaactccatcggttgggcggtacttgatgtgcccgaacacgaaaaccctgaggaaaataccggcacggtggtggctatggggtcgcgcatttttacccagggggccgaggaagcaggatctgctcttgagaccccggccaaagttcgccgggccaagcgttcgatgcggcgtcaaatccagcgtcgtgccaagcggcgtcaacgtattcgtcatgagctaaccgccattggtcttttgcccgatggcgaccttgagtttgatgacctcatgaaagaggaccctgcggcgttgatgcagagttctacggagggagcggttctttcgttgcgagagattggccgggttatttactggttttcttcgcagcgggggtttttgagtttgcgagcaggcggcggcgacactaccgacgaagacgatgatcgggccacccgcaaccgctaccgcaacccccaaacggttaaagaaaccggcgaaataaaggtacggggccaagaaaatattttggtggacttcctttatcagcaagcgcaacaccatccggccttgttaaccgatgagatcatctttggggcgcgtggccgcttgacctacccggtgcgacctattaaacaaggtaattttttaagcgacggtgactcgtggctgggcgagttcggtattcatgggttggtcttttttcaacgcagtgtttattgggatcaaaaaactattggcacttgctctttggacccccggaagggtggcccgcgagttttacgagccgaccgcaatgcgcagaagtatcgggtttggaaaaatgttttagaccttcgggtcgaaaccccgcaacggtcgctaagcgacggcgaacgtaaggtagtttacgacaccctgatgacccaagggtcggtgtcctttaacagtttgcgtaaaaaactgaaactgccagacgatgccgctatcaacctggctctttctgagcgagaagagttaaagggcaatgaaaccgatgctgccatgcgtaagactttgggtgatgcgtgggaagagatggatgagcaaacccgcgacaatattgtttcggtgcttttaggcaacgctctcgctgaccaagttcgtgctgtgttgatgggtaagcaatttggtctaactcatgaacaggctgaggccgctctcttggttggtttccctagtgggcgatctatgtttggtcgccacactattaaacaacttctccgctttatgcccgaggggccgatggccagttccgaggcgttgcaagaaaccttagggggcgtttgggaagccctgagtgacactcaacaagatcagatgatctctttgctccttgacgacgctaaaagaagcaaagagaaaaaagcattaagcgccactttggccagtgactttggtttatccagcgcacaaattaaggccgtggtaggggttagggccaacgaaagcaaaggtattaaagaagagcggggggcgctgattaaaaatgagcgccatgtcattcaggccgctggttttcgtatgccagaggaagtgcgcagtgaacggccggtggaaattgagaaactcaccaacccgttggtgcggcaaaccttgtcgcagttacgcaaggtgttgcatgcggtggcgcacactcatggcctcgaaggcgaccaaccgtttgacgttgtgcgcatcgagttaacccgtgatgtgcggtccaactaccgggcccgcaaagaaaccaaccagcggcaacggcaaaacgaaaaggacaacaaggccgccgaaaaaatgattgaagattttgctcccggagcgaaaataagttatgaccaccggcggcgggcccgcttatggaaagagcaaggcgagcagtgcttgtattgcggtcaacctattagcagcattgaagcctttactggggccacggagttagaccatattttgccacagtcgcggaccctagataactccatggccaacctggcgttggtgcatgccgacgagaaccaagaaaaaggcaaccggacgctaaccgaatggttagggcctgaggatgcttttgagattgccatgcgggctaaaaaatacattccttacccgcattggaaaccaaaaatgcgccgtatcgaagccatcgatgtggccgacgccccggtgccggaggcgcttctggtgcaaaccggctacataaatagcgttgctcgagatttcatacgtcaagaattgggcatgaaagccgaggtgtcttcagggcgcattaccgccagcttgttgtaccacaccggtttgaaaaaagacggagaggatcatcgccgccatgctcaagatgcggccattgtggctatctgtgatcgacgcacctcgctgcgtttggctaaggcctataagaaaaaagaagccaccggtagttacagtggcgaaagcgagtacggcggggttgagccttgggaggggtttcgcgagcaggtaaaagcctgctacacagacatcaacgtgtcgcacgccgttaagggcaagatgagcggccaatggcacgaggagacttactacggcaaggtcgagagcccttacttggagggcgacgacgtttatgccttccgccggccggtgagttgggttacctcgcctaaaaagctggccgaggtggccgacccagcggtgcaagaagcattacggcaaaacctgcgagaccgggggctagaccccgagggctcaagtttcaaatttgatgagaaaaatccgccacatatgccgaaagacaaaaacggtgacgccaacgtaatcaacacggtgcgcctgcatgtgaacaaaccgggcaacaagattctccgcccagagaccgagcccaaaaccggggtggttatgggccgcaaccattcggcgtttttgtatgaaaacaccgaaaccggcaagtggcggctacacattgtgacgcggtttgacgcctttttgaaccgcgggctgagtttgagcgaaacccgagcggtgcatgccgaagaggacgaagagtttctgttttcggtgactattggggcggcactgctcttagagatggacgggaaggatgaactcttttttgtaaagagcctcgcaccttcgctacagagccttgatatgcggccggccagcaccaccgccggcaataagaacatttggtttagggcaagcaagttacagaagttcaaggcccgcaaagttgtggtattacccaacggtgaggtgcggacggctcgggattaaaccatgtcgcgagtggtccatattggggacagcaccgaagagcttcaggtgcgccaccaacaattgatcgccaagagtcgcgagttttctggccccagccacaccgccccgttagaagacgttgacctgttggtgctctctaccctcaacgggctaggcctcgacctgcacactttgcagcgagcggtagaccacaacaccggggtagtggtctgtgacgaaggtttcatgcccaccggggtgttgctcccgttgtttgaggcgtggaaccacaccgaggttttgcacggccaaatagaagcgagtcgccccaccaaaaaacgggcctggcaactggtagtgcaagaaaaaatccgccagcaggcccagtcattgccccccgaccatcgggtggcgcaacggctcaatgagttggctggtcatgtgcgctcgggggacgccggcaacaccgaagccatcgcggcccgcatctactggcccgctcttatgggcccaaactttcgccgcatgccccgcacccgattggggcccaacggagcactggactacggctatgccatcgtgcgctctctggtggctcggtgcttggtgggggtaggcctacacccggctttaggcatttttcaccatggccgcagcaacccattttgtttggtagatgatctagtggagcccctgcgcccggtggtcgaccgggtagtggccgctgcgccggagcgctttattggcgaccttgacccggagggcaaagaggtgctccgccaactacttaaccaagagtttacctgtggcgaccaccaaggcctgttaaccactgcttgtagccgctacgccgagagctttcgcaattaccttttaggcgagggtgaaagcattgagttccctcgagtggctcatcactgagttgctgagtgcctggcgcgccatgtgggtcattgtcatgttcgacctccccacgatgaccaaaaaagaaaagcgtcgttatacccaatttcgtaaactattactcgaagaaggtttttctatgatgcagttttctatctacggaaggcaccacccgacccgcgaaaaagccgaaacaaaaatttggaggattacccaaaatattcccctacaaggcgaaattcgcatcttgcgggttactgaagcgcagtttgcccgcatggaagttttcagcaattaccgccgcaggcccccagaaagagagcctccgcagttggaattatggtgacgatgtcacatgtaaacactggtcagcaccccttttggagtgcctctagtgtacttgaacctgaataggtgtcctgccccgacgcgccacgccgccgcaatacacaaacgcctagtgtacttgaacctgaataggtgtcctgccccgact

SEQ ID NO: 846 - DNA, 6180 bp, synthetic construct
  source 1..6180: mol_type = other DNA
  misc_feature 1..6180: note = Synthetic
cggcggtcgatcgtctaccgccagaccagcaggacggccagacgagcctcccggctgttgtcagggtgtgtcaacttcggtcttgacacggctgtagttccatgcgtgtaatcaaagtccggtaacgcgtcgctccctaacaggatcacctctgcgaagcggcgtgccgtccgggacacacaacaggaccccgtatgacggctcacggcaacacgtcacgggccggtgcccgcgtgcttcccgagcagctgcgcaccctgattcgccaccgaggagaggagctggcaggccatgaagtatccccgtttcacgagacgacacgagcgaggtgatctagcccaagcgctagtccctgttcctactcatcgcgtgaaagatgacccctatgacgccgaagttgcacgactctggctcccacgaggagcctgctaacgacgttcccgcggaacccccgctcggactgattgcccctcccggcccgaactccaacaacgggtccgacaaggagccgttctcgaccggagatccggaccacaacggttccgccacacccggtgggctgccgcccgagaccgtcgagacgatcctcgcctggttcgaccaggtggcggtcccctaccggcgggcgttggaccgtgaccagattgcccgcaagtgggcgaaggatgccgggcgcgcgctggagctcgccgagtgcgaggccgaagaagccaacaacgttgcctgggccgcctacctcgaggaagccggcagtgagccctgcccgggcttccacaccgacgagccgaaggacccccggcatgaccccgacgctgctggatccgctgtggggcgggcccgtttgaggtgctccgagtgcgagctggacctcaggcgtgccaggaatgaggagaacgacgccgaggttgacttcaaggagtggcaggagcaccttctccgcacgctttcgtaccttgaccccgacttgttccagttcggggactgaagtgccgtccgggtccgacatggtggtcgtgcgatggtcgacgtgtaggcccaaaacggtgttgtgccaccccggagggtggcacgaaccgggttgccccgtggagcagagcccgcgaattgagttcttgtcaagacaagacgccaagtcgggttcaagtggggccgaccctacccgacccggcggccctgtgcacggccggactgcgacgcctagtctttcggtccccatcggataggagtagcggcatgaaaagggttctgggcctcgacctgggaacgaactcgatcggttgggcggtcgtcgacgttcccgagggcgacgaaccgggctccgttgtcgcgttgggttcacggatcttctccgctggcgccgaggccgccgggtttgcgctcgtcaccccggcgaaggaacgccgtcagaagcgtgcgatgcgccgccaggtccagcgtcgggcgaagcgtcgccagcggatcttgcacgagttgaccggcgtcagcttgttgccggctgacgacgacgaactcgaggcgctgctgggcgaggatccggcggtgctgttggagcggtcggcggcgggtgaggcgttgacgttgcgccaggtcggccgggtcgtctactggttctcgtcgaagcgtgggttcctgtcgttgcggaccggcgggggtgacttgaccgatgatgacgacgagcgcacagagcaggcccggtatcggcggccacaggttcatgcggataccggtgaggtggtcgccgacggccaggaggaccggttggtggcgttcctgcgcgaccaggcggtgcaccatcccgagttgttgaccgatgaggtgatcttcggccgcaggggccgcctgacgtatccggtgcggccgattcgtcgtgagcggttccttgccgagggcgggtcgtggctcgacgagttcggcatccacgggctcgtgttcttccagcgcagcgtctactgggacgagggcaccatcggcaggtgttcgctggatccggagcatggcggcgtgagggcgctgcgggccgatcgcctggcgcaacggttccgggtgtggacgacgatcgcgaacctgcgggtcggcgacccggagcggccactcgccaaggaggagcgtgaggccctgttcgaggcgttgatgacccaaaagacgctgtcgtttgcctcgcttcgttccaaggtcggcctgggggccgaggagccggtcaacttcgagcgctcggaacgcgagtcagttgccggcaacgagaccgacgccgagatgcgacgggtcctgggcaaggacgcatggggagagcttgacgaggggatccgcgacgaactcgtccacgtgctgttgggcgacgcccccgaacaccaactgcggtcggtcctggcgaagcggttcgacctgtcggacgaacaggtcgagcgggccctgaacgcgacattccccggtgggcgtgcccgctacgggcgccggacgttgcgccgcctgctagaggagttgccgggttgcgactcggaacgagacgcgatcaaagcggccggctacccgatgcccgaggaggtacgggcacagaggccgtttgacctcggcgaggtcacgaacccgttggcactcaagacgctgtcgcagttgggcaaagtcctcgcagcggtcagcggcgtgcacggccgtgcgggcggggcgccgttcgacgtagtgcggatcgagttggcgcgtgacgtgcgggccaacgcacgcgaccggaaggaggcgaaccagcgccagcgggccaacgagaaggccaacaaggacgccgatgctttgctcgccgaattcgctccgggggctgatccgacacgtgaccttcggcgccgtgcccgtctctggcgcgaacagggcgagcggtgcctctactgcggcgagcagatcggcgctgtcgcagcgctgggggcggcgaccgagttggaccacatcctgccgaggtcgcgcaccctcgacgacagcctcgcgaacctggcgttggtacacgccgccgagaacagcgacaagggtgaccggacggtcgtggaatgggtcggtgccgacaaggccgacgagatcgccgaacgggcctgggacaaccttgaaaaggctcaccggtggggcaaggtgcgccggttgagggccgaagacgttcccgacgacgtggtcccggaagcgctgatcgtcacgaccggctacatcaaccgcctggcccgcgacttcgtccgccacgagctcggcatcgaggccgaggtgtccaacggccgcatcaccgcacagctccgctaccgcctcggggtcggcaaggacccgggcgaccatcgccgccacgccctcgacgccgcaatggtcgcgatcagcgacaagtccactgcccggtccctggccgcccggttcaggcaggaacgcgactacggcaggcgacgcgacgacgactacgggtcttgggaaccatgggaggggctgcgggcggacatcctcgaccactacgacgggatcaacgtctcccacgtcgtgaaggggaaggtgggtggcccgtggcacgaggagacccgctacggcaaggtcaccagcccgcaccgcgacggtgacccgctgtgggcgcgacgcaggcccgtctcggacatcaagagtgcatcgaggctcgacgaggtcgccgacccggcagtaaaaaaggcgctcatcgccgacctggccaggcgcggcatcgacccggaggcgaagacgttcacgttcgatccgaaagacccgccgacgatgcccgacgggcaacccatcaagaaggtgcgttgccacctgtcgctgccgggcaaccgggtgcttcgccccgacgccgaacccaagacgagtgtgacgatgtcgaacaaccactccgcctacctctaccggaatgccggaaccggccgttggcgcatccgcgtcgtgccccgctttgaggcgttccagaaccgtctggttcccgccaagcaactacggggcctctacgccgaggaagcggaggagttcctgttctcggtcacgccgggctgcgtcgtgcacctgccgggccatgaagaagccgaactctggaaggtcctcagcttcgaagccgacggccggatcaggatgctgccgatcaacgactcgaccgatgcccgcgccgtgcgattcggctcaagcaggctcagtggcctggacgcaacgaaggtcgtcgtcctcgccgacggccagttgcggacggcacgggactgaggcgttatgtcacgagtcgtgcacatcggcgacaacgtggcacgcatcacggtaggccatcaccaactcaacgctgagactcgatcgcccgagccgaagactcatacagcgccactggaggacctcgacgccgtcgtgctctcgaccctcgacggcctagacctcgaccttcatacccttgtcgctgcagcccagcactcgacggcagtgatcgtgtgcgacgaccggttcctaccagtcggggtgctgctgccactgttcggagcctggaaccacacggagatcctgcgcgcacagatcgacgcgagtgcaccgagacgcaagcgttgctggcaacagatagtccgccagaagattcgggaacagtccaggtccctcgacccagactccggaacggcccgccggctgtcggtgttggccgacgaggtccgttcaggggacgtgaacaacgtcgaggcgacagcggcaaggctctactggccggcgctcatgggtccgacgtttcgccgccagcctggtacccgccttgggctgaacggcgcgctcgactacgggtatgcgatcgttcgatccctggtggcgcgctgtgccgtcggggtcggtctccacccagcgctcggcgtccaccaccacagtcgcacgaacccactttgtctggcggacgacctggtcgagccactccgcccgctcgtggaccgggtcgtgtcatcgaacccggagcgattcaccgacgcgctcgacaccacgggaaaggatctgcttcgagggctcctcgaacttccagtccgctgtggtgaacaccgtggactgttggcgacaacctgcgagcgttatgcgctgagtttcagggactgcctcaccggggagaccgacaccatcgagttccccgagtacgacgatcgttgacccggtaagcgagtggcgtgctgtgtggctcgtcgtcatgttcgacctgccgaccacaaccaaggccgacaagcgccactaccgccacttccgcgacctcctcctcgacgaagggttcgcaatgttgcagtactcgatctacgccaggcacctggcaacgcgggagagggcggcagccaagacagcgcgaatcgccgccaacattccattccgaggagaaatccgggtcctgaaagtcaccgaagcacagttctcccgcatggaggtattcagcaactaccggcgcaaggaccccgaaagtgagccgccacaactcgaattgtggtgacctgatcacgcgaaaccgcagaccaggtcgcctttcggagaccctctagcgtacttgaacccgagaaggcgtcctgccccgactacttatggtattgcaatcgggatgactggatgagtttgtccgtatctgttgatggcacccgtcatgaaaggaaaaacggacgtatagtgagaagccctccgaggctagccgaatccttcccggctagtccggggggtttcttcttctaggcttgacaaacaacactaaatatgctatactatagcaagaggaataaattatgactaatatttactatgataatcactatgtcggtactcgcacagacttcgatacaactcgcaagtcaagagacattgccgaatacatacaaggttatccaaacagcaacatttctataatcgaacccagcgctatttcattgcgaaactcggaatcattgatccattcaatgcatgattacgaatattccaacgcattgcatagcgggcagtcccgcgccctagcggagtcccaaggatttacttgggacgaaggcatctggaacatggctgttcattcaacagccggagttctcaacgccattcacgacgcagtaacgactgcgccaagcacctttggatcccccgactacggttggagccgcaacgcgggcgagaacatccacggcagcctgtcatcgggcctgcaccacgcccgacctaactacggcaagggcttctgcacggtca

SEQ ID NO: 847 - DNA, 23000 bp, synthetic construct
  misc_feature 1..23000: note = Synthetic
  source 1..23000: mol_type = other DNA
aggagggtcacctcgaacgagtgggttacggactctattcactagccgctgctgaatttaacgaaaatcaaagcatcctggaagtcgtagcaaaagtaccgaagggcgtgctctgtcttctttcggcactacgattccacgatctgaccactcagaatccattcgagatatggatcgcgatcgagcgggatatgtggatacccaaaatggatgcggttcgccttcgggttttcgggttctccccgaaagtgtacgaagcgggcattgaaacccacacgatagatggcgtggaagtgaaagtatactcgccggcaaaaacgatcgccgactgtttttactaccaaaaaaccgtcggccttgatgtctgtattgaggctcttcgcgatgcgtggaactcgcggaaagtgaccatggacgagctcttccactttgctaagatccgcaatgtgaaaggcacaatacttccgtatctgaacaccctttcgtagagaagatggtaaaaaaagagataaaagatatcccgtcttccgttaaggaccgcctaacgaataaagctaaggagcggcaggaagaggttcaaagtgtcttggtgcgctacggcatagagaggtttctctaccgtcttagcgtatcggaatacaaggatcaatttctcctcaaaggcgccgcgcttttctcgctctggttcgatgctcctcatcggcccacgaaagatctcgatcttctcggctttggatcgaacgatattcctgcgttggaagaaacgatcaaatcgatctgtcggatcaaaacggaggaggatggcctcgaatttccggccgacacagttcgcggtgaacgaatccgggaggaagaagcgtaccagggtgtgcgagtgaagtttaccgcactactgggacgagcgagagtgccccttcaagtcgatatcggtttcggggacgcggtcacccctaagccggcgacagcggagttcccgacccttttggatttcccagcccctaacctaagggtctatccaaaggaaaccgtcatggcggagaaattcgaggcgatggtgaagctcggagaggtaaacgggcggatgaaggatttttgggacctgagttatttgatagaagagttcgaattcaagggtgaactgctgcaatccgctctgcgtgcaacctttgaaaatcgacggtcccattttccgaatgagttgccggtagcgcttacggacgactttgcagcaaatacaatggttcttgctcgatggaccgccttcatcaaacgaaaccgaatcgaacgctcgaaagatctttcagtaatcgttcagcaactgcgaggtttcttcggaccaattatcgagtccgaacgagggcaaaatcgattttcaatgagctggagcaaagccactgggtggtcctgaacggcgcccgctcagcgttttcagctagtcgaggggcgttctgctgagactgtgacatagtcccggacgcctgaattgccttcgtcgccggaatcgttatctagccgctttaccgcttcgagcatctgtttttgatctgcttgggcgtaaatagtggtgatactcatatccgaatgagcgaataaattctgaacgatgagtggattggtgtttcgcttgatcaattcgcttgcaaagtagcttcgaagatcgtggaaatgatagttctcctctctcgttccgtcttttttgtttatccccgcgtttcgtagggccgaataccaccgcttacggaagtctttgaccggaaacggtagctgcccgtctgcaatcatgtctttcagtacggtcgtcgccgaggcattgagcggtacgagtcggggtggccgcccctttgaaccaatcaccagaacttgctcatgctcaaagtctataaagtcttcgttgatggccatcaactggccgcgacgtagcggaagattcaccgccaaaactatcagtctgtaaaggagcgtgtctttctccagctccgtccataggtctactttctgtttttcatttagcaatcgtctcctaggcgggggctctggcagagctttcacatactgcatcggattgcggtcgagaattccctcctcgcacgcgaggctgaaaatcttcgatagcgtagacattattcggttgatcgaagcaggtgatagtgcactttccttctttctcttattctgtcgattctgtagtttcgcacggcaatcccgacaatcctgcggagtgatgctggaaagcgattgtttcttgaaatgtcccagcaggagcctaatgtagaggtcctttgcacccttgttgacgttattctgctcaacgtacggccggtacttcttctcaacgaatgcggctaaggtagtcgttgtgtcggcgatattgtagctgtgttcgaaagcagccttaatgatttgtctttcggctagttccgcttctcttttcgtctgcgcctccgggatcaccttatgaataacctttcccttgagacgtttgtacatccaccaacgagcctttgcataggcgggatgagacgattgtatacgtttgccgttgtatcttttgtaaactgacatatgcgttgaaaataaaattggtgcgataatgctccggaaacccgaatcgatcccctctgaagatgcaattcgcaacttctattcctccgcttgttagccgcttatttattgagaactagtcctaaatggaaaactaagtggtgagaatatgcaccgtggtgcatttaatagccaggccgagtttggtgggtcgtcaaaaatggttggttgcaagatggttgcagttttttcgacggtgaatcgtcgtaagtatactaatttgaaagtttacgaggcaggcctctcgcggcttgtgcgaaaccgcgaaaaatggggctttcgaaattcatcgaaagccccatatttattggtcgggacgacaagatttgaacttgcgacctctcgcaccccaagcgaacgcgctaccagactgcgctacgtcccgatattcgattgtttaggttaagtttcgcccgccgaaatgtcaaatgtttgccgaaaacgaaagctgcggcgcgaaaaaagattgtccgcaaaggccgccgaattgtaaaatagaggaggtgctcccacggccatgtcgataccgaccatcctactgctaaaccgctaaacgttgaagccctgatgtcgcaactcttaaaatattgggttcctaagaccttcaagaacgagaggatcttcgcgtttcttgcggtcgcgggtatggcgatctttgagtttgcattcggccgcgtcgggatgatcgcttcgttcggacaacttgattttgcggcggatttcgtcggcgccctcttcagttttgcgttcctgtcccttacgttctggttcttctatcggtttatcttccacgcattcaccgcaaagccggggatacgcgtcatcatactcgctctctttgccgtaattctgtatgcggaatacagctacttacgctcgatcggccgctttaccgcccataccgatataacctatgcgcttggaaccaacagcagccaaaagagcgatacgatcgcagcgttttcgagttttgcgtggcttccggtgttcgcgatcattcttgccgcttcgatctacttcctgatcagagaaagccaccgaacgactcttaaagacttcctaagggatgtcggtgtcattctctttggctaccttggattgtattttctcttcccgcttctggccggccaggccgcttacagctcgtcattcgacgcgttcgctcagaccaccataaactacgcgatctcgggaccaactgcgatcgccgcaccgccggcacgaacacctctgccgagttttgctaaaccggacacggtgcctgtaaataacgtgatcgtcctattcgacgaatccgtgaacgggcggcatctcagcctgaacggatattcgcggccgacgacgccctttctcaaagaacttgaaaaggccggcattctaaagaacttcggcgttgcatcatccacatatacttccagtcagccgagctatgactctttcatcgttggtgcgaatgacgagatgctcgaaacgctttcgctcagagagcgaatgtcattgcctacgatctttcaatacgcgacgacgatgggttataagacctggtatcttgacggacagatgaaagagtattggggcgggattgcggacgacaaacaatacatcgatcagatcgtgacacttgcccaaatcgaccccgatcgcgtcgaggactatgaacggaacaacggaagtgttatgacggatgagaatcagcgcgcagggctaaagcaatgggacatcgatctgatcctcgcggaaaaggtgcgaagtctattcgagagttcgaccggaaacttcgtgttcgtctataaacgcggcatccatttcccgtatgagaagaactatccggccgagaatgcgatgtggcagccgatctacaagttcacgagccagtgggaggctccgcccgcagaggccgcggccgggataacaaactcctatgacaatgcgttgctttacgggctcgatccatttttcaaaaagctcggagttgatcgtccgcttccgaacaacacagtgatcgtttacacatcggatcacggtgaaacattcgcgtcgaacggacgagctggccacggcggcgactcgatcgatgaagcatcgatcccacttttcataatcgggctagaaggcagaaaggtcggctctcttacgcgggccgaacacccaaatatcttctccactttgttggatcttctgaacgtccccaaaaacacctggaactcggcatattctccttcactttttgataatgaagcgcgcgatcacgacagatactatcgatcgggtgacggccgaaggcatttgttcgagaactgaagatctccgagggagctagagttgccgcgcgagcatttgacggagttcgacgagatgaacggcaagtctgcgaagggccttacgctgctcgtcggagagtccggttgatgcggccgccgactcgacgacgtgtacgtcaggcaatgagtcaaaaagggttggaatatcagaaaccggacccttcacaccttcgctcgccgcagcggtttcttttgccgccttttgcggcgttcgggcttccgtctggagtttttgccgtgcacccgcgatggtgaacatctccttatagagaagctgcttgatctttagagcgatctcgacatccttacggcgataactgcgctgcccagacttattcttctgcggtgagaaggtcgggaactccgtctcccaataccgaagcacatgcgcttgaactccgaccagttcacacacttcgccgatcttgaaaaagatcttatctggaattacgttatccacaggcgtcatcgcaaaagttttgtgttaaggttttctataacacggtcgggcgttattgtatgcatttacaagacttgtgtcaacaacagcagatgcgaagcgaatttgagttcatggattacattaaagagcggcataaacttaaagtaataggtgatgactgcgccgttctgccattgaatggccaatcagatcaactatttacggtcgaccttttaatagagaatatagattttcgtctcgactggacaaccccggctctccttggccataaggctcttgccgtttccctttccgacattgccgcaatgggcggaacgcctaagtacgccatgctctcgctgggaattccacaggggctgtggaaaacgtcgtttcttgatgagttctatgaaggatggcatttgctggccgacgaatttggcgtcaaattgatcggcggcgacatatcgaaagcaagcgaattggtgatcgattcgttcgtgatcggcgaggtcgccaaaggcaaggcgttgctaagatccggtgcaaaacccggtgatctcatcttcgtaacaggcgaaatcggcggtgcatccctcggccttttgctgctggagaatggaactcgtcccggcccaaatgtcgaagcgctcctgcagaacgcagttctaaggcaacttaaacccatgccgcagatcgcgataggcaaagccctgctagataaagacttagcgaccgcaacgatcgatctgagcgacggcatttcttcggatctctcacacatctgcaaagcgagtggcgtcggtgcggaaatcgacgagccgaagcttcccatcgcaagaggggcaacactcgaaatggctctcaacggcggcgaggacttcgaactgctcttcaccgttccacccgaacgtcagtttgaggtcagtccccttggagctgtcgagatcggcagaatcgtccccgcgtcttccggaatcaagctaatcggcgagaaggaagtacgcaatatcgagccaaaaggctttgaccatttcgtggaccgctaacccgccagtttcggatttgagcgaaaaagttctcggtaagcaacgcgatagtaaaacgcaacgaaggcattcgcggcgactagaaatatcgcgaccggcagtcctgaattatctatgaacgcgtgataggcgaagatattgacgatgatcggtgcgatcaatatggtcgcaagcggaacgaagcgccctgtcacgaataaaatgccgcacgtcagctcgacgatcttcagcatcgggatgaaatagccgaccgcgaagatcccgtcgttgaacgtcttggcaacaccggtcaattccggtacaggcgcaaggtcaagcagcacaacgaccgacgcaaaaataaaaagcagacccatcagcgtacggacgatcaccatcgcgatcttcatagacttcctccttctcgcaaactgtgtgggcttgtagtttacgcatttatggatcgcccgccaagcagtatttcgacgagcgatattcaaaagtttcggccgccggttgaacttctccgagccgacttagctctccggatgcatgcaagcggcatatattgtttacgaacaaaagacaacgacaaccgattgtgcttgcgttattttgcactttaggagtaaatttggactttggacgcgccgtctgccatcgaatagaaatacgccggcgagggcttcacgtcactgccgcgtcgaacatgatcggatcatcttttaaggaggctgcacgaacttgctgaccggacgagtactgttattgaacttttcgtatgaaccgcttggaacggtcggcgttgcccgtgccgtctgcctgtggtttcgcggtgccgtcttcgttgaggagaacgacggcgagaatgttctgcattccccatcgacgacgtttccggtgccgtcggttgtgcgcctccgccactatatccatctgcggcgaaagaacaacgagaattcaatgaagcgtgcgaggatctatattcgtgaccgctaccgctgtcaatactgcggcgaacatcggcacgcgaaagacctgacgctcgatcacatcctgccgcgggcacagggcggcgagcatacgccgcagaatcttgtgacagcgtgcgttaaatgcaaccagcggaaaggcaatcgaacacccgaccaggcacgcatgccgcttcttacctcgcagaaactgctgcgtctcggcctcgaccacgtccttctctgccactacgcagagtcgcgtcccgagtggaagaagtatctcttcatcgacgagacaggcgacgacgaacgtctccaggccgtcgcctgatccatccgcattccgctgcgccagaacggcccggccagcgagcgaatgtgtcgctcccaaaggtttgcaaacgtaaatccttcacgcttgcgaacaagactgtccttccacttatcgccaaaacaaaaaatgctctagtccctcacaattcccttgacagatcattttcatccatcgtaatatcgcaatattacgatcaccatatcgtattcgagacaactcgatggacgtgaattatgggtgcttcaaagacagatagtttcaccgagggccagcaggcgatagcgtcgatcgccaaagctctcggccacccggcgagggttgcgatcgtcgaatacctattgaaagttgacggctgcatttgcaatgacattgtggacaaactcccgctctctcaggccacgatctctcagcatctgcgggctctcaaggacgccgggctaataaagggcagtatcgagggtaacgcgatctgctattgcgttgaaggaaagaccgtcaagagactgcagagttacattgcaggaatttcagcaaagttgacggcaaaaggcacggagtgctgctgaacattatggaaaatgcaacaacgttaacaaaaatagcgagagacaaggacagcgaagagaatagtgccgcctgctgtgaacccggctgctgttctaccgagcccggaaatgcaattagcgccggaaatttcgtgcctgaaaaagcggcggcgatggatgatgccgcgaagttaaaagaactcgttcgagagaagtacggtgcgatcgcttctcaggaaaaagaagataatcaggcctcgtgctgcggctccggcggatgctcggacgaggtttacaacataatgaccgaggattacgcctcgctcgaaggctacgccgccgacgccgatctcggcctcggatgcggcctgccgacgcagttcgcgaagatctctgccggcgacacggtggtcgatcttggcagcggtgcaggcaatgattgcttcgtcgcacggcacgcaacaggcgagagcggccgcgtcatcggggttgattttactgacgcgatgctcgaaaaggcccgcgtgaatgccgagaaactgggtttcactaacgtcgaatttcgcaaaggcgatatcgaggagcttcccgtcgatgacgatacggcggatgtcgttgtcagcaactgcgtgctgaatcttgtgccggataagaacaaggtttttggtgagatattcaggacgctaaagcccggcgggcatttcagcatttcggatattgttatcgaaggtgaacttcccgcatcgatcaagagtgcggcagagatgtacgcaggctgcgtttcgggtgcgatccaaaaggatgaatacctcgggctgatcgaatcgaacggctttacgaatctcacgcttcaaaaagagcgcgcgatcgacgtgccggacgatattctgaagcgctatcttggcgacggcccgttgaacgcatttcgcgaaagcggcactggcatctacagcatcaccgtgtacgctgaaaagccagacgctgccgcgtaaataaatatctgcgcaataatttacccgtaaccgagaggacggaacttgccagagcgaagggctcgcacgttccgtccttctccttgcgcaaatagtgtaaaatgcgcattttacctttatgaaagcgtacgactcggaagaagcgatcctcgccctcgtcgagcagttcgaggcgtgctcgatcccgcgtgatgagtggaagcatcgcgagcacttggtcgtcgcgctttattacgtttcaaaatttgatctcgacgctgcaacaaaaaggatgcgtcgcggcatcttacgtttgctcgaacacggattcggcgtggatctcgagaaagagatgccatatcacgagacgctcactgtcttatggatgaatgccgtccacaaattctggagcgaaagacgtgagcatccgctcccgcagatcgccggcgagatgatcgcgaatttggacaaggatcacccgctgagatcctattcgcgggagcgtcttttctccgacgaggcccgaaagaatttcgtcgaacccgacctcacgtgatcggtgttattcgagcacaaatgatccacgctcacaatttcacgccctaaacggaaagtgcccgggtgacgttgccatcacgcgggcgtgggttacctgttacggatatcctacgaaatacttcttgttataagaagcgacgtattctcttatctactaaacaagggtatgatatactaaaatcatctaagattcaagtacaatatccctaacctcaggagatcctcaatgtccccacataaattggtcctaggcctcgatttaggtgtcacgtcgatcggttggtcccttattcaatttgatctggacgaagccgggaaggtttctcgcagtgacgacggacaggtaagcgccagattggtcggaaccggcgttcgtatctttccggcgacaactgaagacaagacgaacgagccgaagaatgccaagaggcgcacagctcgcgggcagcgtcggctcgtaatgcgaaaggcaaagcggcggaacaaactccgtgaacttctttctgcgaataatctgcttcccgccatcgattcggcgacctcggcttcggagttccacgctctcggtgatccttacgacctgcgtgttcttgccctcgaccagcgcctcgaaccatacgaagttggtcggacactctaccatctctcgaagcgcagaggcttcaaaagcaatcgaaaatccggcgagtcaaaagaagacggtgtcgttcttggcggaatcaaggaagtcaaggagaagatggaagcgcaggcgatgcgcacggtcggcgaataccttcgatcacaggagaagaagcgaaagcatttcactcagcgtgacatgatcgaggatgagttcgaggcgatctggcaaaagcaggcgagctttcacccaacgctactaactgatgaactgaagaaggacattcacaacgcgatcttttatcagcggccgttaaagtcacagcgtggattgatcggcaagtgtacatttgagaaggacaagaaacgttgcgatctggcacgtcaagaagcacagcggcttcgttactggcaagatatcaacaaccttcagctccaggacccgaccacgcttaactggcgtccgctcacacttgaagaaaaaggtcgtgtcgccgccaagcttgaaaacacgaaagagcttacttataagggtcttcgaaagctgctcaaggtcggtgaagatgtgcgcatcaatttggaagcgaacgacaagaagttctatggcaataagtcagcttatacctttcgaaaggctatcggagagcgatgggatgcgttcaacgatgaagaacagaatcgccttgtagaggaacttttccggatcgaagacgaagacgcgcttgggcgacgtttaggcggcttctgggcctttggcgatgatgagatcgaaaagctcaagggtgtctggcatcagcttgaggacggttatagccgtctatccctaaaggcaattcgtaaggtcttgccgaaaatgatcgatggcctgcgttatgacgaagccgtgcgcgaaatctacggcgatcaccgtaaacaatttggcggcgaagaatttcagaaattacagcttccgtccaaggaactgaggaatccgatcgtgttcaaagccctttgcgaggtacgaaaggttgtcaatgcgatcattcgagaatatggccttcccgctgagatacgcgttgaaatggcacgagacctcaagctcacgaagcttcaaaaagaacaatcgatgaagcaggccaatgcgaacaagcgggcgaatgaggaggcagaggattttttcaagcggaagttcaacctagagaatatctccggcaccgataagctgaaatatcgtctctggaaagaatccggcgaacgctgtccatatacgggcaacccaataccgcccgaatcccttctcgatgacggccttgttgacctcgaacacatcattccgtacagccggtgttttgatgattcatatatgaacaagaccatctgcgatgcaaagtataatcgcgaggtcaaacgaaatcgtgcaccgggtgaatatcttgatcgtgagagcgaggagtatgctcaactgatgcggcgcgtcagccttcttcctttcggcaagcagcggaaattcaaacttacgagtcaggaacttgagaccaacgattgggctggaagacagctgtctgatacgcgctatatttgtcgcgaggtacgcggctatctccgccagctatatccgcatagtcccgatgagaataaatatgtctcggtcgtcgcaggcggtgcgacagctcaactgcggcacgtctggcacgtcaatgccatactctcagacggcgatatcgaggtaaagaaccgctgggatcatcgtcatcacgcgattgatgccatagttgtcgcgctttgcgaccgcagtctcttccagcgcatctcgaaacttgcgggccgcaatcgcgagctgatgaaacggatcctttcaggattcagcgaaccatggccgggctttttgaccgacgttgaaacagcgatgaattcgctcgtcgtctcgcatgccccgacaaggcgcattcggggccagcttctggaagagaccgcctacggcccgacatcgacgcccggtgtatatgtcgtcaaaaagtccttggaagggataacggacaagcaggttaagaacatcgcagatcgggcgatcaaggagatcgtcgaattgcgtctgtctcagttcaacggtgattccaagaaagcgttcgtcgagccgctccttcacaaagacggcaaaacgccgatccgcaatgttcgcgttctcgtcacgatgtctccggaaacggtggtcgggatcaagaacgagagcggcgaaatttacaagtattacccgctcgccggtaaccaccacgtcgatatctacgagaatgcggacggtgagagaagagcggaactcgtgccgcgattctacgcggcacagcggaattggaaaccaagggatctaggccctgaatggcggaaactcttctcgctttgcgcgaacgactacgttgagtttcgcggagacgacggcgaattgaccgtttatagaatacagaagatgtccggcggcggaaccgtcgtcatcatcggccgccctttggaggacgcgagatcggaatacgttaccggtgtcgtaaaacagcttcagggcaagaatctgaagaatatcacacgcaagcttcaggtcgatccgatcgggcgtctttcaaaggcaagcgattagcttttgagaaaaatttcggttcgcttgtcaggttgaaaaactatgatcaagcgaactgtcgagatctccactccgggctgctatctccacaccagggacgcacagctcgtgatcgaaaagaacggcgcgaaggtcggcagcgtcccgatcgaggatctaggtgtacttatccttgacgggccgcagcttcttatcacgtcttccgtgatgagatgtcttgctgagcagaacgtgtcggtcatcttcacggatgataaacatctgccgtcgtctctcacaattcccttttcggcgcattccatacagacaaaggtgctgaacagccagatcggtatctcggttcccgtaaagaagcgactctggtcgcaggtggtctctgcgaagatcgcgaatcaagctcgttcgctcgacctctgcggtaaggacggcaccgctctaaaagagatcgcgaaccgcgtaaaaagcggcgactcggagaatctcgaggcctacgccgcaaagatctattggcgcaaactcttcggcgacgattttcggcgtgatcgttacgcgggtgaccacaatatgctcctgaactatggctacgctataattcgggcggcgaccgctcgcgccattgtcggcaccggcctgcatcccggccttggaatcaaccacaagaatcagtacaacccgttcccgctcgccgacgatcttgtcgaaccgctccgaccctttgtcgatgttcgtgttaattcgatcatcgctaagatgcggcccgacaccgacgatcctgaacgggagatcgtactcgacaaggagacgaaagccgatctgctgcgtctgcttgctgatgattgctcgtatgacgaccgcacgcttccgatgctcgtagctctcggttattacgttgcaacggtaaagcaggtgatgatgggcgaggcagcgaaaccgctgatccctatctttgcgtgaaatcgaagcgttatgagattttttggaggactggatactgtgtggatggttgttatgttcgatctgccgatggtctcggcttacgacaaacgtcgatatgcacaatttcgaaaggtgctccttcgtgacggcttttcgatgctgcaattctctgtctatggacgacactgtccgtccgaagagaactctgaggttcacgaaaaacgagtcgtcctagcgttgccgcctgagggaaatgtccgtataataaaggttaccgagaaacagttcgcccgaatgaagacattctatgggaaaaagcgccgcaaaacagaagaaccaccgctccagctcagttttttctgagcctcggcggcggcaacttctttcaagccagccatttacagccgacctagtttagcagataagagaatcgtcgcaactcacaacatgaaacgacaaccacttggagacctcgccagtttagcagataagagaatcgtcgcaactcacaaccattttgtctttcgccgtcgcgttcttctagtttagcagataagagaatcgtcgcaactcacaacgaaatgaggtccaatgatcgcatctatccaagtttagcagataagagaatcgtcgcaactcacaacgcgatctcgttccggcgcgtctcaagctttagtttagcagataagagaatcgtcgcaactcacaacgttccaagttcgttagtctccttcgacgagtttagcagataagagaatcgtcgcaactcacaacaaagatcgcgaggtctgttgtgacgcgttaagtttagcagataagagaatcgtcgcaactcacaactctcctttgtttatttgagtaactaaattaagtttagcagataagagaatcgtcgcaactcacaacgattcgccttgtaagccgaacattctccatagtttagcagataagagaatcgtcgcaactcacaactcgttcaccgttgcaccctcgactcgaacaagtttagcagataagagaatcgtcgcaactcacaactcgatgatccggccggcgatcgcctgcaggagtttagcagataagagaatcgtcgcaactcacaacaggaggaataaaacaagtggatatcgactaagtttagcagataagagaatcgtcgcaactcacaactatctccctcttgcgtcgcgtccgctcgtcagtttagcagataagagaatcgtcgcaactcacaaccgacggatggcgggaagctcgggcttacgaagtttagcagataagagaatcgtcgcaactcacaacacggggtgggagtgggtggcctcgaaaagcagtttagcagataagagaatcgtcgcaactcacaacttgttgtagtcgagaacaggacgggaccaggcacgggagacaaaacagtctttccggcgatgcccacaagtcgtgactttccattaccttctcattattccatgactgacatagctgaggactacggggcaaaagaaacagttaaagtaaaaggcgaaaagggcgagaagagtagaaaaatcaaagcatcttcaacaagtgaggcggtagaagggcagtacaaaatggttgtttttgagtccaaaaatattggagataaccatgtaatgaggcaggacgttgacggcacttggtcaagtaaagacggcggagggtcactcgtgaagggaataaaagaccccgaggcctattatggggagaattttaacgatcctaatgcaaaaattacctatttctatagaggtacggacaaattaggtcagaagaaataagtataagaatggcagtatcattatgaagaatatactaaaacacttgcatgttcagattgttatgacgatggcaatttcgcttatctcagtatcaggcgtcatggcgcaaacgcccgggtctacagatatgaaaagcggtgttagcgactgtgttaaggtgtctctagtggcggattcgaatttactcgaaaaggaaggcacaacttccttgaatgtaaaaatcgagaacgtctgtgccagtgaagttcgagtttctgaaccgtcgttcgtacttgagaaaccgaatattggcaaaaaactaaagtcgggtgacaaacgtgtcgctcgaattgtgaaagagaacgcaacagcgcttgataactcgctcaacacaattgaatctggtcgatttatcgagtttaatttgtatactcgcgatttgcgatggaaagattcaatttcttccattgatgtgtttcaagatctctttaccgatttgaatctaaccattggaatgtacaatctttacgcaatggtgagcatcgaacgctgcgtaaatgagaacgataagcccttgcaaaaggtaacatcaaataagctggagatgcggtttgagggttaacttaaagctctcgggctcgaatacggctatggaaacaacatattgaacaaaggaagtttaagggaacaaaggatcacggttccgggcgttggtgttcgtttacgacggaagcggacaatttgtagcggagtattccactcaaatcagtcagacaccgcagacgagctatttgacaactgaccatctgagaagtccgcgcgtgacgaccgatcaactgagggccgaaccgaaacctttggccaatcgggtgatataccagttccggcattctataggagatagcgtccgggaattatggcgaaacaggaactcgaaactgttgaccgggatacaataagggttgaaaggctatgaaacgattcttcattcttgcacttatattgcttggagtggccggttccatatttgggcagaaagcaagcaatacttctgaccaggcattgcgaggttcgggccgcgtgaatccgtcaacgctgggaatggagttcgatcttccgctgggcagctacgcgggtcgcggtattaatgtcccgatatctataagctattcgtcaaagcagtggagaatggaatctgccggctcgattgacggcgggatcgtcacgggcggctgccgcaccttgtaccatccaagattcagcgaacgttccgcttctggctggaccaccagcttggccacgccgtatatcgaatataccgacctcgataatttttatgacgacaagggctttccatacgatttcgggttgtgtgtatatgctcctccgcctacatccaattcatattcctgggttcgaaggctgacgattcatctgccaagcggcgaaagccatgaactgcgtgcggatgatgtggttcacgaatattcagcaagcagcacgtgtccgccatcgggtggatattcctgcgatcctgaaacgaagtggcttcaatcgaactggaatgcaacctattacgcggttgacgggtcgaatatcaggtatgtcgaaaattcgaatacgaatacctatgttctttatatgcctgacggctcgaaatacgaattcgacaatgccagaggcagtgtgtacggctacaccgcacgaaaggcgaacaagttcaccgaccgtaacggaaactatacaagctacaactcgaccaccggtgtttggactgacacgctgggacgcaccctttcggcgccgatccagccgaccgctccgagctcgccgacaacaaatgaagccccgatcgaatacagtctgccgggaatgaccgggaaatataaattccattggaagaacttgaaaggtgcgacagccgccgaaagcgctctcacagattttaatcaggacctgaaatatacaggcgataagatcactcagactaccaacggtaactggacatcgcatccatccggcacgtacttgtttcactcgaacgctaatactcagttcgtacaatccagttcaaatgttttcaacccgatacttctaaccaagatcgagcttccgaccggccagagctatgaattctcatacaatatctacggactgatcgaaaggataaagtacccaacgggcggcgaggagaaattgacccacgaagccgtcgccccgctgacacagcccgcttatgacgatgaagtaacgccgcagacgaacttcggcgttacaaaccgaaaactatatatgacctctggcggtagtacgttttatgagtgggcttattccgccgttcacgtcgatccttccgggtacaaggtaagcgctacaaatcccgatggcacgataaccgaaaggtttctgcatcaaggtgatccgccctgcaccgggtgcatggtcggaacatatggatatgacaatgttcttgcgggaatgctgtatgaacaacgcagctattcgaacacgtcggtacttgtttcaagaaaactcgttcattggacaaaaaagacgtttactccgacatcgccgtcaatcgaggctgactggcaccctcgcgtcactcatgaagaatcgattgtttatgacgcgagcggcaacggcgtttcggcgactacaaagtacgagtacgagggcgatcttgatcttcgcgatacgccggttctggtaaacaagacgacgcaatatgcgtttgtgccgatcagcggcggaggtggtggtggtggaggaggttcttacctgatcccgcccgacccgcacgaaccgcctgaaccgaatccgacgccggtgccgacgccgatcccgccgacgccggttaagatcgttgaaacgcagtatctgatcagcgatccggcttacgcggcggtaaaaagctattacaccgggcagaacatgttcgggctggttacggcttcgcaggtaaaggacggagctggcactattgtttcgcggagcgagaccgtctacgacgaatccggcagatcacccggatatcgcggcaatccgacaacctcaagaatttgggacagcacgaaaggggttgtcacgaatacgagcgcttatattgcaactcacgcaaagttcgatatctacggcaatcaatatgaggcaatagatgcgaaagggtgcgttacttcgacagagtttgataccacataccaggcttttccagtagaagtaactacttgcgctccgtctgacgggatctatggttcaagcacaccgttcgtttcaactgcaacatttgattttacaactggcttgccgttgacgactaccgatgcaaacggtctgcgaaccgagatcgagtacgatactgcgacccggcgtccgagatttactcgcatgttctcaggatcgacacaagtcggaagtactacggagacgatctatcatgatgagccgaataactattgggtgaagaatcgcgcccagatcgacacgaacctctgggcggaaacgatcacgtattacgacgggcttggccgcgcgtggaagacggaggaagtaaattcgaacggaaacatctttgtcgagaaggagttcgattcggatgggcgcgtgctgcgtatcagcaacccattccgctcgggcgaaacaaaagtgtggacgacaaatgtctatgacgaagccagccgggtaaaggaagtcgtcttgcaggacggctcgaagataaaaacggattatggcgtttctgtcaccggcgttgtcggtattaccaaacaaataaccgatcaggcgggtaagaaacgagaaggcattacggacgctctcggtcgaatggttcgggttatcgaagacccgacgggtgtgaacctgagcacggattacgtctttgacacgcttggaaacctgagaaggacgatacagggcgagcagaaccgtttctttatgcacgacagtttgggacgacttctttttgcaaagcagcctgaacagaatgcgaacgccggctttatcgcgacggatccgatcacaggaaacacggcttggtcggtgaaatacgaatacgacgacaatggaaatatcacaaggactacggatgcaaggggcatctacatcgacggggcatatgacaactttaaccgtctcaagacaaggaactactccgactcgacgccggatgtcgatttctactacgacggaatatatcttgatataagcgatgttcctcaaacggccacgggcagcgttaagggcaagacgacgggcgtcagatcgagcgtgtcgagaacgaactacacgagctttgatgatctcggacgcttgctcactcaccaacagatcaccgatggtcagacctatccgacaagctacacctacaacctctccggtgcgctaatcgaggaaacatacccttcgggtcgcgttgtgaaaaatacgctcaatggggacggcgatctagcacaggttcacgcaaagaaaaatgcgggcgatttcttcaggccgtacgcctcgaacatctcttacaacgcgagcggtgccgtcgagaaaatgaagctcggcaacggtcgatgggaaaccgctgcctacaacaaccgccttcagatcacgcagatcggtctcggaagcggttcaagcgacacgagtcttctcaaacttcaatatagttacggcgataatacgctaaacaatgggagcctgagagaacagaagatcagtttcaacggactcgcaaatccttttgaacagacctatacctacgacgatctgaaccgtctccaagtagcggaggaaaaagtttccggcagtacgacctggaaacagaccttcgtgattgaccgttacggcaaccgccgtttcgacgccgccaatacgaccactcttggaagctgcacgcaggcggtctgcaaccctctcataaatacatcagataaccggttctcctcaggccagggctatgcgtacgatcaaaacggcagtgttacacaagattccgagggtaaacgcttcgcatatgatgcggagaaccaccaaacgaaattcttcgccgtcggcaacggttcgaacgatccggacgcgacctattcttacgacggcgatggccgcagaataaagaaagtcacggtcacggaaacgaccgtgttcgtttacaatgcgagcgggcagcttgtggcggagtactcgacgcaaatctctcagacgccgcgcattagttacgttacggcggatcacttgggttcgccaagggttgtgacagatgaggtcggtgcggtcgtggatcggaaagattacactgcttttggcgaagagagctttacgtcggctcgagtagccgtcctcggttatgcgacggctgatgatatccgaaagggctacaccggctacgaaaaagagacggaaagtggtctcgattttgcgcaggcgagatactataacgcaacccatggacggtatacatcaatcgatccattgacttcctcggcgaacacgctaaaccctcaaacatttaacagatactcctatgtcctaaattcaccctacaagttcagtgatccccttgggttacttccaatgaacacttttgggggcaccgggtgcagtgctgagtactcgagttgtgaaggtaaggattttaccgaaacttactacgtggtcacacaaacgaccacatataccgcaacatcacatgtggggaataactctgccactatcacagttactgtgacggagacgtggctagaggatatacggggaaaccaagttttctacgatcccgcaggtagggtggtgtcggcggcccttagcaacgttgtaggctattcggcgcttcagcagtctcaaattaagacgattgcagtagccgcggcaaatgcagcattaaatatcggcatcgacgtaggtcgtttcttgggaatagttcagggggaaagtgaatttgggatggtaaaaacaggagaaggtccgcgaaagaatgccgtctcaaatccgtcacaatattcaagtgggcgcgctcagatcgcggcatggggatccgctgaatatgcagcggtccttcagtacaatctcgaacaatccgtcataaatgtttatcagtgggccgaaagaggtagtggcaacaatttatggaatcttttgtatcgctggaacggtaacaccgacatcgagaaaaatggcaaggagcaaagggtcaattttgcaaaccgtgtttcgggaatcatcaatggtatccaacgaactacgaaagttggaccgcgggaacgaacaggatattttgaaagtttcggcaggccaacatctataccctcgagcggcgtaaaccgatgcataacattatttacatgcagatgagacggaagaggaagaaatcatgtttagattagtaatattttctttgtttttactatcactcggctcttgtggaggtaactttactaatttgtcctcctttcccgcaacttctagagatgcgcccgctggaaacaccgcaggctggcaattgatctcggaatatcgcattccgcccgatgaaggaagccttacaaacagttttgcattcaccgaagattttcgattgtggtcgcgaggaagttcggattcaaaagccaatcagttaatgtattcggatgacttcggcaaatcgtggaaatttgtggatgcccctgatcgaggcttgggagcagatggaatagttcgtttttttgattcaaaacatggctgggcaatggatacatcaagcatactaaggacagaggacggaggccgttcatggaaaagcgtaaccgttcctaatgaatcaagaattaacacactcaacaccttagagtttaccgatgctgagcatggctatcttgcaggttctacgaccttaatggagcgtggttcaggtacaattaatttcgggatagagattctgtgtacgcgtgattccgggagtacttggcgagtatgttataagaaccgcacgaataatacagtattagaaatgatttctgtgggagattcgacgctggcgcttgtagatcacaaaactctactaatcactagcgacaaaggcatgacttggaagcaaaagcgttgggagtttccagcgacagatatagctgcatccccaaatggcgtgctgtggacaacaggcgaagatggtttcctgcgatcatctaaagaccttggtgacacttgggaaataactcctcttgaaaattcaaaggatccaaatttcagatggacttctatctcattcgataaaactggtcttggagtcgcggtcggctctaatggaaacgtctcgtcaacaccagatg

SEQ ID NO: 848 - DNA, 13930 bp, synthetic construct
  misc_feature 1..13930: note = Synthetic
  source 1..13930: mol_type = other DNA
ttgatgtggttccgcgtgccgacaaaagatcgagtgcctgacgcacgatattctcgacatcttcgagttttccggtcccgaccgtcttgcatgcaagctcgccgacgaccggctcaacgaacttcacgccgtccgatcttagctgggcgatgtttcgctgagttgcgggctgttcccacatcgtcgtgttcatcgccggagcgatcaggacgggagccatcgaggcaagataggtcgaggtcagaaaatcgtcagcgacgccgctcgcaaatttcgcgatgatattcgcggtcgcgggcacgatcaaaagcaggtcgatcccttgcgagaaattgatgtgcgcgatcggatcgggattctccggatcgtagtcatcaacgatcacgtgcgaatccgtcaacgccctgaaggtgagcggccggacgaactccgtcgcgtgccgcgtcatcgcaacccgcacttcgcagcctgccttttgcagctgccgcattacctcgaccgctttatatgcagcgatgccgcccgtaacgcctaaaccgatcttgtacctggccataaaatggatattcgcgttcgtttcggattttaccacgagagcgacgcgggcgaaatttgccggtggcgctcgcacgacggccgattgtgatagattcgtccatatggccgcaaaagctcctgacgactccgcacgacctcaacttctcgcttccgaaacgatctacgaaggccgggttttcgacattacgctcgactcgatacgcgaaggcccgctcgaatacacgcgcgagatcattcggcataaaggaagcgcggtgataatcccgatcttcgacgacggccggatcgctctcgtgcggcaataccggcacgcggcccgcgagttcctgcttgaactgcccgcaggcacattaaataacggtgaagatccgctcgaaggcgcacgccgcgagcttgaagaagagatcggcgttactgccgaaaacatcgataagctctgcgagttttacgtctcgccgggctttttgaccgagaaaatgcatcttttcgcggcccgcggcctgaccgcgaccgcgcagaacctcgatgcggacgaggtcctctcgatcgagtaccacacgctcgacgatctctcgcaaatggcccgcgacggccgtattcaggacgctaaaacgctcgtcggtatctcgatccttgccgccggtacgagcgtcacgaagtagaaatgtcggattttcgggctctcgccccttccatcgcccgaattcggccttttgagacttgaccgacataccttgtttcgatatcctgtttgttcgcatttttgcggataacgctaatagtgtgtgttgttatgagtacttattttccaagcggaaaggaattggctaacggccggaaatggttcgtcgtcgatgccaagggcaaaacggtcggaaggcttgcaaccgaggttgcacgcatcctttcgggcaagaacaatccggcatggacgccctttatggatatgggcgaccactgcgtagtcgtgaacgccaggcacgcgatcttcaagggatcgaaaaatgaccaaaaggtctatcgccaccacacgcttttcccgggcggccttcgcgaggtctccgtcaaggatatgttcgagaaacatccggaacgcgtgatcgaattggccgtcaagggaatgctcccgaaaaccaagctcggccgtgcaatggcaaagaaattaaaggtttacgccgatgcggaacaccgccatacggcacaaaaaccggaggcgatcaacatctaattgctcaaagcccgcgtagggcttttagttctgagacctagtttttatggcagatattcagtattacggcaccggccgacgaaagacctcgaccgcccgcgtgtaccttcgccccggttcgggcgcgatcaccgtcaacaaacgcgatttcaacacctatttcccgaacgaagcgcttcagatgatcatccgccagccgcttcgccttacggaaaccgtcgagaaattcgacattctggtaaatgttgacggcggcggcactgccggacaagcaggcgcggttcgccacggcatcacgcgtgcactcatcgagttcaactccgaccttcgcccgacattgaagaaggcaggactgatcactcgtgacccgcgcaagaaagagcgtaagaaatacggtcagaagggtgctcgtaagagattccagttctcgaaacgttaatcgttcatcgccgcggggcaaggccttccggaaccgaccgacaggctttgctcagtttgcgatcgacatttttctatattccattgcggccgttctttggttaacaacacaacggccgcgagtacaaaaaccaaggagaatacagttttggctacagtatcaatgaaagaactcctcgaagccggagttcactttggacaccaggtccgccgttggaacccgaagatgaaagaatatatcttcggcgaaaggaacggcatctacatcatcgaccttcaaaagacgcagaaactcttccgcgattcgctcaactacgttacggaatccctttcgcagaagccgaatcagaaggtcctctttgtcggcaccaagcgccaggcgcaggatgcgatcaaagaggaggccgaacgcgccggaatgtactacgtcaacaaccgctggctcggcggccttttgacgaactaccaaacggtccaaaaatcgatccacaagctcaaagagatcgaagcaatgcgcgaggacggccggttcgacaaactcactaagaaagaacgtctccagcttgaccgcgaacacgaaagcttgatgaagaaccttgccggcatcaaggatatgaacggcatcccggatatgctcttcatcatcgacgtccgcaaggaagagatcgcggtcaatgaagcaaatcgcctcggcatcccgatcgtggccgtcgtcgatacgaattgctcgcccgacggcattgaccacgtgatcccgggcaacgacgacgcacttcgggcgatccgcctgttcgcctcaaggatcgccgatgccatccttgagggcaagcagatcggcactgaaggcggtgtcgccgcagctccggcagtttccggcgatgacgacattgtcgaagaggccgagcttggatcgcttacggctattccttcggaatacctgagcgaagacgaaaaagctgagatggaagccgcagcgaacgaggtcgatgaggacgaggccgctgaagatgtcgcagaacccgctgttgcggaagctgccgccgcctcggaagaaaaggcttctgaagaatcgagcgaagccacggctagctaaagtagaacacacttttttcaggcgtagctttttcaggccggaacggcaaaattggctacgcctttttgtaagagtttttatatattttcagcgaatgcacccagggcattcgcgaacggaccctgagattggagtttttatgtcagaaataacagcaagtgcagtaaaggcccttcgtgaaaagacgggcgccggaatgatcgattgcaagaacgcactcgtcgaagcgaacggtgatgaggccgccgccgtcgagctccttcgcaagaaaggtatcgcgaccgccgacaaaaaagcaggccgcgtgacggccgaaggcgccgtcggaagctacatccatatgggcggcaaggtcggcgttctcgtcgagatcaactgcgagagcgatttcgtcgcacgcggcgaagagttccagcagcttgttaaagacgttgcgatgcacatcgcagcggccgatccgcgttttacgaaccgctcggacgtccctgccgatgaggtcgcaaaggaacgtgagatcctgatggagcagctcaagaacgatccgaagaacgcgaacaagcccgccgatgtgctcgaaaagatcatcgacggacgcttgaacaagttctacgaggagaacgtgctcgtcgatcagcccttcgtcaaggatccggcaaagaccgtcggagaactcgtcaccgaaaagatcgcttcgatcaaagagaatatctcgatccgccgcttctcccgtttcaagatgggtgaaggcatcgagaaaaaggcggacgacttcgcttccgaggtcgcctcgatggtcggctaataccgtccgagtatttgaaagcccaaggcccggagttttcgttcagacgactttggactttgggcttcagactttagactttatccttatgtcgccaaaatacgatcggattcttctgaagctctccggcgaagcccttatgggcgagcagaattacggcatcgacacaaaggtcgccgctgcccttgccgctgagatcaagacagtgcatcagctcggtgtcgaggttgcgatcgttgtcggcggaggcaatatcttccgcggcgtctctgaatctgccgggaatatggatcgtgcggcggccgactacatcggaatgctcgcgacgataatgaacgccgtcgtgcttcaggacgcgctcgaaaaggccgatgtattcacgcgtgtgatgtcggcgatcgacattccggagcttgccgagccgttcatacatcgtcgggcgattcgccacctggaaaagaaacgcgtcgtgatcttcgctgccgggaccggcaacccattctttacgacagattcggctgcggcccttcgggctctcgagatcaaggcagacgtgatcttcaaggcaacgaaggtcgatgggtcttcgatgcagaccccgtaaaggtgccgaccgcgacgaaattcgaccgcatttcctacaaagaggttctagaacgccgcctaaaggtcatggatgcctcggccatctccttgtgcatggacaacggcttgccgataatggtctttaatatgcgtgccgagggcaacatcgtaaaagcggtcaacggcgacctttctatcggcaccgttgttacgacagaagacaagatatgagcgtacaagacgtcacaaatgagaccgggccgaagatggcgtcggtcgtggaagattttaaacgcaaactctcgaacgtccgcacgggacgtgcgaccgtcggcctgcttgattccgtcagcgttgattattacggcacaccgacgccgctcaaccagatggcatccgttgccgtgcccgagccgcagcttattaccgtgcagccctgggatatgtcgcagctcggggccgtagaaaaggccatcattgccgcgaacctcgggctcaacccgtcaaacgacggcaagatgatccgccttcccgtcccgccgctcaacgaagaacgccgtaaacagcttgcaaagcatgtgcacgagatcgcggaagaacatcgcatcgcgatccggaatgcgcggcattcagccaatgacgcccttaagaaactcgcaaaagataaagcgatctctgaggatgacgaacgcggcggcctcgacgacgttcagaaactcacgaacagctacatcggcaagatcgatgaactcgccaagggcaaagaagccgagataatgaccgtctagcgcaaaggccgaaatcgcggcgccgctaattggctttctgtttgtctgcggcaagctgcttttcaagctcatcgcgaaactcgcggcagacctttgcgaggtcctgcgtgttagagttcccttgtgccttgctgtcctcgatagcctttttaatgccttcctttatttggcctagcacaacggccttagcagcgcgcgtgacgaagttatcgtctttgctgttcgtctcgcgatcgatgatgtcgatcgcctcgtcgcattctgcaacgccgcttgttgcactcgacgtcgttgccgggctcgcctcgggggcagaaccattctgaggcttgctgcttgtgggcgtttctttgctgcttgtgggcgtttctttgctgcttagtggattaagcctcccgcagccgagtacgacaaggagaagagccagtatcgcagcgatcgtaaatctgtttcgtttcataaaaaatacggcggccgaaaccgccttcatcgagaatggacggcatcttactgctctttttgcagattcgcaaatttttcgatcagcttcttctgcccaaagcccggaaaactgatcgttagttttacgttgtcgcctgagccttcccttctaaggacgagtccgcggccgtacttttggtggatcacattcgtgcccggcaccaacgcaccgcccgtctcctttgcggaggatctcggaacgcccgagcctgcggccttcaggcggtcgagggcggttggccgtgactgaggagcatcgggtgcgggcggcttcgcggaggcgcttcctccgcgtgaccggaagaattcgttgaccgcatccgcgctattgtaggtcttgccggtgtatgtttttcgctcgatacgaggcgaggcctcgccgcgcaaagcaccgatcgttgcctttgccgacatcgtcgaaggatgtttcgcgtaagagagccaagagccttttcctgagaggtcctcgataaggtcgagcggcatctcgttcaggaattgcgagggttcggcggccatctcgtcgccatatactcggcgacgcatcgcgtgcgtaatgtacagcatcttttcggcacgcgttatcgcgacgtaggcgaggcgacgctcttcttcgagctctttcgggtcattctgcgaacgcgaatgcggaaagacgccgtcctcgagcccgacgagaaagacgatcgggaactcgagccctttcgccatatggacggtcatcaacgttaccgccgcagaactgtcgtatttgtctgtgtcggacgtcaaagcggcgtggtcgatgaactcacgcaggccgtccgtctcgttcttgtcgtaatcgacggcggcgttcacgagctcttcgaggttctcaaggcgggccgcggcctcgtccgtgccttccgtacggagactcgcggcgtagcccgtgtcctcgatcgccgcgaccacgacatccgagacgggatgcggcgtatcccgcagctcggccaccttgcggatcaagccgccgacgacgaatgcaaagtgcgaaagggccttgacggcacgcggcgtaaggttgactgtgtggccgaaacgtgtcccttctgtgatctcctgcaagccggtccagagcgacgttcccatcgcctttgcatagcgggtaagctcgtccacgctcgtcttgccgatgcctcgtgcaggcgtatttattacgcgtaggagcgcgatgtcgtccatcgggttcagagcgagcttcaggtaggcgacgatgtccttgacctcggcacgttcgtagaacgagaagccgccgacgatgttgtaatcgatccgcagacgccgcaacgcctcctcgaacaaccgcgactgagcgttcgtgcggtaaaggatcgcgatcctgtccttgagcgaacgccgctggtgttcctcgatcttcgaggcaacgaatcgcgcctcgccgtcgccgtcaaaagcctggtaatagaagatccgttcgccgccgggatttgccgtccagagtttcttcttcttttggttgacgttgttcttgatgatcgcgtccgcggtatcgaggatcgtctgcgtcgaacgatagttctgctcgagcagtatcactttagcggccgggaagctttcctcgaacccgaggatattgcgtatatcggcctgccgaaaaccgtagatgctctgcgcatcgtcacccacgacgcagatattctgctgcctttcggtcaggaagctgatcaggttgaattggagcgcgttcgtatcctgatactcatcaacgagtatgtatttgaaacgctcgttgtatttctcgcgcgtctcgggcgaatgccgcagaagctcgaccgtctttatcaaaaggtcgtcaaaatcgagcgcgttcgcgacgcgaaggcgttcgtcatacatcctgaagacacgcgcgatcgcgagtttcttttcgtcgccgtactcgatcctcgcggcaaaatcctcggccgattcgccgcggttcttcgacgtgctgatcgcgttacggacgtttcgcggcggcatactcttttcgtcgatgccgaggtccttgagacacgcctttacgaccttcatcgagtcgtccgtgtcatagatcgtgaaggtcttcttgtagccttgttcgagcttgtcgatgtcctggcggagtatccgcacgcaaaggctgtggaatgtcgagatcagcggtgccgatggcaagctgcgtcccttgaagagctcttgacgcggctgcgcatctcgcccgcggccttgttcgtgaacgtaacggcgagaacgttgtgaggtgcaactcctttttccgcaataagatacgcgatacgcaccgtaatgacgcgagtcttcccggagccggctcctgcgagtatcaggagcgggccttcggtcgtcgttacggcttccttttgttgaggattaagagtcgagagaaggtccatttaccacttcggcagccttttcctgttcagctttttctgcagcttccattgccaggcgcttggcttttcgctgctcctcacgttccttcatttcgcggcgataggtctttgcaaagaagtacatcgccgcactggagacgatgaagataaaaaccatcatcagcgaaatgaagatgatctccgcgcggatattcgctggcatacttctattctaatggctgcgtgttcgggcgacaaatcacgcttcgaaaagctttatgtattctggcgggagcgaacggacgcggcgcgacttgtcggttacgacgtgcagcgtctcgccgacggcaaggagttcgagatcggcctttcgcacgacctcgtactcgaatcgcaggctgcggcgcctgatctcggccggacgcacgcgtatcaagagaaggtcgtcgaagaatgcgggccgcttataccgcaccgaagcctccgcgacgatcaactgaacgtcgttggcctccatctcggtgtacggtacgccgacgcgccggcaatgatcgctgcgtgcgacctcgaaccaaacgatgtaattcgaatggtgcgcgatgcccatctgatcggtctccgcgtaccgcacacgaagttccgtctcgtgccaagcgtagctcataggtcaagtttcttcccctcgccgcccaaaacgcaacccgacgcgacgcaattcctcgcggccttcgcttcgcggctatgcgacgccagaaacgaatacagccccaagcggggccgcatccaacgaaacttttttttggctgggagacagggattcgaaccccgataggcagatccagagactgcagtcctaccattagacgatctcccagcgtccttaataatttacgaagccgatacggccttgtcaaaccaaaggaaatgcccgggtgatgttaccatcacgcgggcgtggtttaccggttacggttatcctacgaaatacttcttgttataagaagcagcgtattctcttatctactaaacgctttatatggtatattatcttcacctataaatcaagtgttatcttgtcctcacgatgcttccatatgtctgagtttaagaatattttgggtctcgacctgggcgtgacctctatcggttgggccatgctgagagtcgagacagatgccgacggaaaaccattgcgcgaaagcgacggaaccattgtcaacgcctcaattcatgatattggcgttcgtatcttcccggcaacgaccgaaggtactaaaagcgagccgaaaaacagtaagcggcggaccgcacggggacagcgaaggctgatccggcgaaaagctgctcgaagaaattctctccggagccttttgatcgaaaatggactccttcctgcgatcgatcccttggccgcatcatcggacttccaagcgattggtgacccttggcggactcgcgctcgagccttggatgagcgtcttgagccattcgagataggacgctcgatctatcatctcagcgaagcgacggggattcttaagcaaccgaaaatccgccagttccaaggaggacggcgtggtttacgatgggatcgctcggatacgccaagagatgtcggacggcggatttcgaactgtcggcgagtcgctatacgcacgaactgagaaggctcgcccggaagcgccattcgcgaagttgcggaaagagttcactcaccgctcgatgacggaggctgagctcgacgcgatatggacagctcagcaagagcaccatcctgcgatcctgacgaatgagctattggcagatatccggcgcgttatgttctttcaacgcccgcttcgctcacaacgcggccttatcggcaagtgcattttcgagccgggcaagaaacgttgcgacctcgcacgtccggcggcacagcgcctgcgctactggcaggatctcaacaacctgcagcttcaagacccggcaaccctgaactggcgaaaactcacgacggaggagaaagcgaagctatccgcaaaactcgaaggcaccaaagaattgacctacaaggcccttcgcaagcttttgaagatcggtgaggatgttcgtattaacctcgaaacaaatgaaaaaaagctctatgggaataaaacggcatacgcatttcgcaaagcaattggaactaaatgggatgccttcaatgatgacgagcagaaccggctcacggaagagcttttccgaatcgagaatgaggatgcccttaagcggagactcagcagctactggaacttcgatgcggatgaagttgccaaactcgaagcgacgtggcatcaactcgaggacggttacagtcggctctctttgaaagcaatacgacgcgtacttccgtttatgatggacggcctgcgttacgacgaggcggttcgtgaggtctatggtgaccaccggcgaatatttggccgcgaagaataccagaagcttgagctgccgccgaaagacctaaggaatccgatcgtctataaggccctctgtgagctccgaaaagtggtcaatgcgatcattcgtgagcacggacgcccggatgagatacggatcgagctggcccgcgaccttaagcttacaaagcttcaaaaagagaaagcaatgaagcaggccaacaaaaacaagcgcgccaacgaagatgctgacacgttcttcaaagaaaggttcggccttgagaatgcgtcgtcaaccgacaagctgaaatatcgcctttggaaagaagcgggtgagcggtgcccgtacaccggcaatccgatcccgcccggatcgctcctgaatgacggcctcgttgacatcgagcatatcattccctacagccgatgctttgacgactcgtatatgaacaaaacgatctgcgatgcgaaattcaatcgcgaggtcaagcgaaatcgagcgccgggtgagatctacgaccgcgaaagcgaggcctattccgagctgatacatcgtatcgccgttttaccgcctgcaaagcagcgaaagttcaaaatgaccgagcaggagctcgcagaaaccgactgggcaggccgtcaactgtcggatactcgctacatctgccgtgaagctcacggctatttgcgccagctttatccttatagccccgacgagagtaagtatgtgcaggtcgtctcaggcggggccacggcaagccttcgacacgtttggcacgtaaatgcgatcctttcggacggcgacatcgaggcaaagaatcgctgggatcatcgccaccatgcgatcgatgcgatcgtcgttgctttgtgcgaccgcggcctctatcatctgatctcgaaactctcaggccggaaccacgagttgatgaaccggaaactgtcaggattcagcgagccgtggcaaggttttctggatgatgtgaacagggcaatgagtacgcttatcgtctcgcatgcgcctacccgccgtgtgcgcggacagctcctcgaagagactgcctacggcccaaccgccgttccgggtgtatatgtagtcaaaaaagggctggaagggatcaccgacgccagataaagaatattgttgacccggcggtaaaggaacttgtggagctgcggctttcgcagttcaatggcgacaggaagaaggccttcgtcgagccgctattccacaaagacggcaagacgccgatacgcacggttcgcatttcagtaactatgtcgcccgaaaccgtggtcgggatcagggatgcgagcggcgaggtgtataagtactattcgctggcaggcaaccatcatgtcgatatatttgagaatatcgacagcggcgaacgccgggccgaactcgtaccgcgattttacgcggcgcagcgtaactggaaacaggccgatctcggccccgaatggcgaaagctcttctcgctctgcgccaacgactacgtcgagtttcgcggagatgacggcgaattgatcgtttataggatacagaagatgtctggtggaggaacggttgtcattatcggccgtccgctggaagacgcgagatctgaatacgtgaccggcgtcgtaaagcagctccagggaaagaacctgaagaacatcacacgaaagcttcaggtcgatccgatcggacgtctttcgacggcaggcgattagctcttagcaaaaccactgttcgcttgtcgggtttgaaaacctatgatcaagcgaacagttgaaatttccacaccgggctgctatctccatacaagggatgctcagctcgtcattgaaaaggacggcctaaaggtcggcagcgttccgatcgaggacctcggtgtcctgatcctcgacagcccgcagctcctcgttacgtcgagcctaataagcggcctagccgaacagaatgtttctgtgatcttcacagattcgaaacatctgccctcgtcgctgaccgttcccttctccgcccattcgatacagtctaaggtcctgaacggccagatcgctatctcgcttccaacaaagaagcgcctctgggcggctgttgtctccgcaaagatcgccaatcaggcgcgttcgcttgagctttgcggaaaagatggaactgcccttcgcgagatcgcggatcgcgtaaaaagcggtgacccagccaacctagaggcctacgctgcaaaggtgtactggcggaaactcttcggcgacgctttccgccgcgatcgttttgcaaacgatcacaacatcctgctcaactacggctatgcgatcatgagagctgcgacggcgcgagcaattgttggtaccggcctgcatccgggtctcgggatcaatcataagaaccaatataatccctttccactcgcagatgatcttgttgagccgcttcggccttttgtcgatgtctgcgtggcctcgatcttggccgaaatgttctccgatccaggcaacgccgagccggagctcgtgctcgacagaggcaaaaaagccgctctgctaggcctgctcgcggacgattgcagctatgatgcgcgtccgctccccctgttggcagctctaggctgctacgtcgcaaccgtaaagcaagtgatgctgggcgaggctcaaaagcctgtgatccccacgttcgttaagtagtatggcaataaggttttttggaggattcaataccgtgtggatggttgtaatgttcgatctgccgatggtctcgccttatgagaagaagcgatatgctcagtttaggaaagttctgctgcgggacggcttttcaatgcttcagttctcggtttacggacgccattgtccgtccgaagaaaatgcagaggtgcacgaaaaacgggtcgtatccgcgttgccgcccgaagggaatgttcgtataatcaaggttaccgagaaacagttcgcgcggatgaaaaccttctatggaaaaaagcgtcgcaaaacagaagagccgccgcttcagctcagtttttttctgagccttggcagcggcaactccatgcatctcaaccatttgcggctgatctagtttagcagataagagaatcgccgcaactcacaacgatatgatggtcgcgatggaattctcggc

SEQ ID NO: 849 - DNA, 4850 bp, synthetic construct
  source 1..4850: mol_type = other DNA
  misc_feature 1..4850: note = Synthetic
ctcgccaggaaatcaccatttctcgccaggaaatacccatttctcgccaggaaatcgctacaattcgacaagaaatggctatctttcagcaggaaatgatcgatcgtcgagaggaaatgacgatcgttcaagaggaaacgccccgcgacaggcgtacttcacccaccctttgaacggtttcagatcgtttagtcgaaacttcggaccgaaatctcaatatcatttaccaaaaagtaaaaggcccgggtgtttccacgcgggccatggttgccgtgaccggcagagcctacgaaatacttcttgttataagaagaacgtgttctcttatctactaaactgctaaacatggtatattagccgcacccaattatcaagtggaattcgattcttcccggaggttctcctatgcctttcttcaaaactgttctcggcctcgatcttggcgtaacttctgtcggatgggctctgctgcgtttcgaatgtgacgagtccggtagagttttgcggaacgaagaaggtttgttgagcaacgcgaaaatagatgactgcggcgttcgtatctttcctgcaacaaccgaggacaagaccaacgaacccaagaaccgtggccgacggatgaagcgaggccagcggcggctggttatgagaaaggcgaaacgccgcaacgagcttcgggagatcctgactgccaacggccttcttccagaggtcgatcctgctgcgtccgaacacaccttcgaccaactcggcgatccgtacgaacttcgtgtacgggcattgaatgaaaagctcgagccgtttcagatcggccgggcgatctaccatctttcaaagcgtcgcggatttctgagcaatcgaaagacgggaacaagcggtgaagatggcaaggttctcggcggtatcaaggaagtcagggaggctctcgaaagaaacggccatagaactttggcggaataccttgtgacgcttccaaagaagcgaaaacactttactcaccgatcgatgtccgaggccgagtacgaatcgatctgggaaacgcaaaggccgcacgaaaacgtgacgctgaatgacgaactaaaggcacagataaagaacatcatcttctaccagcggccgctcaagtcccaacgcgggctgagcggcacgtgcacgttcgaaacggataagaaacgctgcgaccttgcacggcaggaagctcagcggattcggtactggcaggatataaacaacctccagcttcaggacccagcgacgttgaactggcgcccgcttgccgaggaagaaaaacagcggctggcagccgaactcgaacattccgaagttctgaaatatgaaaagctcaggaagctgctcaagatcggcgacgacgttcggatcaatctggaggccaacgacaagaagataaaaggaaatacgacggcccattactttcgcaacgctctcaaaaaaaccgcgaagaaatgggacgacttcaatgcggaagaacaggaccgactaatcgaagaattgttccgtatcgagaatgagaccgctcttgagcgacgcctgaaggaattttggggctttgacgaagaggcggtcggaaagcttcgcggcgtatggcacaagcttgaagacggttacagccgactatcgctgaaagcgatccgaaaggttctgcccttaatgatgcagggcaaacgctacgacgaggcggtttccgaaatttacggagaccataggaagaaatttggcagcgaagagttcccgaagcttgaacttccgccaaaggacttgcggaatccgatcgtattcaaagcgctttgtgaagtccgaaaggtcgtgaatgcgatcatccgagagcatggcagacccgatgagatccgcgtcgaaatggcccgcgacctgaaactaacaaagatgcagaaagaagctgtgatgaagcagcagaacatcaacaagaaggccaacgaaatggccgaggcgttctatcgcgaacacttcaacctggaaaatatttcaggcacggacaaattgaaatacaggctgtggcgggaagcaggcgaaagatgccctttcaccgggcggcctatcccggccacttcccttctcgacgacggcgcggtagatatcgagcacatcattccttacagcagatgttttgacgattcctatatgaacaagaccatctgcgacgcaagattcaaccgcgacgtcaagaagaatcaggctccgggcgagatatacgaccgcaaaagccctgagttcttcgagcttatcgagcgcgtcaaggacctgcccggcggaaagcggcgtcggttcgaaatgtcccgcaacgagatcgaacatccggagcggtttggcaagaacgcgaaagactggatcgggcggatgctttcggacacgcgttatatttgcaaggaggttcgcggatatctccgtcagctttatccatacagtgccgacgaagggaaatatgttcaggtcgtcgcaggcggtgcgaccgcgaacctgcggcacgtctggcacgtgaacgccattctttccgacggcgacatcgaggagaagaaccgttgggaccatcgccaccacgcgatcgacgcgatcgtcgtcgcgctctgcgaccggggcctttatcaattcatttcaaagctggcgggccgaaaccgtgagttgatgaaaaacaaattgtccggcttcagctatccctgggaaggatttctcgatgaagtgaacgaagcgatcggaaagatcgtcgtctcgcacgccccgacgcgacgcatccgcgggccgcttctgaaagatactgcatacggggcgacgcagaccccgggtgtttatgttacaaaaaaaccggtcgaagctctcacgccagcgatggtgaagagtattgttgatcccgtcgtcaaggagatcgtcgaactaagactttcgcagttcaacggcaatataaagaaggcgttttcagaaccgctttttcatagagatggaaagacgcctatcctgaaagtccgttaccgtgaaagatgcagccccaattcacttgttgggataaaagacgcaagtggaaaagtatataaatactacgcaacgggcgaaaaccatcacctggtcgtcttcgagtctgcggacggcgaaagaactgtcgttgtcgttccacgcttctatgcggcccaacagaattggaagccgtccgatcttggcacaggatggcgtcgtctgtttgcactatgtcgtaacgactatgttgaatttcttggagacgatggcaaattgggaatgtatagactccaaaagatgtcgggcgatccgggctggtacatctggcttcgaccattgaatgacgccaggaaggaatatgagggagtagtccagattagaaactcgtccaagatgaaaagggtgactcgtaagcttcaggtcgatccgcttgggcgtctgacacaggcaagtgattaagttgaaaacttaagaaaatattcgcttgtctggttgaaaaactatgataaagcgaacggttgaaatttcgacgccgggctgctacgtgcatacaaagctcgatcagctcgtaattgagaaagacggattcaaggtcggctcggtgccgatagaagacctcggcgttctgatcctcgacagcccgcagcttctgatcacatcgggcgtgatgcgcgttctggccgagcagaacgtcgccgttatcttcacggattcaaaacatcttccgtcgtcgctgacaattcccttctcggtccattccatccagacaaaaatactgaacagccagatagagatatcgcttccgacaaagaaacggctttgggcatcgataatttcggcaaagatcgcgaaccaggcccgtgccctcgagatatgcggaaaggatggaacagcgctcaaagagatatcaaaccgcgtccgaagcggcgacccggaaaacttggaggcctatgcggccaaactttactggaaaaaactcttcggcgacgaattcaggcgcgaccgcgatgcgggcgaccacaatatgctgctcaactacggttacgcggtcgtcagggcggcatcggcgagggcgatcgtcggtaccggcctgcatcccggcctcggcgtgaaccacaagaaccaatacaacccgttcccgctggccgacgatcttgtcgagcccttaaggccgttcgtagatgtgcgggttttcagcatcctccgggaaatgctccccgaagccgacggttcggaacgggaggtccggctcgaccgggcgacaaagcaggacttgctcggcctgcttgcagaggagtgcgaattcgacggccgaaagctgccgctgcttgtcgctctcggttattatgcggcgaccgttaagcaggtgatgatgggcgaggctgaaaggccgacgataccgacgatatgatcctatttggagggctgaatacagtgtggatggttgtaatgttcgatcttccgaccgatacgcaggaagaccggcgaagatatgcacagtttcgcaagatgctgctcaagaacggttacctgatgcttcaattttcggtttacggacggcactgcgcgtccgacgagcacgccgaagtacacgaaaaaagggtggtcggagcgttgccgccaaagggccacgtgcgtataataaaagttaccgaaaagcaattcgccagaatgaagacctactatggaaaaaagacccgccaaacggaagaaccgccgcttcagctcagttttttctgagcttcggcagcggcatctttattcctgtcagccatttacagccaacctagtttagcagataagagaaccgtcgcaactcacaacgacggtcgaaagggcgtagtatttgtaggtagtttagcagataagag

SEQ ID NO: 850 - DNA, 4731 bp, synthetic construct
  source 1..4731: mol_type = other DNA
  misc_feature 1..4731: note = Synthetic
  variation 323..324: note = n is a, c, g, or t
gtttccgcccgtaactaataaataaacgcgccctccgtcggcacatcgcccgccacgccataggtctgtatcaactgccctgccgtcgagccgacgatataccacgtcgcattcgaaggcctgaataccgtcacatcagatttcacgtcccgctattgtaaatccgaaatcgccacaaataaagcccgggtgctttcacacgcgggcagggtttaccgtgaacggttatcctacgaaatacttcttgttataagaagcaacgtattctcttatctactaaactgagacttatgatatattagcccgaccaatttttcaagcgnnactcccggaggttccccccatgcctttttcgaagactattctcggccttgacctcggcgttacatctgttggttgggcgtacctgaagattgataccgatgaaaacggtgcgattctacgcgacgaggacggctcgctcggcaacgtagcgattatcgacactggtgttcgaatattcccggctacaaccgaaggagcaaagagcgaacctaaaaatagcaaacgccgaaacgcacgcggccaacgcaggctggtaatgcgaaaggcgaagcgtagaaatgagcttcgcgagcttctttcgataaatggccttttgccgagaatcgaatcaataacgtcagcggcggcattccacgaaatcggcgacccatattcgcttcgttctcgtgcgcttaatgaaaggctcgatcctttcgaagtaggccgttcgatttaccatctttccaagcgacgcgggttcctgagcaatcgaaaatccgcgaaatccaaagaggatggcgttgtttacgatggaatagcgcggatacgcgaggaacttgaaaagggtggttttcatacggtcggagaagctctccacgcaagggcggataaagcccgcaatgagaatggctttgcaaaactaagacaagaatttacccaccgatcaatgtccgagtcagagtttgagcaaatatggcacacgcagaaggattttcatccgcagttaatgaccgatgaactcagggcgaagatcaggaacattatcttttaccagcgtccgctcaaattccagcgcggattgatcggcaaatgcacgtttgaaaccgacaagaagcgttgcgatcttgcgcggcaggaagctcagcggcttcgatattggcaggacctgaataatctacagcttcaagatccgcaaaccttgaattggagaactctcacttcaacggaaaaggagacacttgccaatgaacttgaaaatacgaaggaactcacatacaaacggcttcgaaagctcctaaagatcggcgaagatgtccgcgtcaacctcgaggcaaacgaaaagaaaatctatggaaacaagacggcttgcgcctttcgaaaagcgatcggcaaacaatgggaagacttcaatattgaggagcaaaaccggcttgtagaggaactattccgtatcgaaaatgaatccggcctgaaaaagcgcctgaaagagtattggaactttgacgatcagcaaatagaaaagcttgagggcgtctggcatcagttggaagatggctacagccggctttcgctaaaggctatacggaaggttttgccgaaaatggtcgaaggcaagcgctacgatgaagcggttaccgaggtttacggcgaccatcgcaggaaattcggcagcgaggagtttcaaaaactcgaactgccgccgaaggaattaagaaacccgatagttttcaaagcgctctgcgaagtaagaaaagtagtcaacgcgatcatccgcgaatacggccgccccgacgagattcacatcgaaatggcccgcgatctgaagctgacgaagctccagaaagaaaaagcgattaagcaggcgaatgagaacaaacgaaacaatgagctggctgagacatttttccgtgaacgattcggccttgagaaggtttccggaaccgacaagctaaagtacaggctctggcgagagtcgggcgaaagatgcccttatacaggaaacctgatcccaccagaggctttgctcgatgacggccttgtcgatattgaacacataattccgtacagcaggtgttttgacgattcctatatgaacaaaacaatctgcgacgcgaaattcaatcgcgaggtgaagaagaatcaggctccgggtgaaatctatgaccgtgaatccgaagactactttcaactaatgcagcgggttagttcgcttccgttcggcaagcagcgaaagttcaaaatgacaaaagaagaattggaaagcacggactgggccggtcggcagctttccgatacacgatacatttgtagagaagctcgcggatatttgcggcagctttatccttacagcccggatgagaataaatatgttcaggtcgttgccggtggagcaacggcgaatttgcggcacgtttggcacgtcaacgcgatcctttccgatggagatattgaaacaaagaaccgttgggaccaccgccatcacacaatcgacgcgatcgtcgtcgccttgtgcgaacgcgggctgtatcagcttatttccaaactatctggtcgaaacaaggaactgatgaagaaaatcctttccggctttagcgcaccgtggcggggttttctcacggacgttgaaacggcgatgaattcaattaccgtttcccatgctcctacacgcagaattcgcgggcagctgcttgaggaaaccgcttacggcccgacgaataagccaggtgtttatgtcgtcaggaaatcgttggacggaatcaaacttccggcagtaaagaagatattcgatccggtcataaaggaactggttgaacttcgtctttcgcaattcgataatgatcttaagaaggcattttgcgatccgctatttcacaaggacgggcgaacgcctatcaggagtgttcgaattcacgaaacaatctcacccgacacgctcgtcggcatcaaagacgaagctggaaatgagtacaagtattactcgattgccggaaatcatcacctagatatttatgagaacatcgacaccggcgaacggaaagcagagcttgtcccccggttttacgccgcgcagaggaactggaaaccggccgatctcggcccggagtggaataaattgttctcgctttgtgccaacgactatttggaatttcgtggagacgacggcgaattgcgtttttacagggttcaaaagatgtccggtggtcaaacgacttgtttgaacatccggccccttgaggatgccagaagtgaatatattcccggcgttagcattgaattaaagagttcgtccggatttaagaagatcactcgcaaacttcaggtcgatccgcttgggcgtcttacacaggcaagtgattaagttgaaagcttagaatggttcgcttgtctggttgaaaaactatgatcaagcgaaccgttgaaatttccaccccgggctgctacgtgcatatgaagcacgaccagcttttgatcgagaaagatggatttaagatgggcagcgttcccattgaagaccttggggtcttgatcctcgacaacccgcagatattgatcacgtctgctctgatgggctttttggccgagcaaaacgtatcggtcatttttacggattccaaacaccttccggcgtcgctcaccattcccttttcggtcaactccattcagacgaaagttctcaatagccagatcgagatatcgctaccgacaaaaaagcggctttggtcggcgataatttccgcaaagatcgcaaatcaggctcgttcgctcgagctgtgcggcaaggacgggacggcattgaaggaaatcgcgaaccgcgtgaaaagcggcgattcggaaaatcttgaggcctatgccgcaaaactttattggaagaaattctttggcgacgggttccgtcgcgaccgcgaagccggtgatgagaatatgctgttgaattacggctatgcggtcgtccgggccgcgaccgctcgagctattgtcggaaccggccttcatcccgggctcggcgtaaaccacaagaatcaatacaatccgttcccccttgccgatgatctcgtcgaaccgcttaggccgttcgtcgatcagcgcgtttattcgatcctgaatgaaatgcagcctgaggctgacggttcggcaaaggagttgaggcttgaccgcgaaacgaaaggagacctgcttaggctgttgggcgacgaatgtgtttacgacgggcgcaagctgccgctgctagtggcgctcgggtattacgcggcgaccgtcaaacaggtaatgatgggcgaagctgaaaagcctactattccgacgctatgagattttttggagggcttgatacagtgtggatggttgtaatgttcgatctgccgactgaaacatccgaagaccggcgacgatacgcgcaattccgcaaagtgctgctgaaggacggctttatgatgctgcaattctcggtttacggccgccattgtccgagtgaggaaaacgccgaagtccatgaaaaaagggtagtttgggcgttgccgccaaagggaaacgtgcgtataataaaagttaccgaaaagcagtacgcgcgaatgaaaaccttctatggaaaagcgccccgcaaaaccgaagaaccgccgcttcagctcagttttttctgagcttcggcagcagtatcttgtttcccttcagccgtttccggccaacctagtttagcagataagagaatcg

SEQ ID NO: 851 - DNA, 23615 bp, synthetic construct
  source 1..23615: mol_type = other DNA
  misc_feature 1..23615: note = Synthetic
ttatcttttttatactttatctgttttgcaaaattttccatatttgtgaaattttcttcggctcttgcgttttcatataacattttttgtataaaggcgggcatttgtaaagccgtttgtatttctaccccatccaaattatcaagttgttcggatacaacatagttttttatttcttcattaaaagaagaattaaaagtaaataaattgttccttatgagatatgtgtaaacatcaattaagttttcatatatttgttgcattacggaatggtttatattcgcagaaagaattctgaaaaattctatgcttgtaaattctatgttcggattttccgcaataaacattaaatctttaattttgtttttaaacagttccgtatctcttacacggttacgtgctaaaattttatctattgcggtatctgttttttcttgctttgataaatgttcatcgtatacttgtttcaaatattctaaaggttttgcggcatttgtaaatttttgtaaatcgatttcaatgtcatctaaattgtctatattaacataaaaatcaaaatttgcatttgctttaaattcggaattaaatttcttttctaaagatcttaatataattaagtttgttaagtattcggaatattttgataaacctatttttttcagatattccgggtttatataaataagttcttttccgtcaggcattgacattctgttaacttcttttttgaatgtaaccgaatatttactgaaaggcggatatttagacattctttccaaatcttcgaaacacatatgaagcttttcaaaatcgtttactctttcttgttttgttgagctgtattgttgtaatacttgtaatcttacaagttccgttaaatagtaaaattctctgtctttaccttcaataagattaccgtctttatcgaatatttcatttattacttttctgcttatataaacgggactttcttccgtatttcttataaaagtttctttgtctgtgataagaatgttttcaggtaaatccacattgaataattgttgtaagatttttgctttcctttcttgaggttcgtcaagtgccgtttcaagtttcattataattgaattaggtaaaagatctctcataaaataagaatctttttccaaaatatccaatattttgtatgctaatgaaatattatcaattctaaaaatatcttctttcataactgttttacaaacatttaatataaccaaaatttctctttcgtttaaaggtctgcctttagcatcaataacgagttgtaacaatgttttaggtaaagaatgttcgtcactatctataatattttcgtaagttaccggtaaaaacttttcggttttgatatccgtatcattgaatgccgttgtcgtaagcaagcctaacgaataagcgaacaattcgtgaacgattgttgatttatattgagaaaatccttcggctgtgaacaaaatatgaccgagttcgtgagctgcaacatttaaaaaactttcatcggcaggattaattgcaatattttttccgttgcttacacctgaagcgattcgccctgaaaatatcattatgtctttagtgttttcaatacttaataattcttcatatcccttatttttaagtaatgtaaatgtttcttgtaaaataagttttaataaagcattagttttctttttgtttggtaagaaatattccatggtaaaatcgtttcgtcttcttactattgttgttgttgcttcatcaaataaaatttcttgtataaatgcaggtagtttggaaaataattctttaggtaaatccgctaccgattgtctgtctgcggcaaaatcttttatttccgggcttgttataccggtgttaaaagaaatgccgtaatctcttacaagagttacaaaaagttcggttagtatatcaagaaactcttccaaatcgttgtctgctttcaatatttcttttgttatatctatactttgatatacactcggatttaaaattaaatttataacagaacttaaatttataactttgttgtgcttttgtaaaatttggggaaggactttatttattgctgtatatatatcggaatttgtttgaattatactaaaacggcctgtggaagaattataaatgaagttaaaagtttttatgaaaaaatctataagttgttcattaggaaggttctctatattttcttgttcttttaatattttcaatagcttttcaaggtgttctttgttgaatgttatatctcccaaatcacaatatcctttaaaatcaataatatcttttattattgtatctgttaaatctgttatttctttcggaagagttttattctttaacaatatggttcttgtacctaaaattgtgaaaaatatttcatctataacatcatacatatccggtgttatatttaaaaccttacttagttttttttcatatatttttcttataatacttttatattcttgtttatctatttttgaaactataattttgtcggttatgaaagtttctatatcttgtgctgttccagtcaataagacagctgcaaaagattcaattaacagataatcaccatcagcttcattcattgtgaatacttttgtaaaatttacaatatcattgaaatatttatttataatttccaccgaatttgaatttactttttttgcaaattccataaggataatataaaaaaccgtagaataagataaatttttaaaattatcgtcggaaaatacttctctgacagtttgtgccaagtatgttaaattttccaaactcattatctttccgtcttttcctaaacatctgttcaaaatttttataaaattcaaagccgctacatgtacatcttgattttcttccaaagattgagaatcttttgttaagtttctgtctattgtatcagcaaacatttcatctaaatcaatcgagaatttatcataatctctgtatccctgttcttcggaaaaagatgcctttaacatttcgttaaatatttgtgcgaataaaagactgaatataaaagaatgagtttcgtgagcgagatttttagtgtttcccgaaggatgaaaatctttcataagtaataacatttcatgtgcgaattcatgccccatactttcaactaatgtgccataccgtaaatttttggaaacacctattaatccttgatttaaacttattcctttagtgttttcgttatctaaggaaaaagccgaaaccgtaaggtaagttaatgcttttgaaatatctataaagttaagcagataaggttttgaagcggaattaaatgttttaaaatcgaaatcttgtgcgaaagataaaatttcttttattattatcgatattaaaccgcttatttgtaaagaaccgtcgtaatatttttccaaaaatttggtttcaatatcatcaataactttttgtttggctttttttattcttctttgtatttgtttttcggatttatcgttttcatataaaacagactgaataaaacccggcaaatatcgtgccgtatttatatctatgccgttaagagttttgtctgttcttttattattttgagctatttcattgttaacatattcttctatatctgttcgttcaaatccgtttgaaaaatgtacatttaaattttctacaaaaaacactaaagtgtttatcatttcttggaatattttgtcttctgtcgttaaagaaaaagtatcgaaaggttgagaacggtttataatgttcaataaattaagcaacagttttaagccggagttaccgtcttcggaaattatatcttgagtcaatacagacaaatctttacctaaactttcatctgtgccggtaatatcggaattaaatactgcataacctttttcttgttctacggtaaaaggttgtttgtttattgttactgtaaaagaagttccgttatctgcaaaattttctttaaaaatgtttttgcatatttgttttatttggtcgtaggggactttattttgcaatcctgccgatatcaatattttgataaatgcggcatccggcatttgagaagcaatcgtaaatgctaaagtttctttactgtattgcaaactttcttcgtttattacattgttataaatatttgaattattgtttaatgcggcagtgtttggggtaaccgatataaaagaaatgttagattgtcccaacagtttacttaacccttcactatggtatccgcccgttatggctactataacatttttgccgtttgggtttttgtttaaagtatcttttattttttctaaaaatataaaatttctttcgttgttaacctgataaaaaactttcgagttgtctatatctttttttatatcgttaagttggttataaactacatatttcggatacaatttttcgaatttatctacagatttgttgaaatagtcacaatcttttgcggttaaattgtttgttagtgcactttccaaatatacataaaaatcgtttaagaaagaaatttcgtattcggtggaattaaaagataaagaacttttgatattgtttattattaactgttcctgttttaacacatttgcgaggtttatgttttcggatttggtttggtactgtatcataaggtgtatgttcggatacttttttgctaaatttatgttttttgtagaacagaatcggtttatgtagttaattaaattttttgtgtcgccggtcacatttaaaaagtttttgtattcttgtatcgttaagttttcttttatggttgccaaaacattttgtatttctttaggaagtttctttttatttatttttgtttccaatgctaacatgtccctaaacaaatacaagtcgggataatcttctttttgtaagcttattaaattgttatacttgtttggatttttagatattgtatcaacataatttattaatgccgaataaaagtgtaaagtgtcgatttcttttgttttataactgtttataaggttggaaaagtttttgctttgtgaatttacaaacctgttgcttaaaatggttaaatctttttttatgcttaacaacttttcttttacaaaatcggtatcgttaatcattaaagataatctgttaatgttgtcttggtgaatctttttgttttcaagaccgtataaaggaatattttttgtatcgtttagagtaaaatattccgttccggttaaaatacccatattaagtaatatatcggaaatttccgtttgagttgctttatccggattttgtaaccgggaaacatcaactttatcgcttgcaccttccaaatatattgcttttatatcatttttttcggacaactgtttaagtatggaatatatgttcttttgtaccttagagttgccgtgaagatcttgaatgtttataacaacattttgcgaatcttttatgtttgaatatgttaccgagcccaaattttgttccgataagggttttgtaacatctgcgggatattgacaatagattatatcactgaaagacaacgatacaaaacatattgccgttactaaagatataaacttttttatattcataataaaaccgccaaataagttaataaaaaaataaacttactctgtcttataagtatagtcttttttactgtaaatatcattattatttttttgttattccgaataaagccgaaacggattttctcggtaccatttgaaaagtgggggataaagttatacctattttttccgcacccaaccactgcaaaaaatctttttggttttgtatcggccaatctccgtatccgggcgaaaatctcattgttgtaggtccgaacttttcttttacatcgttacaaatatttcctaccaactcttctattgccaccgaacctacggaatctaaaataaatgcgggcataatttctttttgttccaggaaaagagaaatttttgtatcaatggaaaaccctattgttgctataagtccgcaaacttgttccgaattttccaataatctgaaaatatctttactggttatacgaaaatcgtctaaaaatatgtcgttatcttttattttttttgttgccatggatatggcatatttcggttgtaacaacttttttgccaaatctattgtttccaaaatggaagtttctattttggtatcgatttttgttctgtacttgtttgcacccattcttacaagcacatcttcataatcaatttttaagtttacaatttcgttgttcataattaacttttaaaagattttgttattgcaaaagtttttttacctttttctacatgtaccactatttgttcctgagaaacaacattcgatgatgaatccaaatatttaatatttaacgtatgaattccttccggtaaatatattctgctcatgtttatttgttccggtaaagttctccaggaccttttatccgctttttcgattaaagaatttgcaatgtttaatacactgttggttaatatgcttaacccgtaagtatctttgttttcgtgttgtcttacctggtctgtaataacttttgaaagaacatatctgcctacggctcttgctattgtttttgcatataccgatgaagtttcgtcttgcaaagcatttatcaacaaagttccgatatcgcttgcttcataacttttgtattgcaaaccggtttctttgttttcgaaattcagttcttccacaatgaaagacgaaattctgttttcatatctttcatattgagggaaagcgattttcaggtaactgtcggaaatacctgcctgtactgccgatattactttttgtgctttttcctgttcgtcgttttcaatttttgcggatgtaaaatacggccatgctttatagaaagacatttccgttatatgatctatttttttcggtgataaaccgttatagtttactattataacttcgccgccgttaccgttttgtacgggaacagacacggaatattgttcttttaaatctttagcttcctgcgaaaaacctaactttgtgtacaaataatataaacttgatattaaatctttcggcggttccaaattgtattcgttggcatgttcataattttttaaagcgagtttataagatacgagtgcatcgttataatatcccgcattttcgtaaactattcccataaaatatcttataaacgggtcatccgtataaaatgcttttcctttactgtctgtaacttgttttttcagtaagttgtcgaactgtcttgcttcaactactgcttcgttatctttaccttgcaaaatgtagtttaatgcacaaaaaacatttacataagccatttcgtaagggttaccgtaatacggaattacattatcgtttgaaaataaagatacggttccagcggaaatactttttgtatagttttcatcgtatatctgttttgcctgttcgaaaacggcattactttcttcatacttttttgataaatgttttaaaaaacccaaatcgagataatataacagtttgttcttgtttccgtaagatttttccgatgaagaagttaaactttgtgcctgttcggtatggttggtcatcatgtctttttcaagttttgaatagtaactgttcaaacttgaacatgaacacattataaaaataaaaagtgttaataaagagtataactttttcattaatgtcctttaaaagaattcgttaacaaaaatctgtttctgttctttcttatttttgttttaagttcttttgtttcaactgtcttaccgttttcatctaagtatcttattattatattatattttcctttaggtaaactcaatgttgccatatttacttgttccggcaaacttctccaagatcttaaatctactctgttaagtgtgttggatctttcttttacagttctgattttgtctgccgtatctctgtcgagtcgttccaacaaccttattttgttgtttttacttaaatctctgtcgtttaaaatgtcttgctttttttgttcgtaatgttcgcggatatattctatttctctgaatcccgaaacatatttgtttattcttgaataaaatactgacctgtaattaggttccggcaaatgtttttccagtattgccgcaatatcggttacaagataacttttcgaatgatacttttttgtgctgtcttgttcgtccgttgcttcaatttcaaaagattttattctgttataatattcctgatatacggcaaatgctgcagatacttcatgaacattaaattctctttccacttcgtatctgtacatgttgtttgttttgtaatagtttgcccatgcgaaatcaaaagttagagttacaacttcttcaacttttttgggagcaagtccgttatagtttactataaacaatgttccgttatcgttggtgtacagttgttttgcataaggataagtctttcttaaactttttacatcttgttcaagcccgtaatggcaataaatggtgtacaaattgttcactaaatcttcaggaactttcatgtcgcaaatgttgtagtttgcataagccaaaagtgccaacttgtaagataccatcgcatcgttaaggaaccctgcattttggtatacaagtcccataaaatatcttatgaaaggatcatctttatacaaagctttcttttcgtctatttttactttattgaaaaggttgttaacctgtcttgcttcaacggcggcttcgtctcttttaccttttaatcttcttgtttttaaatagtttaatgcacaaaaaaagtttgcatatgccatttcataattttcacccaaatagtaactgggtaacaatgtatcgtcattgaaaaatgttgaagtgtaatctttcattgaataaatatattttgctttttcgaaggtttcgttactttctttataattgccgtttaaatggtacaaaaagccgagttccaacgaatataaaagtttgttatatttatcgcaattttgataaaaatccgaagcaaaatcaacagcaccacttatatccctttgttctataagtggtgctaatgtattatgaaattcgtttacttttgtcgttgcacaagaagttaaacttatgaatattaacgatagtataaaatatttaactttttttaagtgcatcagttacttatgctttatatttgctttttcctacaacttttttaattttcttttgacctatccaaactttttcgtttgtttcaatgtcgataagttcaagttctgtttgataatatttcaatgttgtttttcctgctgcatcggttattgtgtttatttgacctttcaacatataatcggcacctaattctttaccgaatttttttaccgttgcgggatccgaaaaatctgcctgatccattctttcttctcttatttcttctctttgatctttagatgcaacgaatgatgctttaccggaatttaaaagagctatttcaagatcttttgtaaatgtttcggtgcttatgtgttcatcgcttttgttcaaaattgttccgacaataattctcggcttggcttgttttttcatcatgaaattgtctaaccaaggtcttgataaagaatcttcaatcatttcaccggcaacaagtttggaatctgtgtcgttccagttaccgcttaaatcgatttgttcattttcatctactcttgtaactttcggtgttgaagagcaagaaaacaatactaccgcaaaacttaacaaacaacccattaaaaataatttcttcattttaactccttatttgtattttatttcatcaacattatgttctgttattatactaattattatcaattattatcaataaaataagtttgtttaaaaatgcgacaagatgttggcggaatacttttataaaatatttatagtaaataacactaaaaattttgtaaaattaaaacaatgaatataaaaaataaaaattattataaatattgtttgattaaaatccagtagcatttttgctaatggattttgttttttttggtggaggtatagtgaataatatcacagaaattgaatataaaaaaataaaaaacaaattgggtaataatgattatagattaggcttggatttaggtgttggttcaatcggatattgtgctatagcattgaaagatgacgataatggagaaaaaagtgtaacggataatgttgttctgttaggttctaggatttttaaagcatctagtggtgctgttgatagaagacaaaaaagaggacaaagaaataatcatagacataatagagaaaggaaaagatttttatggaatttattggctagtaaaaatttagctttagaaattccgaaaaatatagggaaaaaagaagattcttcagaagaagaaacttcaaaaaaaagatttcctgtagaaactctgaaaaaagatccatatacattaagatataaggcattagaagaacaattagaaaattatgatttaggttatgttgtatatcatatagctaatcacagaggaacagcatctgtaagaacttttttagaagatgatgaaacaacaagaaaagataatacggaaacagcaagaatagccgataatataaaaagcgtaatgaaaagtaacggatatagaacttatggagaatttttatataaggaatatattcaaaaaacgtcacaagataaaagagttaaagttacaaatagtaataataaagtttttgcagtaaccagagatttgataatagaagaattaaaaataatacttaaaaaacaaagagatcatgcaaatttaacagatgaatatatagagaaacttataaaagcggttgattatgaaactgagaaattaatacctgaaataggaacttgtccatattttagagaagagaggagattacctaaggcacataaattaaatgaatacagaagaatatatgaagctttaaataattccagattttttgttcctgttacgaatttagaaacgggtgaaataacatcatttacggaaagacatttctttgatgatattgttgataacaaattcccttttaaggaaaaagaaagggatgttctatttaactatttacttggtaataaaaagttaactgtagcaaaggcacaatctttgttaaaattaccttacggaacagaaattcaactgcaaggcaaagataaaagtaaacaagaaataaaaggttatactttgaatactcttgagaagatgtctttttggaataggttaagtgaagaactaaaagatgaatttttatatgattggaattcttcaccggatgaaagacaattaaagaaaaaattgttagaaatttataatttgtcagaacaagaaatagatgagtgttttaaaaaattggttatatcttcttcgtatgcggatatagggaaaaaggctatgaagataatattgccatatatcaaaaaagggttatcctataatgaagcaataggaaaggctatagaagataaaaaactcccaagttttagcaaagatgtttatgatttgttgccatactatggaaaaatattacaagaaagcacacagaaagttatagcaaaaggtttttccaatcaatttaaaaataaaaattacaaaatacctaatactaacaaagatgaattggagtatggtaaaatagcaaaccccgttgtacatcaaacattaaatgagttaagaaaacttgttaatgagattattacaatattcggtaaaaaaccatacgatataacaatagaaacatcaagagagcttaaaaagagccaacaagcaagaatagagttagttaatgaacaaaaggataatgaaaaaaagaagaaaaacatatacgatacttatatagttcctcatatcgcacagataaaaagtaagaaagaaaatccattaaattatattttaagatttgaacttcttgatgaacaaaataaaaggtgtccgtattgtttgaaaactttaagagttgacgatataatttcaggtaaagcggaaattgaacatatttttcctctatcattaagtgaagatgattcgaaaaataataaagttttagcctgctctgactgtaatgctacgaaaggagaaagatctccatacgatgcttttgcacatttaacagaaggtaaatttgtttggaataatattctggcaaatttgttagatgagaataataataaaaattttagaaataaagcatggcgattttatcaaggttcttttgaaaaatttttagaaaataaacctatgaataaaagatttactacggataacagctatatttctaaaacagcatcgaaatatttaaattctttatatgataaaccaacaaaaatattccctgttaagggatttttaacctctcaattaagattagcatggggaataaatggtgttttaataccatttgctaaagaattgttaacagaaaaagaacaagaaaagttacaaaaagaattgtctcaaaataaaaaaattagaatagataacagacatcatgctttagatgcattggttcttgcttttgcaagtagaggatatcataattttataaatactattaattctaatgggtataaaataaattataaagaaaaaaattggttgtcgaaaattttgttgccgccggcaaataaaactgtagaagaatttaatgattttataaaaaataaaattccggaaacaaatataagtattaaacatgatcatgataagaatggccaattgtttaaagaaacaatatatcaaacatattatttaaatgatagtaagtctatacttgttagtgttaaaaatgtaaaagatatagattttccttcagagaaagaacctaaagagcgattagaaacggcattatgtaaatataatataaaagatacggataacgaaaaattaaaagaaaaaataaaacataatgctgaaaaatataatcaaataataaagattttatctaatataaaagaaagattggaacgtgaaaatgtaatgttaaaaaatgaaggtaaaaaggaaaagaaaataacagaacaattgattttcaaatctgcatgtgaatatgtttctggtaaatattatcaaatagaaactaaattgaacaataaattttattccgcaaaaaatccaatacaaaataagacaggatttggttatgatacaggagataatctttgtttagatttgtattatgattctgaaggtaaattatgtggagaagttattagaaaagcaaattttttagcagggcaaattccggaatataaaaaaaatggatatactctttttgaaagaatttatcagggagatattttagaagttgatcaatcggacaaaaaatggtctttaaaaaataaaacaaattcagcacctaaaaatagagtatttgtaaagattgcaacttttactgaattaaatgcttactatgaaaaaggtaagaaagatcaaatacaaatttatttttgtaatatattaaaagcagatcaaaaacatgatgattctttttatatttcaagtatgcaagaatataacccacgaaaagttattttgtcatcgttgggaataataaaatatcgttcatcagtattaaaggataaaaatgtggagaataattgatattagtggagatggctattatttatctgtaaagaatgataatttatctattctgaaagataataaagaagttttacatgcttgctttgcagacattaattctatcatttgtagtggtaataatattgtatatactaatgctgtaatacaaaaatgtttagaaaataaaataccattaactttttgtaataaatctcacttgccgacaggtatgttaattcctacgttttctataaatgagtatggccaaagattacaaattcaaattaaagctagtgtgcctttgaaaaaacaaatttggagacaaataataaaagaaaaattaaaaaatcaaagtttgtgcttaaagaactttgatattatagatgtttcaaaaaaacttttggaactttctaacgaagttaaatccggagattccacatgtagagaaggtataggtgcaagattttatttttcttctctttttaataattttaatagggataataataaaaccgatatattaaatagtgctttaaattatggctatatagttgtaagaaattgtttagccagagccatagtatcttccggtttaaatcccgcattaggtgttttccatagtaataatcataatccgttttgtttagcggacgatttaatagaacctttgagacctattgttgattatcaaataaaaactaatattaatgactttttatcagagaaagaattgaattctaaattaaagaaaatattggtttctatagtagatagtaatttatatttcgactttgaaacttgtaaatttacatttgcattacagaaatatgttcaatcatatttctattgtttaaacaagaaaacagataaaatttgttttcctaaaatttttaaatgatatcaaaatataatgctatgtggatattagttgcttttgatttgccaacacttacaaaaaaacaacggagaattgcgagcaactttagagaacaacttaaaaaaagtggatttgttatattacaaaaatccatatacagttactatgcatgtacaaaagatagatgtgatactattgcaaatacaataaaaagattagttcctgatgatggacatatagccattttgtttttgacggacagaatgttcggattaacaaaaaattattatggtaaaaaaacatcaaaactcaaacaaccggaattgtttgatgaactactttaaaataatagaaccagttaaactggcattttgcgaaaaaactcttattagagttgccctttttatacaaaacttttaaaaaaaatcacaaattttagggttgttaaataaaatttaatagaatttttttaaaagtttttttacttttatcgtcatcattttcacattgctattttatcaaataacatttcggggggcaaccctaacaagtgtattgtcgttatcttggagtgttgaattttatcaaataacatttcggggggcaaccctaacagtatgcagacttagaccttgatgcaaaatattttatcaaataacatttcggggggcaaccctaacagaaataaaagagatatagttcaaaagaagattttatcaaataacatttcggggggcaaccctaacaatattatgttggagatgaggttataaataattttatcaaataacatttcggggggcaaccctaactaaacaagccattttatcatttgtagcataattttatcaaataacatttcggggggcaaccctaacgggatattattattagacgaaatagacgcaattttatcaaataacatttcggggggcaaccctaacttatatgcttggtcatatactccataaagcattttatcaaataacatttcggggggcaaccctaaccaattactaaaaagatatacgggatattcgattttatcaaataacatttcggggggcaaccctaacgggcaggaactcaatatcaataatgatgttattttatcaaataacatttcggggggcaaccctaactttatatgcgaagagcaaaagagaaggggaattttatcaaataacatttcggggggcaaccctaacgaaaagaatgaatttgaccaaatcatcacaattttatcaaataacatttcggggggcaaccctaactgattgaatcgagtaaaaattaaatgaaaaattttatcaaataacatttcggggggcaaccctaacaaaggtaatacctataacttggctgaattgattttatcaaataacatttcggggggcaaccctaacggtacaattatagaagatacctgtaatttaattttatcaaataacatttcggggggcaaccctaacagaaagcaacacaacactaacaaagaaaaaattttatcaaataacatttcggggggcaaccctaacaatccgcgtgcattttcgtttatgaaatctattttatcaaataacatttcggggggcaaccctaacaatgacagaaataatatttttaggaacagaattttatcaaataacatttcggggggcaaccctaacaactaacaacttgccttcttcctatatacaattttatcaaataacatttcggggggcaaccctaaccaacaaagattgagcgataaactttacaatattttatcaaataacatttcggggggcaaccctaactataattaaataaaaaaggaggaagttatgattttatcaaataacatttcggggggcaaagcctttgtctgttgtcattgtccttcaaaaccttaagattttttttatttaaaagaaaaatccgttttgtcaaaaacaattaaaatttattttgtgattatataatctatttattataatattatttggtaagaacatatattaacaatatttattgacttatgctttttagttaactctggcagagtttggttaagaataaaaggagaataaatggatataataatttatgcacaggcgcttgaaacaaatgctccggcagacgtttattataaggatagatatgtatatggaagcatagatgaaaaagtcgatttaagtgaattttttaaatgcacatatagcaaagaagatatgttaaaatatgagacagtggagtatttagaagaacaaatagttatgttggaaagtataaaaaaatacatttatttatatattttaggtgaagaaaaagattcttccggaagatatgtgccgataataattcaagtatctcgtgaagatgttgataaaatattttatgcattagacgaatttttagataaaagtaacagacatattacagaaaaaaccagaaaaagaataagcaaagaaatagaagaatttcaaaaagcgaaaaaaggcagaccatatatttggggtttcgttcttttatttattttcgctgttgttttttttatgatgtacaatgtaatacaagcagtaaaaaattaaattaaagttgtttgtttgtatcaatataataaattaaaaaaacgggaagaaaaagttcttcccgtttttacattattgttgttatttgctctcaaaggatttgagattttaaataagaatgaagcatttggtgaataaaaatagaaaacaatagccgaattagattaaattaggacctgataactatccgaattcaaagttatttcgaaagataacttttttgattttgtgttagattgaagaaaacgaaaactttaacttaaaaaaatacttgactaattcttataattggtataaaataggattgcaatcctataatttttaggattacaatcctattttgtttgggagacgaaaatgtttttgtatagaaaactatctaacactcttaaaaagttaatagaacaaagaccgttggtatatttaaacggagcaagacaagtaggaaaatctactttggttcaaaatttaaacttatcaaagaaaataaattatataacattagactctccgtttgttttggaagccgtaaaaaatgacgcaacaaatttcctgcaaaatttgcctaaagataaaataaatattatagatgaggttcaaattgccaaagaattattccctatattgaaaatagaaatagataatgcaagattaaaaaaacaaaatgtaaaccaattatatgttttaacaggttcggcaaacttaatggcgttaccgacattagcatcatatttagcaggcagaatggcaatattgacattatatccgttgtctgcaagtgaatataaaaaaacaaatgttaattttatagaaaaattatattctcaaaatttggaatattgcaaactaacaaataaagataacttattaaatatcataaaaaattcaacttatcccgaaatagcacttaatcaaaaaatagacagaataaaatggttagatgattatttaagtacaattttacaaagggatataagaaatatggcagatattaaaaaccctgaaaaaataattactttactttcctttttagcaacaagagttgggggacttttaaataatagttcaataatgaaagagataggattagataataaaacttatgataaatataaagcattggcaatgaatacatttttaacatttgaagtaaaagcatggacacctgttacaaaaataaataaaaaatttacaaaatcttcaaaactttattttaccgatatcaatatgctctgttatattttaagagatagtttggaatctgtttatgagaataataaagaaatattcggcagtatttttgaaaactttattgcaacggaaattataaagaatatagatattaatatggatttgtcatattttaaaactacggataataaagaagtagattttgtgttggaaaataacagaggtgaaattttagcaatagaagtaaaaacagcaaaaacagttaccgataaagatacgaatgctcttcaggaattacaaaaaattacaaagagtaagtttaaaaaaggtatagtattttatacgggaaatgaaatagtgcctatgaaaaaagatatttgggctattccggtaaactatatttggcaagaataataaaaactgttatattgtaaaaagtaatgataatgaacgacgatgagatcccggatcgagtccgggatgacaaactaaacgccaatgtataatttacaatttataatttataatgaacgatggaaagtcgttaaagaccttaagattttcggttagaatgaagaaactcaggaatgaagtgtatatggatcccgtaagggcatactcgatttcctgagtttcaatattataaccaaaatattaaggtcgctattttactattttcttaaattttctttttcctgcttgaagtatcattccgtttttaacttcaatctccgtatcagccgtcaccttctcattatcaactttcgctccgccctgttcaatcaatcttcttgcttcatttttacttgcaaccattttagatacaaacaaaagttcggacaattttattttatctttatcgcatttaaattcttcaatttcggtaggcaaatctttatttgcaaatattttattaaattctgctttagcattttccgcagcttctttaccccaatatctttcaacgataattgagccgagtttcattttggcttctttcgggtgcatttgttttatttcgtctaaattttcctgcgttaaaagttcataatagaacatcataagttcgtccgatatagacattaacttaccgaacatatcctgaggtttatcgtttaatgcaatatagttgttataagattttgacatctttttaacaccgtctgttcctacaagtaaaggcatagttataacaacctgcggttcctgcccggcatctctttgcatatctcttcctaaaagaagattaaacttttgatcgttaccgccaagctcaacatccgcctgtaaagcaaccgaatcgtatgcctgtaacaaaggatacataaattcaactatacttataggaatatccgctttaaatcttttttcgaaatcgtctctgacaagcatttgtgcaaccgtatgtttggatgctaatttcaaaagaccttctatacccaacgcatttaaccatttactgttaaaaacaacttccgttttttctctgtccaagattttgaaaacctgatcctgataggttttaatatttttcattatttgttcttcggtcatcatgggtcttgttgccgatcttccggaaggatcaccgattcttgcggtaaaatcaccgattaaaaatacaatctggtgacctaaatcctgaaacacttttaatttgtttataataacactgtgccccaaatgtaaatcgggagcggtgggatcaacacctaactttattcttaactttttacctgaagcaagtttctttgccaactcttcttcggatataatttcgtttgttcctcttcttattaatgaaagtgcatctgttaatgacatcaataattacctcttttcttctaatcttctaaccctcaaatcttccaatcttttagatggaaagtttttgtatcaacttataagtttctatattaaattctcttttcaagttaggaagttcgctaaaaggtgtaagttttattctacctttttccaaaccgataagaatatttgtttgattttcttttaacaatcttatggcttccgcaccgaaagcagatgccaaaattctttctcttgcggttggtgttccgcctctttgaatgtatcctaaattgcttacttttacatcaagtcccgttttgtctgctatttgtttaccgaactcgaacgagtttccgcaaccttcggcataagcaactatcaacgaattttttccggagacacttgcttgtctgaacttatcacacaattcttctatgtccggtttaacttcgggaactactataacttcggcacctgatgcaagacctactgccaaagttaaaaaaccgtgatgtctgcccataatttccacaacaaatattctgtcgtgactttttgccgtatctcttattttatctattgcatcaacggcagtgttaagtgcggtatcgtaaccgatagtttcttccgttcctacaacatcgttatctattgttgcgggaagatttacaacttttacaccttctttacttaaagcttcacctgcggcaagtgaaccgtctccgccgataataacaagactgtctatatttaaatcgcttaaaattttaattgctttttttctgccgacttccgttttaagttcgggacatcttcccgttcttaaaattgttccgccttgatttattattccgcttacacttcttgcggtcatatttatatagtcgccatccaaaaggccgccgaaagctcttttaaaacctaccatttcaaaaccgcaatatataccggttcttacaacggctctgactgcagcattcattccgggagcatcaccgccggccgtaattataccaactcttctgttagccataacaaaacctccgctacattatatatataatgtatataatgttgcttattttacaaaattaaatattaaattgtaaattgctataggcaattaatcagagtaataagcgaaacggattcattttttaaattataactttgtatttggctcaatcgagtaccaaccgctatcgctttctttaaggagttactaaccgatagcagtgccaaagattgcgagatgttttttttgttacaaagaggcggagctttgaagtaatagttgatactattacaaaaagctacaacgaatttgtaataaaaaagaaccacaagatttagtactgatattggttaataactccttcggtacacttcattcgccaaatacttcgttataatttaaaatctttaaatcctttgattgcaaacaacgacaaaagaggaaaagatatttggatagattccggatcaggtccggaatgacaaacgaaacaacaatttataatttacaatttacaatgcaggtaaaaattgctaaacaagttttgacaaatatgagttgattttttataataaacgaatagtaaaaattctttgtaaaaaggagaaaaaatgaaaaaaagtttattggcagtattgttggcagtagcacttgtagcaccggtgtttgcaaccgaaaaaggagatatggaaattgtaggtaagttaggtttaaatttaacaccgaatgtagcagcaagtggagatgtatcaaaaaagggatattttagaccatggacttttaaagatacggatgaggatacaaatatgtccgttttaatcggagcagagttcttttattatttaaacaaaaatgtagctttgggttttggtataaacaataattttaatgcagagttaaaagatctgacagttggtgatatgaaatttgaaagtgaaataggatttacaaatttttattttgcagtaaaacctaaaatagagatgcagtcagaaatttttaacagcatatattttgtcgggcaattggggtatggtattctaagatttgatagcgattatgaaggagataaactttcggaagcagatggtaacggactttattggggaatcggtgcgggaactgaaatttataaaaattttatagttgaattgctgtattcggttaactatggttcaattaaagctgttagttatatgaatggtaaagcagatttaacatatacaactcttacattgaatgttggttacaaatttgcaatatagttattgcgacattatcttttaattttataatttctaaaaaagcggaaagagtcaatctttccgctttttttacataaattgctaattgttgttttggtattgactttaaaacaaattttagatataatacaaaaacttacataagttttttttgtaagaaattatatgttttatcgtgcatgtataacgaaaaaaatcgttatgcattgcatatttttgttattaaaaaaaacaagaaaatatttatgtaaaataaaaaatatcagggaaagaaaatggctagagaattttcattagaaaagattagaaacttcggtattgccgctcacattgatgccggtaaaaccacaacgacagaaagaattcttttttataccggaagaactcacaaaatcggtgaagttcatgaaggtgctgcaacaatggactggatggaacaggaaagagaaagaggtattactatttgttccgctgctacatattgtaaatggcaggatatgcagtttaacattatagataccccgggacacgttgactttacggcagaagtagaaagatctttaagagttcttgatggtgcagttgttgtattcgattccggaaacggagttgaaccgcaatctgaaaccgtttggagacaagccgataaatataatgtaccaagaatcgttttttcaaataaaatggataaaatcggtgcagactatttcatggttatagaccaaattagagaaaagttaggtgcaacacctcttacaatgcaaattcctataggttcagaatcaaatttccaaggtgttgttgatttggttcaaatgaaagcttatatatggcacggagaagaattaggtgcaaagttcgatataacagacattcctgcagatttagtagataaagcaaaagaattaagagaaaaaatgatagaacttatagcagattacagcgacgatgttatgaattgctatatggaaggaaaagaacctacaatccctcaaattaaacaagcaataagaaatgcaacacttcaaataaaattaatcccggttttctgcgggacatcattcaaaaataaaggtgtacaaccaatgttggatgcagtttgtgattatttgccgtcacctttggacagaaaagatatgcactgcatagatgcaaatacaaatgaagaaacttcaagaccggctgacgataatgctcctttcgcagctttggcctttaagatacaagcagacccttttataggaaagctcacctatattagagtttactctggaactttgcaaag

SEQ ID NO: 852 - DNA, 23588 bp, synthetic construct
  source 1..23588: mol_type = other DNA
  misc_feature 1..23588: note = Synthetic
tgttcatggaaataataaactgtaaatcccctttcttttgaaagcgggttggcgcctacaggtaaagcgttgtggtgtatgcttacaaaaatatgcgctccgctttttaaagccgccgcagctctttgctgcagggaagtttgttcagtttcgtttttactcataataacttccgctcccgtttttgcaagaagactggccagctctttggcggtttgcatattaacttcgtattccaaaaggcctgtagggccgatggcgccgtcatagtcgggcttccttctgggggaatggcccgggtcaagcataattttagcgcctgccaatggtttgcccggctgcgggtttaaaaaaggtttatgcataagctctaaaacaaggttgcctttttcgtcatatgcgtaatcataaccccaaaggatttggccttccgcataatttaaattaaattttattgtagtgtcatcaataatttcaaaaactatattgttaaccaaagtgcttatagggtcttcaataacagggatattgtaatcggtataaaagaaagtcatgttaaatgacgtcggcccgctttcagtaagtacgggtacaatatttttgccgtaaaaggtaattcttgtttttgttgtaagatcttccgttgtaacggtttctattttattaagcgaaggtgtttttcttaccggccttacttttgattcctctatccacccgctgtgtttttcacctaagcgtacacggtacattccttcgtacaaaccgtctattactatattaccgtacatattataaaaaggatataagcttcctttttttaccgcttgatttcttatgcggcttcctggggcctttatttcagcagttacaaaatctttaggttccaatatttttagcctgcccggggcgacagctctgttttttgtgccggtgggctcatggaatattctgtaagtaatttttgcggctttagcttggtctttgtctgtaataatataaaacgcttggtaaaaaccggattcaacttctttaagctcaatattttttgcttcttttaaaccggaaatcgccgcggttaccgaagagccgggcattccaaaggcggaaagctctattttatcgccgggtacagcccaaatatccgtttgcggttttattgtttttatttcaaaagaggcttctttaaattcctttatttttactccgtctacattaacggttctggttgcttgatgttttacaacgccgtcgtctgtttcaatattaaaagtaaacttaccttcctcgatgggtaaaaaagctaaaaatccgcctgttttataaacgggaacaggtacattgtttattgtaagagccgccttggggttgcttatgtttccaaaaataaaagttgcttttgtacccatcggaatgtacatattttcatgaggatactcaactgaaatcgggtaaaccgtttcggggtttttctccctcagcggcaagttggccgccacagggacgtcttgcgcatatgaaagcgccgccgatataagcaataagaatgcaaaaaaatagtttcttttcatatcaataaaatgatagcataatcatatggttactagaaactccataattgattatataaatgactatttgggttccgcgcttattaaggatgcgtcccaaaacggcttgcaggttgaagggagggaaaatatacgtaaaatagtatttggcgtgtcggccaaccttgaattttttaaaaaagcggccgccgctaaagccgatatggttattacccatcatggtttgctttggtcccaaaatcctgccgtaacaggcatttttaaaaaaaggatagagtttttaattaagcatgatataaatcttgcctcctggcatttgccgttggatatgcacgctgttttaggcaataacgcgcagatggtaaagaaacttggggtaaaaaacataaagtcttttggcgtttatcacggcgtaaagataggttttatggggctgctccccaaagaaatgactcttaaggaagttgaaagcaaatttgccgtaaagcctaatttggttttcaatttcggcaagagtaaaaataaaatcgttgctataatttcaggcggcgggtatgatatgtttgaacaagccgttgacgcaggggcggatttgtttataaccggcagttccgaagaatttgtgcaggaaattgccagagaaggaaaaataaactacatggcgcttggccactataattctgaagtgtacggcgtaaaagcgcttatgggacttgtgggtaaaaaatttaaagtcagcacggaatttatagacgtggctaaccctatctgagaggagaattaatatgagcattaaggaaattttaaaaaaaattgacggttcaaaacaatttgttatcgatatgcaaaaaggtttaactgctataccggcgctttcacccacgttgcccggtggcgaaggggaatatgataaagcggtttatttggaaagtgttttgaagaaaatgaaatttgacgaagtttaccgtttggactgcccggacaaaaaagctaaaaacggcgtaagacccaacattatagccaagtattacggcaaagataaaacaaaaaacttttgggttatggcgcacatggacattgtgtcccccggcgatttaagcctttggaaaacggacccttataaagcggaagtaaagggggatttaatttacggccgcggaactgaagataaccagcaaggtcttatctcaggtttggtagccgttaaagctatgatggaccttggcataaggcccgatattaattttagttttatttttaacgctgacgaagaaacaggcagcgcgtacggtataggacatatcgtaaaaaagcattttaaaattttcggtaaaaatgactgtgttatggtgccggacggcggcaacaaggaaggcactcaggttgaagtggctgaaaaatctatttgctggcttaaatttaaggtgttcggcaagcagttccacgcctcaatgccggaaagcggaaataatgcccatagagcgggtgctaacttaatagtagcgcttgatgaagctttgcataaaaaatttaataagaaagacaaaatgttcgcgccttcggtaagcacgtttgagcctacaaaaaaggagtcaaatgttgacagcattaacattttgcccggtgaggacgttttttattttgactgccgtatcctgcctgtttataaagttgaacaggttatgaaagaggttaacgccgtagttaaaaaaatcagccagaaatttaaaacaaaaattaccgttgaggtagttcaaaatgaaagctctatacccactaaccctaaggctgaaattgttaaagccactgtaaatgccgttaaacttgtttataaaaacaaccccaaagttgtaggtataggcgggggcacagtgtccgcgtttttaagaaacaaaggcgttccttgtgttgtatactcgaagctgcttgaaacgctgcacagcccgaatgaatgttcaagtattaagaatactttgggcgacgctaaagtattcgctcatatggcaatgactttaaaatagtttgtaaagagttggttatgaaacagaaaatatttgtaaatacagtaaaaactttgcgcgggaatttatgctcgcgcaaaggtttttctaaggttgaggcgctttgcgctgtaataatagttatttttttaataggtataagcgtgcctaaatttatttctcttcacaatgagtgccaagaaggcaacactaactataacctggcaaggctaagaagcgccatagccgcttactacggcaataataaaggcacatatcctacggataatttgcagtctttaatacctgtgtatattgaaagtattccttttgccaaagtaaaaggccataaaaaatcaaacatggtaagcacagagtttacgggcaaaggcggctggtattatataaacgataaaaatgaccctgcctggggtgaagttaaaattaatcttgacggcgctgattccagcggcgttgactggcggaatcactagtggatatatttataataattattgccgttttattcggccttataataggaagttttttaaacgtttgcatatgcagaatacccgaaggcaaaagcgttgctttcccgccttcgcactgtcctaagtgcaacgttaaaataaaatggtatgacaatgtgcccgtgctgtcttatattattttatgcgccaagtgcagacattgtaaggaaaaaatttcatggcaataccctgttgtggagcttttaactgggctgcttacgggattatttgtttacaggtatggtattacaatatggacaggcgttgttcttgttgtggtatacagccttataatatcttccgtaattgatattaaaataatgattatacctgacaggttttcaataggacttattgtttggggtcttgcgtttttttggtgtaatcctaactttagcggaacaactttacaaatgtttgggcaaagtttattgggcgcggcagtgggttttggcgggcttttggcggttgctttgctggggtacgctttgtttaggaaagaagctatgggcggcggcgacattaaacttatgggcggggtaggcgccttgctcgggtggcagggtgttataactactttggttatagcctgtttaataggacttgtttattctatttttttaatggttaccaaacgcgccgacaaaggttccgcaattccgttcggtccgtttttaagcttcggcgctttagtaaatttgttttattttatatcgccttctctgtttttgattagatattaggagagcctatgaaaaaaataattatattaattgtttttatttgtgtcgttaccgcgggttacgcgcaaaattattattcaacaaggtaccacaataaatattattatgaggaggacgttcatccataccgtttgagcgatcctttttacattcaagacttgggtgttattgttctggatacgacagggtgggttggcaggaatatacacggcgataaagaaagaagatatgtcgccaaccagacattaactttgggtctggctgactggtttgttttaggcggcggtataagctataaaaagtatgacactttgcgcaacggcaagaatgaaaaaattaaagggtttcttaacccctacgccttagctaaaataaggtttttagataagctctttaaaatagatttgctgggcaaagttacgtttgacgcgtttgacactgttgccgaaggcggtatagaatcaggcactcaaaaatacgaaggggaacttttggcaggcccgaaatttgagaaactttcaataggcgctaaagcaatgtacggatattggcgtaaaggaaccgaaattataaacccggataaaaattatcagtcaaacgttggcggcggagcgattgtttccgtaaggccgttaagtttttttgatttcggcggggaagcgggatatatagtttacgatgttgctgaaacaaaagatgaaaaagaattttacttttcattaaacgcgaattttgagattataaaaggcattgtgcttttaggcgccttttatgattttcataatctttcaaaaaatgaagactaccagaatttgggtatacgatttaaagtagctatttaaaaaccagtaaaaattcaaaaaaataaacgatatcccttttttagggatatcgtttttaaagaggtaaaaagaaaatgaaaaagacttttatatttttgtcggcggtaattttattgaatataaccctatttgcgcaggaaggcggcaaaagcggttgggagctggaacttaaaagaatatctttaaatcttacaagcacaagcgttcagcatgcccaaagatatggaggatttgctgattccagactttcagctgacggccagactttaatacaggggtatggtaatttatttgccggttattacgcggaaatgtttttgtggtctaataatttggtggctgaatacggcagaacggaaatcaggcccgcggacggtagcccggcaactaagtctgaaaatgttgacagaattacaattacaacagaccttgcttacaggctttgggagattgaggattttctaggcgggtttgaagccgggccttttgctaatttagaataccaaacagaatttaccactgcttcaagcggacacaggaagcaggtaggcagagccagaggaggggctaaattatttaaaggaaaatatataagagagttttatttagccggcgttttggaggaagattttaccattaccccatattcaaccaacttcgcctgggaaaccggtttaaggcttgaacatgaattaagagatggtgttaaagcgctttttgacgcgtattttagggattatgtttataggagtgatgaaagaaatattgaccttgattatgaaataggtattgaggcccgcatggacgtattagtttataaaaacttaagcgttgcgccgtttattaactggtatgccgcgcaggccaccaactttggcggactaggtcaaaatttatttgtaggcgtgtcattttcatttagccgtttgtttatagccgctggcaaataacaattgattttaatttaaaaccccgcttagtttaaagcggggttttgtatttaagcgggaaaaaccggatagaccaaaaattccaatatactaaaaatacggagtctgtagttttgacagcaaaatttatttgtttgttatttagtttttttgcttttaaatagcatcctaataataacaaataacaaaaacgccaaaagaaatgagaaaagaaaaatccaaccagtttttgcaaagatttcaagttcaggattggggacggaaagacataaggttgcgccgtttttgccgatagtgcatcggtattgcgaggggaaaaggtaaaatcctgcgaaaaataaaccaactgttgcaataatccacaacccaataaaaactattatagatttaaaaagtttcataatatatcctcttttaatattataagtatttttcgtacaaatgtggctgtgaaaaaggcaaatagagaattttatgctgttttattcatgtttttgccttaaagcactatataaaactctctcataggaaaaggttaggatattctgaagaaaaataaaaaatacccgggtttaacggtgattttcaccaaacttgggtattaaatggcgagtacatagtattggcagcaaatgctctctgtttatatttttcaaaattttcgtatatcagggactttgcaggaaattttagcgttttggggcattttatgcagattttttagatgatttgccgtatacaatggaaagagattcccgttagaaaataacagcgaattaattctttttatcagggatttttataaaaaaaatataaaaagaggtaattaaaaatcagtcttttttagacatattttgcgacattgatcttgaaaaacattctattttaggcaaactttgcacgcttttgcaattttgcaaccttgcacaattatatcggataaaaaagcatatatttattacttttgtatccaattatggctgtcatgcgctttcataaaactatatgcatcagaaagaacagaattccatgcttttatgaataattctttatcaataaatatatctatcaaagtttcaaaatctttctcattgtctcttcgtatagcaaaacgtagctttccgttatttttttgccaaataaatagttcttcatgtgagtagtattcaaagtaagccttggcatctttgccatctttaatatttttaagaaagctatccatagaagaaaacaaatgttttgtttcccaggctatatctgctatcctttctggaccggctgtaattgttagtgcaattacgattacgtcattacaaacagggtcggctttgttatccttacactcttgttcatctatcttccataaaatcttgagttcattagcctgttgtggcttggaagagaattctgtgggcatttcatcaggggcgcgccaacatccattttcgaaatctaaagtccagccatcatacatgattatatggtggagatgatggaaggtgcgaaaatcgttcgtaagcttctgatatatattccaatcaccatggcagatcatttccaccttttccacatcaggattagaaatgaaatccttttttaacttttcgtcggatatcccaccgtcataaatttgccatccggcttgtcctttatatttaacagcaaaagtttttgttttatatggaaattctttcatgttttaattccgttttaggtgtctgttaattattggcgatagagtaattctgcaacacgactatatagccgtcgaatttcaaacagtctgcatctttttcttaatcatacatcgaggttagctcaactgtttttgcataaattctatggacaattttataattattaaattatggggagatgtggttttcatactgcttataaagagccttaatttcttttacaactcctattattttaaatagcggctttctgttatcgtaatgattttcgtaataataatctatatcaaagatagcatatataaattttctattcgttttgcagcacgccattttatattgtcgccaattttttaaagacttcccttagttattgtatttgccactcttcaactaaagccatacattttttcttttttcagaattcatttaccaatctgcaatttataatatttcagtatttaataattgaagttctttttttaatgaccaatttttggtttttccttccttacttatatacaatatcttgttataaagtaggtaatactttaattcaaggaactggcttaatgggaattgtgtgtttgtagcccaatttcctctaaatcccaaaagcccgtattctttaacaatagcgtcaatttgtgttagaattacagctaaaaaagctttgaaatttactattttgtctaaaactattttgttatatttttcttttccactttcgtcctcatataaacttttaatgattattctaaggtttcttctcctatgccgttccaagctccacgcgtaaccgcctggctcatcttcccatataaaaacagagtcgtcatttgtaattttagtatttttaccttgttttgaaattatatcccattccgcaataatacttaatagcccttccaataaatccgtgatgggaaaacacaaataacttatacttggaaaaataactttcgtgtcacctattttaagataggcttttgagcaaccaaacccttcaagtttatatttgaattctatgtttgtttcagttttaattataggttttatctttttaattttcataacgaaattttatcaaaaaataagaaacattatattgtaatatttatacggctgttcttaatcagaagagaatgaaaaaatgccaaatataatacaatataatcatatggaaaacatatgaaaaatttccaccatgtctttattttcccacaaatgatttgccacgatttgttttttgtaagttcttattatatcccttttattaaaatagtaaaaagacaagctttacaggaagagtttgacgacgaaataaccaactctaagatagcgccgcccacaaaaaccgagccaaactaactctaacggctaaggacggcaaagaagtaatattcaatggaattgcatcagatattttcgctttttaaatagggtctacaacagtattgaaaaattgttaaaatactgcaaagctgacaccggtgtcttaggcatagaagatttggtgcacattaagaacaggataataatacttgaacacactatgcttatcatggaacaaataaactccctcaatgccaaaaaggaatatagaagatatatcagaaatatgcttaaatgactatagataaatagaattaataaggcgggggaatatgcaaaaaaatataaataccaaacaaaatcatatatatattaaacaagctcaaaaaataaaggaaaaactaggggataaaccttatcgcataggcttggatttgggcgtggggtctataggttttgcaatagtttccatggaagaaaacgatggtaatgtcttattgccgaaagaaataataatggtaggaagcaggattttcaaagcgtccgccggggcggcagataggaaattatcacgagggcaaaggaataatcacaggcacacccgagaaagaatgcggtatttgtggaaagttctggcggaacaaaaattagctttgccagttcctgccgatttggataggaaagaaaactcttcagaaggggaaacgtcagccaaacgatttttgggagacgttttgcagaaagatatatatgagttgagagtaaaatctcttgatgaaaggctttctttacaggaactgggctatgttttatatcatattgcagggcacagaggctcgtctgccataagaacttttgagaatgattcagaggaagcccaaaaagaaaataccgaaaataaaaaaatagcaggaaacataaaaagattgatggcaaaaaagaattatagaacatacggcgagtatctatataaagaattttttgaaaacaaagaaaaacataagcgggaaaaaataagcaacgcagcgaataatcataaattctcccccacaagggatttggtgattaaagaagcggaggctatattaaaaaaacaagccgggaaggatggttttcataaagaattaacagaagaatatattgaaaagcttacaaaagcaattggttatgagtcggaaaaactaatcccggaaagtggtttctgcccttatttaaaagacgaaaaacgcttgcctgcatctcataaattaaatgaagaacgcagactttgggaaacactaaacaacgcaagatactctgaccccatagttgatatagtaacgggcgaaattacaggatattacgaaaagcaattcaccaaagaacaaaagcaaaaactgtttgattatctgttaaccgggagtgaacttacgccggcccaaacaaaaaaactgcttgggctaaaaaatacaaacttcgaagatatcattttacaaggcagagataaaaaagcacaaaaaataaaaggttataaattaatcaaattggaaagcatgcccttctgggcaagattatctgaggcgcagcaagacagtttcctttacgattggaactcctgccctgatgaaaaactgttgaccgaaaaactttcaaacgaatatcacttaacagaggaagaaatcgataatgcgtttaatgaaattgtattgtcttcttcctacgcgccgcttggcaagagtgccatgctcataattttagaaaaaattaaaaatgatttatcttatacggaagctgtggaagaagccttaaaagaaggaaaattaaccaaagaaaaacaagcgataaaagacaggctaccatattatggcgcggtactccaggaaagcacgcaaaaaataattgcaaaaggcttctccccgcaatttaaagataaaggctataaaaccccacatacaaataaatatgaactggagtatgggaggatagccaatcccgtcgttcaccaaactttgaatgaacttcgcaaattggttaatgaaattatagatattttagggaagaaaccctgcgaaataggtctggaaaccgccagagaactaaaaaaatccgccgaagacaggtcgaaacttagccgtgagcaaaacgataatgaaagcaacagaaatagaatttatgaaatttatataagacctcagcagcaggtgataattacaagaagagaaaacccacgaaattatattttgaaatttgaattattggaggaacaaaaaagccaatgcccattttgtgggggacaaataagccctaatgatattattaataaccaagccgatatagaacacttattccccattgccgaaagcgaagacaacggcaggaataaccttgtaatttcccacagcgcttgcaatgccgataaggcaaaacgttccccgtgggccgcgtttgcttcggcagcaaaagacagcaagtatgactataacagaatactttctaatgtaaaagaaaacattccgcataaagcatggcgttttaatcagggtgcttttgaaaagtttatagaaaataaaccaatggctgccaggtttaaaacggataactcttatatttcaaaagtcgcgcataaatatcttgcctgtttgtttgaaaagcccaatataatctgcgtaaaaggctctctaacagcgcagttacgtatggcgtggggactgcaggggttaatgataccttttgccaaacagctgattaccgagaaagagtcggagagctttaataaggatgtaaacagcaataaaaaaataagactggacaacagacatcacgcgttagacgctatcgttatcgcgtacgcttcgagaggatacggcaatctgctaaataaaatggccggtaaggattataaaattaattatagcgagcgcaattggctttctaaaattttattacctcctaataatattgtctgggaaaatattgatgctgatttagaaagttttgagagttcggtaaaaactgcgcttaaaaacgcctttatcagtgttaaacatgaccatagtgataacggcgagcttgtaaaaggaactatgtataaaattttctactcggaaaggggatatactttaacaacatataaaaaattaagtgctttaaaattaacagatccccaaaagaagaaaaccccgaaagattttttagaaacggctcttttaaaatttaaaggcagagagagtgagatgaaaaatgagaaaataaaatctgccattgagaataataaaagattatttgatgttatacaagataacttggaaaaagcgaaaaagcttctggaagaagaaaatgaaaagtcaaaggcggaaggaaaaaaagaaaagaatattaatgatgcgagtatatatcaaaaagctatttctttatccggcgataaatatgtgcagctttccaagaaagagcccggtaaattttttgctatttctaagcccacgcctacaactaccggatacggttacgatacgggcgacagtttatgcgtggatttatattatgataataaaggcaaactctgcggagaaattataaggaaaattgacgcacagcaaaagaaccctttgaaatataaagaacagggatttactttgtttgaaaggatttatggcggggatattttagaggttgattttgatatccacagtgataaaaactcttttagaaacaataccggctctgcgccagaaaatagagtttttattaaagtgggaacatttaccgaaattacaaataacaatattcaaatatggtttggcaatataataaaaagtaccggcgggcaggatgattcatttactataaactcaatgcagcaatacaatccccgtaagcttattttaagttcttgcggatttataaaatatcgttcgccgatattaaaaaataaagaaggttaaaaatgtggcgagttttggatatccccggggacgggtaccatttatgcgtaaaaaacaataacttctccgcagtaaaagacagagaggaaaaactgcattgtttatttgacgatataaacagcattatactttacggtaataatattaccatttccaatacttgcatacaaaaatgtttagagcataaagtaccggtcatcttctgcgataaaacctataaccccgccggaatgctgctttcttcttttaccacaaatatttacggacgcagactccagttacaaataaatgcctcaaaaccacaaataaaacaagcctggcaacaaataatcacaagtaagttaaacaaccaagctgaggtgttaaaaagatttgacacgcttaaggcggcggaaaccatttttaatatggcccgcgaggtgcgctctggcgatgctacttttaaagaaggtgtcggcgcaaaggtatattttgaaaatttatttaatgattttcatagaaataccgacgataaggatattataaattcagcgttaaattatggctatgcgattgttagaagttctattgcgcgggcggttgtttccgccggattaaatcccgccatcggtattttccacagtaagaaccataatccgttttgtttaatagatgatttgatagaaccactgcgtcctcttatagattttatggtaaaaaataaattggatgttttgacgcaagaggaaagtctgtcgccttcggctaaaaaatatatggcaagcgtgatagaaagtaacttgtattttgaggatggtgcctttaatcttacggccgggatacaaaaatatatccagtcgtatatcgcgtttttggaagaacgggaaaacaggataattttcccggcaattttaaaatgatttcaccttataaaacaatgtggattttaatagcctttgaccttcctgtaaaaacaaaaacccaaatgagaattgccaataaatttaggcaaacgcttaaaaattccggttttatcatgctgcaaaaatctatttacagttactatgctttcagcaaagaaagatgcgacattattgaaaaacaaataaagcagatagtacccgataatggacacatctgctttttattttttacggacagaatgtttaaaatgacaaaacatttttacggcaggttgaaagtacaggccgagcggccagacttttttgatactcttctttaaattgaggctggctccaatcgccttctcgccaattttttaatactttactaaaaaacttctttgaaccagtaagctggcattttacgaaaaaactcttattagagttgcccattttttaaaaaatttcttaaaaatccccgagattttaactatattttagtattttttataaaaaataatttaattttttatacggaaaattgagtttaatattctataaaatcaattctcggagggcaaccctaaccctttatttcggagtacggtgacactataattctataaaatcaattctcggagggcaaccctaacatattgtccgcggcaaaggcaacccggaaaattctataaaatcaattctcggagggcaaccctaactctgctgctccttatacatatccaaatattattctataaaatcaattctcggagggcaaccctaacgcaaaagtgtaatggtcgccggaattaaccattctataaaatcaattctcggagggcaaccctaacacaattacagtataacattgacagaacaacattctataaaatcaattctcggagggcaaccctaacctcttatagcatatatccccaacaccactcattctataaaatcaattctcggagggcaaccctaacaggaacgaatccaaaaacagaaccaggactattctataaaatcaattctcggagggcaaccctaaccttaacgccgggcatatattgtatttcgttattctataaaatcaattctcggagggcaaccctaacattagttactgcatacacaacagaagatttattctataaaatcaattctcggagggcaaccctaacatgtaatcttccctatatcgtcgcttcaaaattctataaaatcaattctcggagggcaaccctaactcaaggcttagaggtatgggaactggttttattctataaattcaattctcggagggcaaccctaacagggtattgctgtctaaagagagtgaagacattctataaaatcaattctcggagggcaaccctaacgagtcaataacttgatattgtactcacaacattctataaaatcaattctcggagggcaaccctaaccttggtaccgtgcaccgttaatgaatatagaatatctcttaaccgttttcaacgtttaataaactttcgctacagcctttagcaaaaacttaagacatgttaatcgtatgattttagaaaacgggtcagacactccgcgcttacaaggcacttttagaatgctgtgcaaaacaagcgttactcaaacaatggttcgtagcgttgacataaaagatgcttctctttatgcagggcatgccagtaaacaggtgacagaagacattatttatccaaagaagtaagaaaatagcgtgaaatgaaagaaaaaaataaagcatttaaaaaggtaaaaaataagtaatatgtctcccttttttacctaaaaagtcaaccagcacaagccacacaaggccgtacaaagccatattttgcgatgacaaaatacaaaaaagagcctgtctcatcaaagaaacaggctcttgtcaatctacggaaagggagggattcgaaccctcgatacctttagggtatacagtctttccaggactgcgccttaaaccgctcggccacctttccttaaatctatattattatatcaaatattaagtattcgttaaattttaacgcctttggaaaaaaatcctggcgctttttcctgcactataacttgtttaaaaccggctgaggcgtaaaaatatttcatttgttctgaggaaggcagtaaatcttttgatgtttctttctttcgtccatgcattgagttaagttcttcccttgtcatggagtgcgccacaacaaaaattccgccgtgttttaaaaatttaaaagcgttataaaaaaccgcctctttgttaacaaaatgcgggaaaacattgtaggcgataatattgtcataataatcttcttctaatttaatgtcttcaaaatcagcaagcaaagcgttcgcttcggggtgctttcttttaaattcctcaagcattttagaagacaggtcaatacttaaaatttccccgggattgtattttgaaaggaaagggaataaaacgccagtgccgcagccgatatctaaaattttagctttttgcgttatctcacacttagctaatatttgctctattttagcgtaaacttcggatctttctttcgcgtcccatccgcaggctatggaatcaaaaaaggcggctatttgttttttgtccatatcaacgctattaaaggaagtaaaacggcctgcaaaataatgccgggcaaagatgtttgtataaaagcaaaagaagcgctgcccgccaaagtatatgcggttaaaatataaacagctttccctaaaatcatagcacccaataaggagaaaataaaatttaattttaactgctgcctaaaagctccggcggcaaaaccgtatacggcaagttcaagggtcataatcggtaaaatatgggctggaggcataccgcttaaagcgaagcttgctaagggggcggatatgcctaatgtaagaccgcttctccatccgtaaacaaggcctgctaagagcacgggccagtgcatcggcaaaaatactttagtttgcaaatttaagtggtgacacaccgcaggtaaaaccaaagccgaggcaagcagtaaaacctgtaaaataatcgctttttttgttttgtaatctaaaacgtttgtttttgttcgcagggctaaaatattttgcatatggaatcctcttttaagaatatattacatgataacaaatttaataaaatataaacatgagcgtaaaaaacaaaatacttaatgacttaaaaaaaatatctgataaaggaaaggctgtgcacttaagccgtttttttaaaacaggcaaaggccagtacggtgaaggggatatttttataggcgtgattgtacctgataatagaaagattgcaaaaaaatactttaaagaaatatctttagccgagacggaagaacttctccgttcccccgtgcatgaacataggcttaacgcccttataattttacgtttaaaatttgaatgggaagaagaaaaagaaaaagaaaaaattgtaaaactgtaccttaaaaacacaaaaaatattaataattgggatttggttgatttatccgcctgttatattttaggtccgtggtattacaaaaataaaaattattcccaaatatataaaatggcccgttcgggctttttgtgggaagagcgcatcgccatgcttacaactttttattttataagggaaaaagactttaacctaacgcttgagcttgcagaatattttttaacgcatgaacatgatttaatgcataaagcttgcgggtggatgcttcgtgaaatgggtaaaagggatattaaacctttgcttgtttttttagataaacacggcgctaaaatgccgcgtacaatgcttcgctacgctatagaaaaactgccgcagcatataaggaaaaaatatttagcaagataatatgatttatataaaactttttgcctcaatacttttttggagtttaactttttattttgtaaaaaccgctttagccgaatgcggcgttacaacacttgtttttgcgcgcagcgttttggggcttttggttgtaactttatttttgcgtgaatttaaatggcttaaaaccttaactaaaaaagactggctgcgttttttctttttagccatggtaggagtggttatacaacaaaacgttcaaggctacgctactatgcacacaagcacaaaccatgccggctggcttgttgcgttaagccctatttttgtggcttttacaatggtagccttttttaaggaaaggctgccgaaagataaaatgatgggctttataatttgtattttgggcgtgcttcttattttcctttccaaacagacatttgttgacggcagttcaatgagtacgttaaagggtgatttgatttttgtagccactgcggttaactgggttttttacgttgtgccaatgagtatttggtttaaaaacatgcctaatttaaggattactttttgtttgtttttggcagcggttacgataatgcttcctatagaaattgtaagcggttctttaaaggatttcgcgcatatgggcccgagggctttgtccgctcttgcttacttaggtattttttgcagcggatttgcctttattttttataatgaaggtattgaaaaaatcggcccttctaaagcaagcgcttttatatacgcgcagcctttgtttaccatggttttcggctatattcttttgggcgaagttatcagcaaagaggcttttataggaggcgcgcttattttatgcgggctgtacttaataaacgtaagaagaaagcgcctgaaacggttttatataactttaataagatattttagagtttagttacttaaacctgcggatttggaagtcgctttttataaggcccagcgcctttaaaattaaaacgggtataaacaagattataaaaacaaccgctattaatacggacattaaaaagcccgccgccaaaacaactatggctttaaggatggtttcaacccctttggctgtttgggtgttagcggtttttttagagttaacgggtctgccgttctcatcaagcacttcggcttctataatttccgtttcaatgatatctttgttatccatatcttaatattataaaatatataaatataaagacagagggaaaaccctaaaagaggagacttgtatgttgcctaaagcttacgaacctaaagaagttgaggaaagacttgtcaaagaatggcaggcaaaaaaaatattcgcgtctaatattgacaaaaataaggttccctttgttatagtaataccgccgcctaatataacgggcgcgcttcatatagggcacgcgcttaactgcacattgcaagacgttttaataagaacggagcgtatgcttggcaaagaatctttttgggtgccgggtacagatcacggcggcatagcaacgcaaaacgttttagagaaaaaacttgccaaagagcaaaaaataaccaggcatgacctcggccgtgaaaaatttttagaagaaatgtggaagtggtataaagaatgcggcggcgctattttaaaccagtttgaaaaaatgggctgggctatagatctctcgctagaaaacatacgctttaccatggatgaaaaacgcgccgcttccgtttacgaatgttttaaacaatggtgggataaaaaatatatttaccgtggcaaacgcatgattaactggtgcgtgcgttgcaataccgctttatcagatattgaggtcgatcacgaacagcaaaaaggcaaactttaccatcttcactataaaggggaagaaagctttgacggtattattatagccaccacaaggcccgaaaccatttttgccgacgccgccatagcggttaaccctaaggatgaaaactaccagggtgttgtaggcaaaaaagtaagaattcctttaactgaccgctacattccaataatagctgatgaggacgttgaaataggtttcggcagcggcgctttaaaaattacgcccgcgcacgaccctgttgactatgttatcggacagcgccataatttgcccgtaatatccgtaatttcggataaaggcaaacttattaactgccccgaaaaatatgttggcatggaccgtgaagctgcccgcaaggaagttgttaaagatttagaagagcagggctttttggtaaaagaagaaaagcatgacaatgccgttggcacctgttaccgctgcggcagcgttatagaaccatatttaagcgaacaatggtttgttaaaatggaagaactttgcgctcccgtaattgaagcggccgaaaaagaggaattaaaatttcaccccgcaagctggaagcattcttttgtaaactggcttaaaaatatacaggactggtgcatttcccgccaaatttggtggggtcacagaatacccgtttggtattgcacaacctgcagtaaaaacggtttaacctatatggaaacaaaacaaggcgtaaaggaagtagccaaagtatcttttgaagacggcgccaagcctgtggtttcccatacaaaaccgcattcctgcccggattgcgacggcacggattttgttcaagatcccgatgttttagatacttggttttcatccgccttatggcctatttcaaccttaggctggccagaaaaaaccaaagagcttgagtatttttacccaacctcaacaatggttacgggatatgaaattttgtacttatgggttgcccgcatggctattaccggcattgattttacgggcaaactgccttttaaagacgttttcttaaacggtattataagggataaaacggggaaaaaaatgtctaaatccttaggcaatgttatcgacccgcttgatatgacggccaaatacggtaccgacgcggtcagattttcccttttaatgcaggccgtgcttggtaaagatataccttacgccgaagagtctattgtaggcgcgcgcaatttttgtaataaaatttataacgcttcacgctttatattaatgaatatgggtgacttaaaaggcccgcttaaaatgcccgcagaacccaaagaacttgcggacgcgtggttaattgaccgctataacaccgctattaaaaccgctaaggacgccactttaaaatataatatggcggccgccgcaaatgttttataccactttttatggggcgacttttgcgattggtacgttgaactcgcaaaagccaggtttgaatctgacagagagtacgttatgagtattttagttaacgtgctttacggtactttaaaagcgcttcacccgatgatgccttttattaccgaggaaatatcttcggtgcttaaaccttatacaggtgcggataaagagtttttattgcaagactcttacccgctttgtgatgaaagcgctttaaaccccggggccgtagctaaaatggaccttattaaaggcattatttcggcggtgcgcacggtacgttcggagtttaacgttccgcccgcgcaaaagcttaatgtttctttaaaagcggttgatgatgaagaacttaaaacagtgtctgattatgccgactacattaggcttttatgcaaaacagacaatttaaccgcttccaaagaagcagttaaaaaacctatgagtgccacggcagtatactccgcggtaacggcttttatagagcttgaaggcattattgacgttgaaaaggaaaaggccagacttagcaaaaatattgccgcggcacgggccaatatagcaaaccgtaaagccaggctttcagatgaacgttttgtaaacaatgctcctaaagagcaggttgaaaaagtaaaggcggagcttgccgccgaggaaattaaacttaccagcgccgagcaggctttggctgattttgcttaagcaaaaaatattaaaaaactaaaaaagcccggaatttaattccgggcttttttagttcactctgaaataaagccaaaaatattatatagtaaaaacagctttgtaaaaaacaggaccaaggcccaagttacagataggtcttttggcccatgaaaattttatacgaaggctttaaagtatttgtaatacgctatttcaattccacgcgcaaaatatctgcttgcgttgacacgagaggtgcatcaatgaaaattaagtttatagcggggatgtctgttcttttagtaatgcttaccggaacgtctgtttgtgctcaggcgccggttacgcttaaagattatcaggcccgcacgaaacatgatttgcagttgttggaaaagaagttgggaaagccgctcgatttaaaagaaaataaagaaagcgtttataatttggcaggaggggtagctttattagctttaacataccaaatgcccaaagcccttctgtccgctgccggtaaagccgaaatcgaactttatgaaaaagttttaagctacgcggttaaggaagacgctttgttgtattcgtatcttgtaaaaacggaaccaaggcatgttttataccatttagaatattggggccttaaagaggaactttcgtcagttatccacaggggaacctcacataagggatatattattaactttgaaaaagaatattcccaactcagcgatgaattgcagcgctttatccgcaaaacggaaaggatggacaaaagcctttttgaccacgccgcgtttttaaaagaaaaacgcgccgttttagagccttatgtcgtagggcgccagcatatacattttaattatacgcagactttggaaacccgaatcgccataaagaactttaaaacaacctcgaaagctgcggccaaagcggggcagatagcggtaaacccgcttgaagcaaaaataacaagaaaaattgcggaaattaacaaagcaagaccttccggcgccactcttacaattaaaggcggtaaaaatattgccacggcagctcttttaatagcgggcagcgccattgtgttagattcttttgcttccaaccctgaacttggcagactggcccaaaacccggccctttttaccgatgcggatgttaaaatattaaatgaagcggaaaaaaatgatgttttagcccaaagccttaaagcccattcggacgctattaactgtatgacttctttagataaagaagaacttgaagagctgcttggtgaaagc

SEQ ID NO: 853 - DNA, 23099 bp, synthetic construct
  misc_feature 1..23099: note = Synthetic
  source 1..23099: mol_type = other DNA
tttacttattatacatttttttatgattaaaggaaacggaaaatctaaagacattctcaagccttagttgcgtcgggatattctgcttcttattttcattaagagattttgtaaaaactgcatttgttgtcgctagtcgcagtagcgaggcatcgcttactattggttaagttaaaatattttagaaaattattttgcataaaatatttaaattatagggtttatttaaaacattatatactttcttttccataaataagaaaactacttaacgacttggcaaatttgtttttttgttgtaattataagtccgtgctttaccgcttatttgctgtaaggtctgtttaaaatctgcctgctgttaaaacagaatgtttgttgtggcaggagcgactactctgcaacagattgacactatcttaaaattttaaatataatattaaagatattggattgcgtataggattttggtaaagaggaaaaagggtttataaatatgaaaagaacgtttcagcctaatagagcgagaagaaaaaagaaaataggttttagggcaaggatggatacgtccggcggaaggagaattttgagtgcgcgcagaagaaaaggacgtaagacgatcagcgcataaaacagttttatgcgggcagaaaacaagaaaaacttatcaggaagtttgttcccggaaaacagtgccggaaaaaagttctcttttacgtattttgagcgactgcatatccaaaaggattttgacaaaatatttaaaaatgggttaagacttgaaaataagaatataaaaattttagtttataaaaggaatgatgggcatattataagaagattgggacttattacaactaaaagggtaggagctgccgtcataagaaataggacaaagagaagattaagagaaattttcagaactaataaacattttttggaatcgggtttggacttaatttttatttccaagccagggacagcattgttggattatgacagtttgaaaaaaaatattttaggtttactcaaaagcgcagagttatataatccggaataatgtatgaaacagattgcgctttttttaattaaatgttataaatttatctcgcagtttcttccatctatatgtcgtttccagccaagttgttctacttatgcttatcaagcgatagaaacctatggtttttttaaaggttcccttttaacttttaaaagaattatacgttgccggcctttttgtgccggcggctttgatcctgtacctttgcctaaaaagaaaatttaatgttaaaaggaaagtcataatgcaaaaaaattctattttatttgtaaccttatcggcttttacggtttttatatggtattttttctttgctcaaccatcggaacagtcttaccggcagatgatgcagcttcaaaatacagttgctgtttcagagagcggagtgaataaatttaaaaatgcagatttaaatgaattccaaatagatgatatatatgccaaagaagagcatataaatattgaaaccgaacaatacaaagccgttttaacaaataaaggggggggggtgttgagctggtctgttaaagaaaagaatgggcaatgggtggatcttgtatttcctgaatcagcgcccgttatggcaaatttccccaatttaacttataaagttgtttcaaaatccgctgaaaaaatagtttttgaatatgcatcaaaagaaggctggaaaattacaaaaatatataacttgtcagatctttatatgcataatttaaatatttctgttgaaaaaaatgctaaaacgccttttccgcagatagacttaaaatggggtccgggactaggcactgacagcaaagaattaaaagagaacatctcgttgacaagagctttggtttacactgcagtaaaacctaacaaacttaaaaaacttaaagataattttgaacctgcttctctctgtaaatggacggctgtggacaatagatatttccttgttgcatttatacctaaaaattcgatggattttgataaaattttattttcaagacttgaaaaaaagcatccttgttcagtcatacttaaggcagcagaacctaaagatgttgataaaaaagattattctgtcaacttttatttaggtcctaaagactataaatatctaaaaacttatgatttaggtcttgagaaaactgtagattttgggttctttgggtttttaggtaaaattgctttttcgattttggtgtttttctataaacttacgcataactacggctgggcgattataatgcttacaactattatacagattttggtgttgccgctgactttaaaaagttttaaatcctcagcagcaatgaaacgtgtgcagcctgtaataaaagatattcagacgaaatataaagacaatccgcaaaggcttaaagcggaaatgttaaatatttaccaatctcagaaagttaatcctctaggcggctgcctgcctatgcttttacagcttcctattttctgggcttttttcacaatgttgagaaatgcttacgaactgagaaatgagggctggattttatgggtaaaagatttgtccgctgcagatcagtttatgcaatttggatcttttaatttgaatcttcttcctttaatgatgggtataggaatgtttttccaacagagaatgactacagtaacatcagatcctacgcagagaaaaataatgtacataatgcctgtaatatttacatttatgttctggtcttttccatcagggcttgttctatactggcttactaatagtttgatttcaatgatagaacaatattttataatgaaaaaagatgcaattactgtaaaacatatttaatgacgcagagtgtcgttaactgtaaaaaagaatagtatgtacagaggtgtgaataaatgtcggaaatagaatttaaaggtaaaaatgtgatggaagcaataactaatggattgacgcagcttggctgtaataaagaagatgtgaaaataaaaattgtcagtgaaggttcgactgggctttttggacttatgggtgcaaaaccggcggttgttttgatatcagtagacgattctaagtgcggtaacaaaacattcttttcgtccgactataaaaaatccgcaaagaaatagaatattaaagacttaatgtatgagaacaaatatcatttagaacagtgcttggaattgaatatatgcagaaaagtaattaatctgaaaaacatattttttcgtgaagatattttgagaagagaatattatggataggaataagttgattgctatagtcggtgtttctgaaaatccggataagaccggttttaagatttttaccgatttactgagagctggttttaaagttgcagctgtcggtatacgcggtggtgcgattgctggaaagagagtatataaatctttaaaagatttaccagcaaaacccgatatgattttgacggtagttccgccggcaggcactgataaaactgttgatgacgcgatagatcttggtataaaagagatttggatgcagccgggatctcaatctgaaacagcagtacaaagagcaaaagctgtgggaatgaaagtaacagagagtggttgttttatgttggtgcacggaatatggtaatttaaactttcagactgtttttaacgtatattttgcaagttggagtaatctaccgttaaacgtttacaggagattatatagaaatgtatatgtgtaatatatacatcacagctgttcataatgctcttttataatttggataaatatgattgtaaaagagagtatatgtacaaagttgtgagcagtttttctaagaaaagtaagcagatgaataaaaaatcaaaaaaatttaaaacaaagtcttttaaagcggtgttatttgatatggatggcgtaatagcagattcaatgccgtatcattttatttcgtggtttgaggttttaaaacagcataatgtaagaataaaccctatgattatttttgaaatggaaggtgcaaagtgggataaagttataaaacttgcatttaaacagtcaggcataccgttatttcagcaggcaacgcaaaaaatccgcaaaaaaagagaacaaattttcaatcaatatttcaagagatatatttttacaggcataccagaatttataaaatcattgaaaaataagggtgttttagtaggacttgtcacaggttcttctttaaaagaagcgcaaaaaatgctgccagaatatatatacaaattgtttgatacaattattgcgggagatggagtaaagagaggtaagccctaccctgatccttatttagctgcagcaaaaaatttaaaagttttgtctaaagagtgtatggttatagaaaatgctccgtacggcataaaatccgcaaaagctgcaaaaatgtattgttgtgctatagctacaagtttatcagaggatttactgtcagaagccgatataatatttgatacccacagagatttatatgaatattttgaaggcgattaaaacctctctgcgtttcttcttattgtaagtatagtctgccactaaatatattttgaagtttggaataatgtttatttgtaaaacttgtttgcagttttaaatgtttcacgtgaaacaatgctttttttaatatgtcaaacaaaatgaaagataaaataggggattaaggtcaaattttaaactttataaatataactatattacaaatgttaaaacaaacgcatagaataaagaaaccattctgttaaatagcgatataaaaatgaaaaagcaagaaagattttacatcaaattaaaaacagctctaaattaaatttagaattacagtgctgaaagtcaaaatgggaaaatgttaaaaatttttctagacgtaaaattgacaaaaaatctttaaaattcaaagactgcaaatctcatcttaataatgtttattatgatattaagttttcgcgtagaaaaatctttcccatataaaatcatattattactgttgtattttgcataattaaattcgcatatatatttgacatagtagtttaaaagattgtataattgataattacaattttgtctatcacaccgcagtaattaactatgtttcacgtgaaacaaatagagtctaatatataagttcccgtaatataatagaaactgtaagcggagttttaaatgagtaaggtaatcgcaattgctaatcaaaaaggcggagtaggaaaaactacgactgcaattaattttacggcgagtttagcatatatggggcatgaaagtctgttaattgatatggatccacagagcaacacgacaagcgggtttggtattaataaaaataatcttgaaaagaacatatataatgttttaataaatgatgtagctttggaagatatactgcaggataccattatggaccggcttgatattgtgcccgcgaccaccagcttaagcggtgcggaagtagatttggttaatatgtccgacaggggaaaaagactgaaatttgcattagaaaaatttcataaaatatataaatacattattatagattgtcctccatctttaggattgcttacaataaattctttagttgcagcagacactgttttaattcctatgcagtgtgagtttttttcattagaagggttgggacaactttcagaaacgatttctgcattaatgcaaagttatgatttagagttagagggcgttttgtttacaatgtttgattcaagaactaatcttgcagatcaggttgtagaggaagtaaaaaagttctttaaggaaaaagtctatgaaacaaaaataccgagaacaataaaactcgccgaagctccaagttttgggaaacctgttttactatatgatccgtcagggaaaggttctcaagcatatatagactttgcaaaagaattccttttaaagcaaaacatggagtgaaatttaacacaggtatattatcaaggagacatagagtatgcagaaaaaagcattgggtagaggtttagaatcattaataccggcattagctgcaaataaagcatcgactgatgaaataataataataataccattagataaaattaaatctaacagatttcagcctagaaataaatttgatgaagtgaaacttcaagaacttgcgcgatcaatagaaaaacacggacttgcacagcctattttagttgccgcgtcgatagttcctggcgaatatgagattattgctggggaaaggagatacagggcatctaaacttgcagggaataaagatataaaagctatagtaaaacaatctgccgatgataagcaaaggtttgatttggcgttggttgaaaatattcagagggagaatttagatcctatagaggaagcaagagctttcaaaagactcatagaagaatttgggcatacacatgaacaaatatcagatattgttggcaaagagagatctgtgatatcaaatgcgttaaggcttttatctctacctgaagatgtacaattattaataactgaagataaaatttcaccgggtcatggcaaaatacttgccggaatagaagataaaaataggataagagctattgtagatcgaatattaaatgaaaacctttcagttcgagcggtagaaaaaattatttccgagcttaagcctgagaaagaatctgacggacagaaaaagcaggaaatagaacttataaatttaaaagaagaaattcaaagaaagcttggcacaaaagtcaatatttcaggaacaggtaaaaaaggcaggatagaaatttattattattctttagaagacttagaaagaattacaaaagagcttaaatttagctgttgataaaccttatttagttttttatttaaaattttgatataaaaatatatcaaaaaaacaatttataaaaacgtattgaaaaatgaatataaaactcaaaatgtgataattttgtgctaaacaagaaaacatataaaaccgcttgtgcataagttgttaataactttttgtatagttaaagcattagatatgcattttagaaatagttgaaaaaacttaatttagattattctttgttgtctaaaaaaactaatattaaaaatatgggagcagaagctcttaaaaaagttgctgacgccacagctgcaatgccaaacacaacgcctcaagaggcagtgaacatgaaaagtaatattgatattgaaataaacgatgaatttaaacaagcttatgatttaatagataaaagcggcaattgtgtttttattaccggaagtgccggtagcggaaagaccacttttttacgttattatacgatgcgtgcaagtaaaaaaactgtaattcttgctccgactggcgtagcggctcttaactgcggcggtgaaacagtgcattcgtttttttattttaaacctgatataactgtctcaaagataaaaaagaaaaaactttctgaaaaatctatatacaaaaaagttgaaacgattattattgacgaagcgtcaatgctacgctgcgatattttagattgtatagataagtttttaagattaaacagagagaaacgtcaagaaccatttggcggtgtacaaatggtttttatcggagatttaaaacagttgccgcctgtagtaaaaagggaagagtatcatatatttaattccgtttacaaatctccttattttttaagcgcatattctttaaataaatgtattcttcatactgtggaacttaaaaaaatatacaggcagagggacagcaattttgtcgcattgttaaatgcagtgcgtgacggaacagcaaatgatgatgagattgctgaactcaacaaaaaagtatcgtctcaaatttttaatagacctatgacggtatatcttacaactacaaacaaaaaagcggcgtttataaatcataaatatctttcagaaatagaatacaaacaagtagtttttacagcggaaacaaaaaatatagaggaaaattcaaaggttttccctgctgaatacgaactagtgataaaaaaaaatgcacaagtgatgatgttaaacaatgacgcaaaaaacagatgggttaacggcagcataggcatagttgagaatataaaaagcggcagcgacttcggtaaactatcaatatgcataagatttccaaacgggagagttgaaaacgttgagccgtataaatgggagttgtttaaatatgggtggaatgaagaaaaaaagcagatagaaacatatagggcgggtttttttaaacagtatccgttaaggctttcatgggcaattacaatacataaaagtcagggaaaaacttttgacaatgttattattgatatggagtatggcgcgtttgctccgggacagttatatgtcgctttaagtcgctgcacatcttttgacggaataacactttcaagaccgctaaccaaaagagatatccttgctcctgcagtgtgggattgaagttattttggatacgaagtatttgactttataaaaactgcagttatataatcttgagaacggttaattaatatgaaaaataaaatacaaattatccgttattgaaatgataagtgttgtcttactaataagaactatgtatcaagtttctaatttgttgcataaatacatctaaacccaaaataataaattgaaaaaacactataatattgtaaaattacgcttcgttaataaaatggagagatggccgagtggtttaaggcgcagtcctggaaagactgtttattcgaaagggtaactagggttcgaatccctatctctccgtattttaactttagagtaaaactgactgtgtccgtactctgttcgttattcgtcccttttggtctatttagggggggcgaaatctctgaaaattatataaataatggaaaagccaaagttgaaaaacgtgttattgtatataaaacaggtggcgaaagtgtaaagtgttgtttaagtgtatataaaagataagaaaagcagaataatattacagagttcttttaacagaatattgccgcagaaaaatatgacaataatgaaagactataactgttatgcaatagtagtagtagtatatcttaggaattacttttgttttttcaatgttctgctatttttaatcccagtgaaaaatggttaatgttaagttgacaggatatatgtattttagtgatttttatagtagtacttatgcaaatctgcgaataattttaggggattgtgtaaacatcaaagtatagttccctgtcgtcagtaagaaagcttgtttctttatttctttaaatattatgaccccggtcacataacatttataaaatacttaataatgctaaaggttatccttagaacacataatgaggcacagcgagttaatgcggtagattggcttttgtcttaatattatttttgtatttttaactcaactttataatttaaaaataattggagatattatgaataaagttcaagaaattgagtataaaaagataagagaaaaacttgcagatagagaatatcgtataggattggacttaggtgttggttcaataggatatgttgtagtatccttaaaagaatgcaatgatttgtcctatctaccggaagatattattttatcaggaagcagaatttttaaatcctctataggagctgtcgagcgcagagaatttagattacagagaaacagtcatagacatcacagagagcgcatgcgctttctctggcaattactggctgaaaaacagctggctttacaatcttccaaagatttagagaaaaaagaaaattctgctgattgtgaaacttcacaaaaaagatttccaatcaatatattaaaagaagatccttatatcctaagatataaagctttggaggaaaagttatctttgtttcagttggggtatgtgttatatcacattgcaaaccatagtaacacagcatacgaaaacacataacacaggttggggtatgtgttatatcacattgcaaaccatagaggtacggactcagttagaagtttcttagagtatgatgacgataagataaaagagaacacgttaacagcaaaaattgcaaaagaaactaagaaagttatagatgcaaaaaaatatcgtacattcggcgaatatctttataagggaaaaatagaaaaatttcagcaaaatataagaaaaaaagtcagtaatagaaagacaccagcaaataaaaataaagagtttgctgttaccagagatgtaataattaaagaaactgaaaaaattttagccagtcaaaaacaatattatacttatattttgactgatgagtatattaaaaaaattaaagatgcaatatcttaccaaactgaaaaacttatcccggaatctggatattgtccttattttaaagatgaaaaaagactccctcgctcacataagcttaacgaatacagaagaatgtacgaggctcttaataacgcaaaatattttgatccggttctcgatgagaatactggtgaaattttaagttatcaagaaaaagaattttcaagagaagaaaaaaagatattatttgacgaagtgttattaaaaggtatggaattaactgaatcaggagcaaagaaattattatatcatctccctgacggttgtgaggtacagcttcaaggtagagataaaacaactcaaaagattaaaggttatgctctggttgatcttgaagcatcgccgttttggttaagactttcacagcaacagcaggatgaatttctttatgactggaacagtcttccgcttgaaaaattaaagcctaaattaacaaactattattccttaactgaaagtgaagttgatgaaacttttcaggaaatcaaacttccgtcaaactacgcttctgttggaaagaaagcaatggaaattctgctgacatatattaaggacggttgttcttatactgaagctctagagaaagcagtcagtgaaggcaaacttaaagttgacaaacagacgatgatatatgattcgttgccgtactatggtaagattcttaaggaaagcactcaaaaacttataggaaaagctttctcaaaacaatttgctgacagaaattataaagaacctgatactaataaaaatgaaagagagtttggcaaaattgccaacccggtagttcatcagacattaaatgaactcagaaaacttatcaatgaaattattactgtgtttggtaaaaaacctctagaaataggtttggagacaacaagagaacttaaaaaaagcaagaaaaatagagaatatttatccaagcaacaaaataaaaacgaatatgctagaaataggatatacaaagaatatatagaaccgcatttgtcgcagataaagagccggcaggaaaatccttcaaaatatatttcgaaatttgaacttcttgaagaacaaaattttatttgtccgttttgctctgaaaagataactcctgatgatataataaattcaaaagttgacgtagaacatattttcccgattgaagagagcgaagacattacaaaaaacaatcttgtaattgcacataatgaatgtaatgctgacaaaggaaagaaatcgccttttgatgcttttggggataagacatccgggaaatacaggtggaattgcattttacacaatgcccaaaaaaatttgccgcacaaagtatggcggttttatcaaggttctcttgaaaagtttttagaaaacaaacctatgtcaaggcgttttgggacagacaacagttatatttctaaaatagccgcgagatatctagcgtgtctttttaatgatccttatcattcagaaatattttgtattaaatcttctcttatcgctcagcttagaattgcttgggatctgaatagtataatggttcctcttgtaaaaaacatcctttcagaaaaagaattagaagagttcaaaatatcgaaaaacaaaaaaataagaattgataacagacatcatgctttagatgctatagtaatagcctacgcaaatagagggtatcataattttttaaacaggatacatgcaaaagaatataaaataaattatagagaaaaaagctggttatctaaaatattattaccgccattaaatagagatttagaagactttaaaataagcgtaaaagattctatagaaaaggcgaatgtcagtatcaagcatgaccataatactaacggatcattagtaaaagctacagcttataaagtttattattccggagccggggaatatataattacaacctcaaaaaatgttgaagaaatatcttttaaagaaaaagaggatcctaaagatactctttatcgggctttatgtaaatttgaatgtagagacatagacatcaaagatgaaaaattaataaaaaaactcaaatataatagcactctttataaaaaagtacaaaataatttgtctaaagcaaaacaagaattggaacaagataacaaaaaaaccgaagaagaagggaaaaaatcgcaaaaaataacagaagttcggatttataaaaaggcctgcagcttagtcaagggacagtacattcaatgcggcagcagacttaaggataaattttttgctgtaaaagaacctacggaaataaaaacggggcttggctatgataccggcgataatttatttttagatttatattatgataagacaggaaaactttgcggtgagattatacgaaaagtaaattttaatcgaaataaaccaaactatcaaaaagaaggctatactctttttgaaaggatttatcagagcgatattcttgaggttgatacttctgaagatagaatctcattgaaaaataaaacaggttctgctccgagtgacagaacgtttataaaagttaacactttcacagaagtaaatgcgtattttgacggtaaaagagataaaatacaaatattttttggaaatttattgaaatcaagttttaaaaatgactcattttttatatcaagtatgcagaaatacaatgtaagaaaagttattttaacttctttaggcattataaaataccgctcgcaaatattaaaaaacaaagaggtctgaatgtggagaattattgatatcagcggtgatggatatcatatttgtgtcaagaacaataatttttccgtactaaagagtaatgaagaaaaacttcatgcaaatttctcggatatcaactgcattattttgcacggtaacggcattacatatacaaattcagcaattcagaaatgtcttaaaaatgaaattcccatagttttctgcgacgaaacacatacgcccgcgggaatgttgttgccgtattttaatattgcagagtatggtaaacgtttggaaatacaattatctgccagccagcctatacgaaagcaggcttggaaacaaataataacagaaaaacttataaaccaatccgcttgtttggcatctttcccaaaaagcaatagtaaacatttacagcttttagattttgcgagagaagtgaaaaccggagataatacttttagagaaggtattggcgcaaaaatatattttggagagttatttgacaatttttacaggagcaataaaaatgaagatataattaattcttcgctgaattacggatatgctgttttgcggagtggtattgcaagagctgtagtatcctgcggacttaatcctgcaattggggtgtttcacagtaaaaataaaaatcctttttgtttagttgatgatctcatagaacctttgcgtcctatggttgactatattgtgaaatcacaatatgacgattttattaaggagaaaatattaacgcctgcattaaaaagatttcttgtttcaataaccgaaaaaaaattgttagttgaaaatgccgcatattcttttgttgctggattacaaaaatatattcagtcgtatctggcatatatatcaaaacaagagaaacaaattatttttccaaagttattttatgatatcaaaatataaagctatgtgggtattaattgcttttgatctgcctgtattaacacaaaaacaacgtcgtattgcaagcagttttagagaatatttaaaaaatatcggctttataatgttgcaaaaatcaatttattgttattatgcctgtactaaagaaagaagtgattctgttgaaaaagacataaaaaaacatatcccagacaacggacatattagtgtattatttttaacagacagaatgttctcgatgacaaaaaactattatggaaagttaaaagttgatataagccaacccgaactttttgacaacctgctttaaataattgaaccggtataaccggcatcttgcgaaataattcttgttagagtttacccatagttattttatgaaatatttttttaaaaatcaaattcttattgtttttaatttataaaaaaatcaaaaatttataaagaaaatttttactttgtcttcttaaaataagagttgagatattaataaatcttatttcaaagggcaaccctaactactagaccagcacatccatattgggtacaatattaataaatcttatttcaaagggcaaccctaaccgtatatgaattaacagacatttccaatgaacataactttttcggagagaaccatatttaacgcggataagcaatatttcgataatcaccattagaaccaagagcagcacgaacattaagggtcttccactacgattactatactacttattgcacgtatacaccactgtgtagcaaattatacttttttacggcggattgtggatcgcaaatatattataagattttaaaggaattatcaagaaatagtattaaaatattgatattggatttgaatacagagagaaattatgagaaaactgtttggaaacatttaagtcagtgatagttccctttttaatgtagtgctttttattatttttctcggcaaaagagataactttttcagctgtctcattaaaaaattctttacatcctttgtaagcagatacttgggaattataatttaattttccaaaaataattttgtcaacaaattctaaagcttttaaaatctcatcaaaatcctgctttattatgttcggcgtgggataaggttctatgctcacccatgttttaattccatttttatgaagattgtaaaggctttttatccgctttttcataggagaggcaaaaggctctaatttttttctgaaattatctttaattgttatgagggttattccaaattcattgtttgaactgagagttgctagtttatcaggcagaataccttttgtaatcgcaatacattttatgttctcccggttaagtctttttataattttatagctcatttcagatatctcattatatccgcacataaacggatctgtagtgaaagaaagctgcacaaagcggattttatctttatattttgggatttcagattctaatatttctaaagcgttcttgactattttaggttttatccaatcgtcatatattttaattttaccaaaacgcttagccatcagcatagcataacagggatataaacagccgtgagaacaaccctctgcgtggttaatagtataatcaccatactcaacatttgtcttatgcaacaaactttttcttattatactattcataaataaatttgtccttttatttaaaaacgatttttattttgggtttttctttattcttataacttatataaaaattcccttttttgcggttagatacttcaggcataggcataacagttattttattatccttctcgtaagaatttaatatggcggttacttttttaggtaacaaaccatgtaatattccatattcatatagttcacagtttgtcagacttttatttttgtgaatattttctatgaaaggcaaatcttcatctgaaatagtattttcaaataaatctttttctttaattttaactaaagcttctaaaaatttttctgcgccaagaatatgttttgtcaagaagaataaagcatacttattattggattttgtatttttaagttctttataataaacataatctgtatcagcttttttagtaaaagccttttttatttcgtttacaaaactcatttcatcctgacattttctagcatcttcttcagctatacccatatcattaagaaatccagcaataggttttaattgttcagaattttcttcttttattaaaaatctatatatgtgattaataggtataaatattaaaatatctaatctttttgctttaaaaatgttttgataagtgtcccctcttaattgagtgtatccccaaggatcaataaaaaataagtgatttgttttagttttatggtcagcttttgacaatacgtcattaataaattcgttagcatctttattaaaacataaaactctgttgccatcaggttttaaattttttattaagtctacataagattcttttttaatatcgtttaaaacgagatgtatatttttgttgcttgaattactgatggatgttataacatttttggcgattatggcgctgccttcttcgccattatttgatatgccttttccggcaaaaggctcaactataaaaatatcagtaaaatacaacctcatcattattgataagtacgcttttaaatatttttcataaatagataattttattttactatggttttctatattcccttttgtatccattgtatcatctataaaattatttaaatttttaaatactaagtataaataaatatatatacactttaacatattttatataaaatagaatataatgtcaaaaacaagatgaggatttttgttataatttaaaagtttagaggagacacagcaacaaattttatatgcacccccctatttttttaagtcatataagtttatattttccaggcaaaatatgctttgaatatttttcagcgcaaatacaagcgggaaaccgcatcgctattataggaaataatggaaccggcaaatcatctctgctcaaaattatcaaaggcgatctgcctgcctctgaaggcgaaatacaaaataaaaacgtttctttcggctatgttccgcagttaatttatgaatatgaaaatttaagcggcggcgagaaatttaacagagctttaagtgttgctttttcaaatcatcctgatatattacttttagacgaaccgacaaatcatttagatctaaaaaatcgcagatctcttataaaaatgctgaacttttataaaggcactctggtagtagtatcccatgacacagagctgttaagaagctctattgacatattgtggcgtatagataacggaaaagtaagtgttttcaacgggaaatatgacgactaccgccaaacaataatgcaagagcgccaaaatattgaaaatgagcttgaatttcttgcaaaggaaaagaaagaaaatcataaagctttaatgaaagaacagcagcgcgcaaaaaaaaacaaagaaagaggcagaaaatttgtcgagcgtaaaaaatggctgcccgcattgggagatttaaaccagagttatgctcagaaaacaaccggcaaaaacaaagggtctatttcaaacaaaagaaaaatattaaacgaacgtctttcaagtttaagacttcctgaaataataaaaccaagtttttctttaacagctaaaaatatagcttcaaaaacgattgtttcaataagcagtgggcaaacggcatacggacataaaataatttcaaaagatataaatctgtcagttacaggaagcgaacatttagcggtgaccggcggcaacggttcaggtaaaacaacattgtttagggctattttaaattatccgcagataaaaaaaacgggcgtttgggatctgccgcgctctgaagatataggttatttagaccagtgttacagttctttaaatgacataaaaacagttttagaaactctggctgatttgtcgcctgaaaaaacgcatgccgaaataagagattttttaaatgattttttattcaggaaaaatgaagaagtaaacaaacaggtgtccgttttatccggcggcgaaaaagcaagattatcacttgctaaaatagcattgcagacgccaagactgctgcttatagacgagattacaaataacattgatttggaaacaaaagaacacgttacacaggcattgaaagaatatcccggagcaatgataataatttctcatgacagcgcatttctggaaaatataggaattacgcattactataagttatagacatatcgttatcaaaaaaactatacagtttttattcttattattgtattttcagggaaaacagaaaggtctccgtcgacaggtatttttacggattgactagctttccccggcgcaagctcttcaataagattattattatctttattgtaaatttcatttaaaataattttcaccggtttaaacttaaaaggcgataatatttctatttcagctccttttttcagcttatttctcaattctattgttaaaaagccgtttgcgctgctttttatgacgccggcatttctgtaattgcttttacttgaggtatcaatataatcctgcgcttctattcccggcataccgtcaaaaaaacctatagtatatccgcggttttgcagagttatcagttctttcatatattcatcaggatgccagctgccggggttgtcaaaataatcgtcaattgctttacgataaacccttgctgtctgcgccgcatagtattcgcttttattccttccttctatttttaaagaatcaatccctatgcttataattttatccagtttcggcatgagacataaatcttttgaatttaaaacatatgagcctttatcatcttcttccatttctaaatattcgcccggtcttagttcctcttcaagaagcagtctgcttttatatttccacctacacgaatgggcgcacgctccctgatttgcgctgcgcgaagccataaatgcagacattaaacatctcccagaataacttacacacatagatccgtgtataaaaatttcgagttttatctctctgcacttttctcttatttctctgatttcagaaaagctaatttctctgccgagaacgcataattcagctcccaaatttttccaaaaatctgccgtaagccaagaacaaatatttgcttgagttgatatatgtataggaatttgcggaatttctttttttacatattgaaatatgccgggatctgaaataatgatgccatcgggatttaacgttttcagcgtttttgcaaatttttcaagtctctcaacatctttattatgcgaaaacaaattaagcgtcagatacacttttttctcgatattatgcgcaaaggaaattccctcttccatttcctccaagagaaattctgattttactcttaacgacatttcgggaatgccggcataaacagcatcagctccgtaaaggaacgctgtttttagtttagacagagatcctgccggcaataaaagttctggttttttcatataaggtaatttgacggtagctgcagtgcttgttcaaacatagttttataaaaattttgctgacagtcttaagctttaatattcaataaacatgcaattgtaagtaggggaaaattgtaatattatcgttgtcgtgaactaactgtaatttcattgcaagaataagaatatcaaaagtagagagtttgggttttctttctgagagcggggtcatgatgtgttcaactttatatattttgtcgcaacttagattgtggtagcggtgtaaatcgtacgggtaaaaaataagtctgtttcttataaggaacttttatgaatatcaggatctgccaagcgacaaaaagtctaactatccaacaggtagtaatgacggtactgcgctttatttgacatgcctatttttcatgtattctttatatggagaaaaacctgcctctttaaaaatttcccgcatttttttcaatagcttttgcagtttttgctaattttttatcgggttttgtttcgagtttttttaggtttttttttcttggttttctagtttgctcatcggttttaaatctccattattataaaggataaatttagaaataaaatatatatatgttattttagcgttttccgctgatattatcaagttcttgcaaaataattatctataaactaagcaaaagagggagttgcaagtgattgattaaagaggttgcagtttggtaaaacaaaaacagagatccggaaacgggagaataaaataagatggaataaatgagtaaagtaattgcagttttgttagttgtgtttttagattttaattctgttgtaagggcagaggacttacacaaataaatgaagcggcgcgcgataaatagaagatctattctaaaaaggaagtaaaacaaccgccctctcttgttattatgtaatagcgatttgtttatccccactacttggaatatgccttcttgttggcgctgctttatggaatttaagcaatgaggggcaaatgaaagaagggagccgcgtcgtggcgtggaaattgggtgtgtatgttgttgctctaattgggtattgtaaaatatattataatatagggggggggggtaattccctttttcctgtaccccgaggtaaaggaagaaaagttaagcgctgttataaaaataaaaaaatatgttaaaatgctcggtgcgttctatagaggaaaaattattaaatttagtgaacgcttttggcggcgataaaacttcttttgttagacttttatttctttttagtatgtccgataactagcgtctgtgccatgaatttattccttattaattattattattgcggcgtattctgacataaatggaatgaaaagagacggtattattgatggaaggatcaaaagaattcctgttaaaacagtttgataaacagctttacagaataattgataatgactttgaaaaaataaaagaattatatcggaaatttcatgatagaagtcgttaagatctaattaaaatgacataccagaggtatccatagtatgcaaaaaacagtaaaaatctggatatttaacaaatcaaactcaaaatggaattaagaaaataatacctgataataaaacgactttatttgatgtcggttacgaaagtaagagtttagaagtttatctaaacttattgatataaaaactctcatcgatatcaggaaaagcctggtaaaaaaggttattcaatcggatattataataacgtagaatagacgatagtcgctgagacgttagtttgttggttttccaaatactgtttataatttataatcaaacacctaaatctcattttttgccgacaattttaaaaaccttagttgagcaatgagggcacacgcccgaaacggctttaatgccgtttttcatcactacgtcttgaggatctttcacttcaacctgttttttgcatttcatacatctcgcttctgccataaactatacctctatattttttatattttattttactgtatttggaaagcgggcgatgggaatcgaacccacatctccgacttgggaagccggggttttaccactatactacgcccgcaagaaagcggctcgcaacgactttctccaatatgctgagctgaccaagagtatcattagagtttatacttttttttaatatgtgtcaattttgaaaaaactatttttagagcctcatccgtattgaaaattgtaccttctaactgcgtctctgtggcaaagtttagaagttccccgatccatgggccaggttttaagttaaactttttcattattatattcccatcaataattttagacaacggttctgcatttttcaattcataataatatttcagaagttccctaaccgatttttcctgaagttttagtcccttagaggagaatactttcagtttcttataagaatgccagtctgacattgaaagaacgagtaaatccggagtattgtcgcctatatctctaaaaaattttaatgcggctttttttgtgacaatattatttcttgtcaaagttgatggacgcatgtgattgcttactaaaaataccgcagtttcaatatcatttttactggatttgagagaaagcataatttcttttacttttccggctcccaattcttcgtgtcctaaaaagtgcattttgccattttcaaatttcgctgtttcaggttttgcgctgtcatggaaaagagcggcaaattttaaaagactctctcttgtgatgttctcggaaaaagtggcattattatcaaaatgtttttgcatgtcggcataattttcagggaagtacttttttaaattattgaggatgttttctgccgattccacagtctcaaaagaatgctgaaacagtcctcccggatgataataatattttctgcatgtttttttcattttcttgatttcagcgaaaatctcagaaagcagtccgcagtcatccatatctttaattaaagctgcagaattttttaccgacaaaactctgaaaaattcgttttttattctttcaggagcggactggcggataagttttgcattttttatgatttgtttaaaagtttttttggaaatcttaaaatttaattccgctgcaaaacgaaacgccctcaacattctcaaaggatctgttttaaacgattcggcagaaacagtatttacgatttttgattttaagtctcttaaagtatttctgtcagataaaatgatatgttttttaaaatttttaaagttctttaaattgaaagctgttgcattaatggtaaaatccctgttttgaagatcctgttttatggttttgccgttaaagagagaaatgtctatatttgtgataacatcgtctttaagaattattctataagtttttcttgtgtcatttaaagtgataagctttgagttaaatacatctgcaatttttttagagtatttcaaagcgtttctactaactgctaagtcaatatcaataggactgcgttttaaaagcagatctcttgaaaatcctccggtagc

SEQ ID NO: 854 - DNA, 16376 bp, synthetic construct
  misc_feature 1..16376: note = Synthetic
  source 1..16376: mol_type = other DNA
gaaagcaatggaggcttccggcgtgtcatctcgctctttttactttgaagaaaaacaaaaaaaatataaaacggaacgcaaatcgaatcttacaccggtgtcggatgttttagaccccataaaaaaaatgctgggtttagatgaagatttttttattgtcgcgaaagtatgggaaaaagagctcggcatagaaggcgttgaaataagcggttttaaaagcggcacgattcacgctcagacagactcaagcgctgccttgcatgaagtgacaatccgcaaaaaagaaataatcaaaaaactaaaccaatacatcggcagcaacaaaattaaaaacataaaagttacgataaaatgaaaatttgtaatactgttggaagcgattatgattttagattttccaaagattgatttaaataactataaaagtaattctcaaaaaattaggattttatctgaagcgtggcttttacaaaatgcctattgcccaagttgtaagattgctctgcaaaagttcgaaaataatcatgaactggcagatttttattgtgacaaatgtaaagaagaatttgaattaaaaagcaaaaaaagttcaactgctaatccaaagaagatagcagatggcgaatatttcactaaaataaaacggttgaaatcagataataatccaaatttgttctttttaacatatcaggacaagaaaatatgtaatttaatttttgtaccaaaatattattttacagaacatattattgaaagaagaaaacagcttgctttaactgctcgccgtgccggttggactgggagcaatattattctgtcgcaaattccggagaatggtaaaatttttatcataaaagattcacaaaagattgttgatagtaaaattgataagaaaattaaaagcacttcttttttgaaaacggaaaaaattaaaaatcgaggatgggttttagatatcttaaattgcgttaataaaatcaaaaagactgcatttgatttaaaagatatgtataagtttgagaatgacttgaaaaaacttcacccggataataatcacataaaagacaagattcgccaacaattacagcttttaagaaataaaaaattattacagtttttggggaacgggaaatacaggataattgtatgagcaaacacaaattagtaaaaattatcaaggattgggttgagaagtgttacggggaatctgaagttaataatccaagttggaatattgagaaattagcaaaagaaatatcattaagaaaaagggtgtataaacgaaaataattcagagatacgattttaaaattgcaaaatatgtaaagtttaaaagtaatcaatataaataattccataaggagcattatcgatggcagaagaaacgaagaacgaaagttctaagaatgaaaattctaaaaaaggttccggaaattacggcgccgaaaatatccaaattttggaagggcttgaggctgtccgcaaaaggccggcgatgtatatcggctctaccggcgcgctcgggcttcatcatttggtttatgaagtcgtggacaattctatagacgaagttctcgcgggttactgtaaaaatatagacgttactattcataccgacaattcaataaccgttattgacgacggccgcggaattccggtcgggccgcatcctgacccgaaatttaaaggcattgacgctttggaaatagttttgacaaagcttcacgcgggcggaaaattcgataaaaattcttataaagtttcaggcggtcttcacggcgtgggcgtatcgtgcgtaaacgcgctaagtgatttgctggaagtcgaagtttaccgcgacgggaaaatttataaacaaagttattctcaaggcaaaccgctggggccggttaaaaaaagcggagaaaccgaccagcgcggcacaaaaatacactttcatccggacccggaaatttttaccgttacggtttattcttttgatacgcttaccaaccgcttaagagagcttgctttcttaaacgcgggctcgcacataagaattgccgacgaaagggaagataaagagcatatattttcttatgacggcggcataaggacttttgtccaatatttaaataccaacaaaaacgtcataaataaagagcctatatatttttccaaagaaaaagataatattttagtcgaaacggcaatgcagtataacgactcttacaatgaccagattttttcgttcgtaaataacatcaacaccatcgaaggcggaacgcatttgtcgggtttccgttccgcgcttacgcgttcaataaacgactacataaagaaaaacgaaatctccaaaaccaaagatttaaaactttccggcgaagacgtccgcgaaggtttgacggctgttatatccataaaagtgcctaacccgcagtttgaaggccagacaaaaacaaaactcggaaacggcgaagttgaaggcataacgcagtctattgtcggcgaagcgctcacggtttttcttgaagaaaacccgggcatagcaaaacagattttggaaaaagccataaacgccgccgaagcaagggaagccgcgagaaaagcccgcgaaatgacgcgccgcaaaggcgctcttgattccgcagctcttccgggaaaacttgcggactgttccgaaagagatccggaaaaaacagaactgtttatagtcgagggagattccgcgggcggctcggcaaaacagggcagggacagaacttttcaggcaattttgccgctcagaggaaaaattttaaacgttgaaagagcaaggctcacaaaaatgcttgccaacaatgaaataaaaacgcttatcaccgcaatcggcgcgggcataggcaaggatgatcaggatttcagcatagacaaagcgcgttaccacaaaataataattatgaccgacgccgacgttgacggcgctcatatcagaacattgcttttgacgtttttttaccgccacatgccgcaattgatagataaaggatacatctatattgcgcagccgccgctttataaagtcaagaaaaataaaaaagaaatgtatcttgaaagcgaagaagagctggataaatttttattttcccaggcgcttgacggtttgcagatggttcttgtaaaagacggcaaagacattaaagaaattgacgataaaaatctccgccgcatagtaaccaatatcagcgagctcgatacgcttattaaaaaaatcaccaaaaaaggcgtttcgtggaaagagtatcttaaattaagagctgaaaaatcaaaaagggaagacgggaaactgccgctttacagaattgtgcaggacggcgtcgcgaaatacatttattccgacaaagaatggaaagaatttaaagaaatgctcattgcaaaacaaaaagaagccgcggcaaaagccgcaagcgaaaacggcgaacttgcaaacttacttgacactttcaatccggaagatattattccggaatataaagatttgtgggagctcccgcgaatcgacaaactttccgaccagcttgcggccgaaggtttgcatttggaacattacggcgaaacgcacacaaaacccgtttacaggctttgggacgccgagaaaaaagcggccggagatattcatgagcttcattcgactatagagcttataagcacaatcagagagctcggcaacaaaggcgcgaccattcaaagatacaaaggcttgggagaaatgaaccccgagcagctttgggaaacgacaatggataaatccaacagaaaacttttgcaggtaaaactggaagacgtcatagaaacagacagaatttttacaacgcttatgggcgaccaggttgaaccgagaagagcgttcatccatacgcatgcgctggatgtcaagaacttagatatataaaaagaatatgatgcgtagacgcatggaggcatagatgcatagtaacggcaaagacaaaacgaccatagctgctctacgcatccacgcatcagagcttctgagcttctactaaaggagtgtcaaaaatgattaaattgtcaaaattttttatttgtttgtcttttgcttttgttttttcaggtattgctttggctcaggaatttaaaagcttgcccgagccggataaaaccggcggaaaaccgttaatggaaacgcttaatttaagaaaatcggaaagaaacataagcgcgaaaccgctttcgccgcaggaactttcaaatctgttatgggcaacatggggaatcaaccgtcctgacggcaggcgcaccgcccctaccgcgagaaacagccaaagaattgaagtttacgcggttttggaagacggcgtttggctgtatgacgctaaaaataacagattgcagcaggagatgagctcggacgaaagaggtaaatattcgcctgcaggcgttacgttactttacgccgcggacactaccgactcattttctcaaatgcatgtcggcacgctttatcaaaatgcaggattatactgcgcttccgcaggctttgcgaacgtagtcaaagcaaacggcaaagacgcgcttaaaggcaggcttgtgcttaagaaaaattatgaagttatgattattcactctataggatatgcaaaataaaaagacagtgagtagtgaatagttagtagtgagtagttgtggagtgcgcaaagcgcaccttattactcactactaattactaactattcactgccgttaaaaaaggggaaacagtatgtcaaaaaaatttatttgtgcagtagtttttacgatgtttatggttttcggtctggcagcgtgcggcggtaatgttaacgaaagcggtatggattcaaaacttatacagatagttgaagaagccaataaggacctgccgatgatgattgacgaagagacaaaacttgaacaaattatcgttttgccgggaaataaagtacagtttaatcatgtgcttatcaacgcttcaaatgaagcaatagatgttgatgagttcgcaagcgcaatggggcctgccatattcaacaacgtgaaagcaaaccccggccttgaaacttttagaaagaaaaacgtgacttttatatatcattacagcgatcgcgacggagaagaaatcgccgtattcgagattacgccggaagattataaatagggtgtccctaaaatcccctttttgtcattgcggcctctgagccagctgctgcgcgacgaataaggagcgcaagtcagcggcgggcgcgagatgtgagcgtcccatccgtttaatacgacgagattgcggctcagaggccgcaatgacggcagaaaataagggtttttagagaaacccaataagtatttgaaagtgaaactccgcggcttatataaatccgcataaaggaaaggaaaatggcagagaaagacaacaaaaagaaagaagcgcaggaagaaattgaagcgaagcttccggcaaatattgtgccgcgcaatattgaagacgaaatgaaaacgtcttacatcgattacgcgatgagcgtaattgtgggaagagcgcttcctgatgtgcgcgacggcttaaaacctatccacaggcgtatactttataccatgaaagaaatgggtatgcgccacggtacggcttataaaaaatccgcaagggtagtcggcgacgttatgggtaaatatcatccgcacggcgacagcgcgatttatgaatccatggtgcgtatggcgcaggagtggtctttgcgctatccgctggttgacggtcagggaaatttcggcagcatagacggcgactctgcggcggcaatgcgttataccgaagcccgcatggacgcgatctccgatgaaatgcttgccgatttagataaaaatacagttgattttatgccaaattacgacggctcgttaaaagaacccgtaattcttccggcaaaacttcccggccttttgattaacggctcgcagggtatcgcggtaggcatggcgacaaacgtccccacccataatctggctgaagtttgcgacgcggtatcagctttgatagacgacccggaacttcccctttcagaaatcggcaaatacataaaaggcccggattttcctaccggcgccataatactcggcaaaggcggcataaaagattattttgaaagaggccgcggctcaataaaaatgagagcaaaagtagaaattgaagaagccaaaaacggcagggaaacaattattgtcaatgaaattccttatcaggtaaataaagccaacctgataatatccatagcagaccttgtaaaagataaaaaaattgacggcatttccgaccttcgcgacgaatccgcgcgcgaagatataagaatagttatagaaatcaaaagggacgcaaacgcccaggttgttttaaaccagctctacaaacatacggcgctgcagtcttctttcggcgtaataatgcttgcgcttgtaaacaaccgcccgaaagttatgaatataaaagaagtgcttgaacatcacatcgagcacagaaaaatcgtcattgtgcgccgcacaaagtttgaactgcaaaaagccgaagcaagagcgcacattttggaaggtttgaaaattgccgttgataatatagacgcggtagtaaaaattatcagaggcgccaaagataaagacgacgcgcgcgaacagctgatgacaaagttcaaactttccaaaatccagtccgaagcaattttggaaatgcgtctgcaccagttaaccggacttgaaagagaagagttggataaagaatatctcgaaatcataaaaacaatcgaaagactgcgctctattttggcagatcctaaaaaagtattggccataattaaaggcgaagtcgaagatctcaaaaaagattacggcgataagagaagaacgcaaattcaggcggcggaagcggactttaacattgaagatttaattcaggaagaagaagtcgcggtaacaatgtcacacgccggctatatcaaacgcataccgctcgacacttacaaagcgcagcacagaggcggccgcggaattaccggcatgaccacaaaagaagaagattttgttgaaaatcttttcataaccagctcgcattcttatctgttattctttacaagccgcggacgtctgtactggaacagggtttatgaaatacccgaagccggcagagcgtcaaaaggtaaagcaatagtaaacctgttgcagcttgcgccggaagaaaaaatcacggcggcaataccgataagaacgctcaaccttaaagaaataaaagacgaatatttattgatgtgcacaagaaacggcacaatcaaaaaaatcgcacttgaagaattttccaaccccagaaaaggcggcatagttgccataaaacttgacgacggcgacattttggctgaagttaaagcaatcggtaaatgcccggaagtattgatagcagccaaaaacggccaggcaatacacttcaacgaaaaagaagtccgcgccatcggcagaaccggcatgggcgttaaaggcatagaaatagcaaaagacgacgaagttataggaatggaagttttgtgcaaagaagacatagtgcttgccgtaagcgaaaacggctacggaaaacgcaccgaaataagcgaataccgcttaacgcaccgcggcggcaaaggcgtaataaatatgcagacaacagaccgcaacggcaaagtgataggcataaaacgcgccaacgccggcgaagaaataatgataatgacccaaaacggcataacaataagaatgaacgttgacaaaatttcggtaataagccgaaacacccaaggggtgcgcctcgtcaaacttgacgacggcgataaggtggccgccatcgcaagcgtggtgaaagaagacggcggtgaaactgaagcaactgaggaaaagaaataaaaatgaagagccctctggtataaaatatcagagggctttatgaaatgcggcggcaatataaatgaaaaaagaaaaaatatttttaatactcggcggcgcaaacggcgtcggaaaaactactttttcacgggaaatattagacgaatatgaatattccaaattcttaaacgccgatgaaatagcgaaagaaataaaccctgaaaacatatcagccgtaaaaatatcagccggtaaacaactattttataatttgcaagaattactattgaaaaaagagaacattatattagaaacaacattgtcggggaaatttttagttgatattataaaaaaagctaaaaagtcaggatataaaatctatattttctatacttttgccgattctcctgaaatttgtatagaaagaataaaaaacagagtaaaaaaaggcggacacttcataccggatgaagatgtaagaaggagattctataggagtatcaaaaacttttggagtatatacaaacatttagcggatatatgggctttgtattacaatatggcgcaaagtattattgttgcaaagtcttcagaacagcaaattgagattttaattgatgccgagtataataaatttttaaggatggcagaaaatgacttcaaaagcaaataagataatagatgaaatgacaaggttgtataacagaggcgttgctaaggctcaagaagaaaaccgcaaaatgggtttgccgaatgtattttatagaaacggcagaataatttacgaaatgccaaacggaagcatccgcacaaagaagttaaataaaaagccataagagataaaataatgataatgacccaaaacggcataacaataagaatgaacgttgacaaaatttcggtaataagccgaaacacccaaggggtgcgactcgtcaaactggatgacggcgacaaggtggccgccatcgcaagcgtagtgaaagaagatgatgaaggcgaagagcaaacaacggaagaaaagaaataagaatgaaaaaatctttaaaaaataactataccgatattctaaagcagattattacagagataaaatccgctcgtgttaatgctgcaaggcgtatcaatactactatgatacaagcatattggaatatagggcaaaaattatcgaatgaaaaaatagaaaaaggctacggcgggaatgttgttgaaagattatcaatcgatataaaaagcgaatttcctgacataaaaggattttcgccgagaaatttatgggatatgaaaagattttatgagttttattccaatgccgatataaaactgcgacaacgcgtcgcagttttgccttggaagcataatcttataataatggataagataaaaaatattcctgaagctaaattttatattgagtctgcgcttgaaatggatttgacaagagacgttttattaaattttataaaagcaaatgcttataaaaataccaaaaagccgaaacttaataattttaaaaaaactttaccggaacatctgcaagagcaagcggatgaaatattaaaaagttcatataatcttggctttctgggaataagtaagtctgtaaaagagcttgagcttgaacgtcgcataatagacaagataaaattatttatacttgaattgggtaaaggattttcttttatagggaatcaatataggcttacgcttgataacgaagacttttttgttgatttgctgtttttcaacagagttttaaaatgtttggttgcaattgacctaaaaataggcaaattcagacctgaatatgtcggaaagatgaatttttatctgggtctacttgatgacaaagtcaaaatgcaaggagaaaacccttccattggcattatactttgcgcggataaaacgaatgttaaagtagaagttgcgttaagagacgtcaataaaccaataggcattgcagattataagctacaactgccggagaaaaaattaaaagaattgataagtaaagaacttaacataaaggaagaaaagaaataaaaataaaacaaagcccctgaatataaaagttcaggggctgttttttgaatagcaataatgaggaaaaaatatgaatcaaatttatgaacaacaagcaactaaattaaaacaaaaacttgacggaaaagattataggattggtctggatttaggtgttggttctatagggtttgcaatagtttctatggaggaaaattcagagaaagttttattgccaaaagagatagtaatgtctggggtaagagttttcaaagcatctgacggcgctgctggaagaagagagaaaagagggcaaagaaataaccataggcacaacagagaaagaatgagatatttatggaaacttttagctcaagaaaaattggcgttatctgttcctcctgatttagttaaaaaggaaaattcatccgaacaagaaacttcatctaaaaggtttttaaaagaagttctgcaaaaagatgtatatgaactcagagtaaaagcgcttgataaaaagttagaattacaagaaataggatacactttgtatcacatttcaaatcatagaggatcttctgcaataagaacttttgaggaagatgacgaaaatacgcaaaaagaaaacactgaaaataaaaaaatagccggagatgttcaacgattaatgcaaaaagaaaattacagaacttacggcgaatatctgtataaagaattttttgcaagcaaagaaaaacatgacagagataaagttactaacacaacaaataatcataaattttcacccgcaagagattttgctatcaaggaagctcagctcatattagataagcagtctgaattttataaagaattaacaaaagactatattgaaaaacttataaaagcaataaactatgaaactgaaaaattaattccagaaagtggttattgtccatatttcaaagatgaaaaacgtttgccgcgttctcataagttaaacgaagaacgcaggctttgggaagctttaaataatgcaaaatattctgaacatgtagttgattacagtaccggcgatattgtgaactttgaagaaaaaacattcacgcaggagcagaagcaaaagttagttgattatttattaacaggtaaagatttgacgcaagatcaaacaaataaacatcttttattaaagaatgtttataacgaagatatagttttacagggtagagataaaaaaactcaaaaaataaaaggttataaattacgcaaactggaagaaatgcctttttgggcaagattatcagaacagcagcaagaccaatttttatatgattggaattcgtgccctgatgaaaaaactttaacagataagcttttaaaagaatataaattgaaagacgaagaaataaatgaagcgtttaataagatagtattatcttcttcatatgctccgcttggcaagacggcgatgaaaatagttttagaaaaaattaaaaatggtttatcttacacagaaagtatagaagaagcgctaaaagaaggcaaattaaccaaagataaacagtcagttaaagacaaattgccttattacggtgtgataattcctgaaagcacgcaagctgtaattgcaaaaggcttttcaagacaatttgagggtaggaattacaaaaaaccgcatacaaataaagatgaattagaccacgggcgaattgcaaaccctgtagtacatcaaacattaaacgaacttcgtaaattggtaaatgaaattatagaaatttttggcaagaagccatgcgaaatagggctggaaaccgcaagagaattaaagaaatccattgaagccagggcgcaattaagcagagaacaaaacgagaatgaaaaatataggaatgatatatatgaaacatatataaaaccacgccaacaatacatagcgagtagacaagaaaatccaaaaaattatgttttaaaatttgagttatgggaagaacaaaaagtaatttgtccattttgtttaaaaccaattaattcagatgatatcatagaaaatagagtggatatagagcacttattccctatttctgaaagcgaagataatacaagaaataatcttgtaatttctcatgtaggctgtaatcaaaataaagcaacacgttctccttttgatgcttttggctcatctcccacaatgagtcttgatggaaagcagcataaatatgattacaatgaaatgctttcaaatgccaaaaaacatattcctaaaaaagcttggcgttttaatcagggagcttttgaaaaatttatagaaaacaagccgattaaaaagcgttttgaaacagataattcttatatttcaaaagttgcccacaaatatctttcgtgtttgtttgaaaagccgaatatcatatgcgtaaaaggatctcttactgcgcagctgcgcctagcatggggattgtcaggagtattaattccttttgcaaagcgattgcttgatgataaagaaatagaagattttaataatgacgttaataaaagtaaaaaaataagagttgataatagacatcatgcattagatgctgtggttattgcttatgcttctaggaattacggcaatatgctgaatcgaattagtgctcaaagctataaaataaactataaagaaaaaaattggctttcaaaaattttagttccaccgaataataagaacagaaatgaacttgaagcggatttgcaaagttttgaaacttctattaagcaagcattaactgacgcttatgtcagtattaaacatgaccataatgataatggacagcttactaaagatacgatgtataaaatttacggttcaaataaaggctataccttaacaacatacaaaaatttaagcgggctaaagttgacggataaaaagaaaaccccgaaagaaattttagaaacagctcttttgaagtttgaaggaagagaagatgagctaaaaaacgcggcaataaaaaatgcagtttcaaataacaaaaaattatttgatttgatacaaaacaatttaaaacgcgctgaagaactgctcaaagaagaaaatcaaagggcaaaaactgaaggcaaaaaagagaaaatcactaatgatgtcagcatatgtcaaaaagcaatttctttgttgccaagtaatacttatgtacagctttctaaaaaagaaccaagtaaattttttgctgttcagcagcctacagacacaaaaaccggctatggctatgatacaggtgaaagtttatgcgtagatttatattatgataacaagcaaaaactctgcggagaaatcataagaaaaattgacgctcagcgaaatgtaactccaaactataaaaatcaaggctttgctttgtttgaaaggatttatggcggagatgtattagaggcagattttaataatgataaaaagtctttgagcaataatgttacttctatgcctatggatagaatttttgtaaaggtaacaacctttacggaaatagcaaataataatatacaaatatggtttagcaatgttctaaagagtagaaatagtcctgatgattcttttactataggttcaatgcaaaaatacaatccgcgaaaagttattttaagttcggctggccttataaaataccgttcccctatacttaaagataaggaaagttaaaatgtggagagttttagacattagcggagacaattattatttatgtgtcaaaaataataacttttccgtagtgcaggaaaaccaagaaaaactacattgcttatttgaagatattaacacaattatactttatggaaacaatattacaattaccaacacttgcatacaaaaatgtttagaacataaagtgccggttattttctgtgacaaaacttatatgccttccggaatgttgttgtccgcttggactacaaacatttacgggcaaagattgcaattgcaaataaacactccaaaaccaaaaataaaacaagcttggcagcaaataattacaaataagttaaataatcaggcggaagttttaaaaaaattcactgctggcaatgcggcgaatattatttttgatatggcaaagcaagtgcgctcaggcgatgcttcttttaaagagggtgttggagcaaaggtttattttgaaaatttattttcgtgtttttacagaaatgcaaaaggcgaagatattataaatgcggctttaaattacggctatgcgatagcgcgaagcagcgttgcaagagctgttgtgtcatccggattaaaccctgctatcagtgtctttcacagcgaaaatcataatccattttgcttgattgacgatttgatagaaccgtttcgtccagctgtagatttaatagtaaaagaaaaagaagaatttttcagaaaggaaaaagaattatcacctatagcaaaaaaagaactcgcgtcacttgtagaaagcaacttatactttgaagacgatgcctatagttttggcgcgggaattttaaagtatgtccaaagctatgtttcttttttatctcaagaaacagataaaataaattttcctaaaatcttaaaatgatttcaccatataaaacaatgtggattttaattgcttttgatttacccgtaaaaacaaaaacgcaaatgcggatagctaataactttagacaaaagctaaaaaacgcaggttttattatgttgcaaaaatctatatacagctattatgcttttagtaaagaaaggtgtgattttattgaaaaacaaataaagcagatggtgccggacaacgggcacgtctgctttttgttttttacagataggatgtttaaaatgacaaaacacttctacggcagattaaaagttcagccgaaacaacctgatttttttgacacacttctgtaaacttacaaatgggaaccggtttaaccggcatcttacgaaaaaattcttgttagagttgcccactctgtttttaaaaaatttcttaaaaaaacctcaaaattttgcccataatttagatttttttctaaaaaatttttaatatctctgacgtaaaacatcagttgatattttaccaagttcaaactcggggggcaaccctaaccctattcacaagcaaggagacaaagcctatattttaccaagttcaaactcggggggcaaccctaacctcttttgccgacgatgcatttaatccttgattttaccaagttcaaactcggggggcaaccctaacatccgcagcggtggcattgctccactaaaaattttaccaagttcaaactcggggggcaaccctaacatggatgggagacgacaataatgataagcgattttaccaagttcaaactcggggggcaaccctaactgtgtacgggtcagacactttgggcagataattttaccaagttcaaactcggggggcaaccctaacattcagaagcatacaaccgcgctcgtgcgtattttaccaagttcaaactcggggggcaaccctaacacgagtttcggtttccgtaagataaaaacaattttaccaagttcaaactcggggggcaaccctaactggcacaatttcctcctaatcaaaaaaggaattttaccaagttcaaactcggggggcaaccctaaccgcgtcatccgtcgctatttccgatgggaaattttaccaagttcaaactcggggggcaaccctaacgaaaagttcgtggtggattaaaatggggaaattttaccaagttcaaactcggggggcaaccctaactaccgtctataaagtcatttttgattatcgattttaccaagttcaaactcggggggcaaccctaacgttttttcgctgcgcgttgcttgtgagtaaattttaccaagttcaaactcggggggcaaccctaacattatacgttgaattgatattctatctgatattttaccaagttcaaactcggggggcaaccctaacataataaatatataatgcgttttatctcgtattttaccaagttcaaactcggggggcaaccctaacaaaaatgaaatttcagttattaggaaattcctaataactgcggcagacggtaaatacttggtcggcgggacggggatgttgaccataaaaattgaacttacaaaacaacaaaatcccaataaattatataaaaagtattaacctgcctatataaaactttaaatcaaatcatactatctaaatctaaaattttgcattattgcgttttcttgaaatttttgaacttttgcttgagttgatgtcagagccatcaatgagcatttgcagaatattttccatgattttgaattaccggaagattcagttatccggaaattccggataactgcgagcgacggcaaaacttatgtcgtggagacattgaactgacaaaaaattggccaaagtgatgatgggtcgttgaccacaaaattgagataaaaaaacccgccggtaaaattattcttaccggcggggtttctattt

SEQ ID NO: 855 - DNA, 5913 bp, synthetic construct
  misc_feature 1..5913: note = Synthetic
  source 1..5913: mol_type = other DNA
tcaacaacagcaagataatccgagaggggctactaccgtttttgacaggcaatattggattgaactttatagctctgcagataaaagtactttactgcacgaaagcagtcatgcttttttaagtgaagttctttatttcgctaacggaaaaaatccgtctgctaaaattttgagtattaaaaaacagcttgacgattggttaggtctcccggaaaataacggtcggtattctacaagacataatatacaattaagttcaagaccgaattccataaataaaactatacttcaaaaatgttgcttgcgaagctactttttttgattattaattttctatcatatatattaatttcctgttatataagagtgcgataagatgttggcggaatattttaaaatatttatagtcaataacaataaaaattttgtaaaatggaaagaatgaatataagaaataaaaattattataaatattattgattaaaatccattggttttttactaatagattttatttttggaggagaaatgaataatattacagaattagaatacaaaaaaataaaaaataaattaggtaataatgattatagattaggattggatttgggggttggttcaatcggatattgtgctatagcattgaaaaatgatgataacggtgaaaagagtataacagataatgttgttttattaggttctaggatttttaaagcatctaatggttctattgatagaagacagaaaagaggacaaagaaataatcacagacataatagagaaagaaaaagatttttatggaatttgttagctagtaaaaatttagctttagaaatgccgaaagacatagataaaaaagaagattcttccgaaaaagaaacttcaaaaaaaagatttccaaaagaaactttgaaaaaagatccgtacacattaagatataaggcattagaagaacaattagaaaaatatgatttaggttatgttgtatatcatatagctaatcatagaggaactgcatcagtaagaacttttttagaagatgatgaagcaacaagaaaagataatacggaaacggcaagaatagctgataacataaaaagtgtaatgaaaagtaaagaatatagaacttatggagaatttttatataaagaatatattcaaaaaacacctcaagataaaagagttaaagttacaaatagtaataataaaatttttgcagtaactagagatttgatactggaagaattaaagaaaatacttcaaaaacaaagtaaatatgaatattatcgtacaattttaacagatgaatatatagaaaaaattataaaggcagttgattatgaaactgaaaaactaatacctgaaataggaaattgtccatactttaaagaagaaagaagattacctaaagcacataaattaaatgaatacagaagaatatatgaagctttaaataattccagattttttattcctgttacaaatgcagaaacaggtgaaataacatcatttacgaaaagacatttctttgatgatattattgatagtaaatttcctttcaaagaaaaagaaagggatattttatttaaatatttacttaataataagaaattaaccgcagtaaaagcacaatctttattaagtttgccttcggggacagaagttcaactacaaggtaaagataaaagtaaacaagaaataaaaggttatactttgaatagtcttgaaaaaatgtctttttggaataggttaagtgaagggctaaaggatgaatttctgtatgattggaactcttcaccggatgataggcaattaaagaaaaagttgttagaaatttataatttatcggagcaagaaatagatgagtgttttaaaaatttggttatatcttcttcatatgcagatataggaaaaacggctatgacgataatattgccgtatattaaaaaaggattatcttataatgaagcaatagagaatgctatagaagataaaaaactcccgagttttagcaaaaatgtttatgatttattaccatactatggaaaaatattacaagaaagaacacagaaagttatagcaaaaggtttttctaatcaatttaaaaataaaaattacaaaacacctaatactaacaaagatgagttagagtatggtaagatagcaaatcctgttgttcatcaaacattaaatgagttaagaaaacttgtaaatgagattgttacaatattcggtaaaaaaccatacgatataacaatagaaacatctagagaacttaaaaagagccaacaagcaagaatggaattggtgaatgaacaaaaagataatgaaaaaaagaaaaaagatatatatgatacttatatagttcctcatattgcacagataaaaagtaagaaagaaaatccgttgaattatattttaaaatttgaactttttgatgaacaaaataaaaagtgtccgtactgtttgaaaacattagaagttgacgatgtaatttcaggtaaagcagaaatagagcatatttttcctttatcattaagtgaagatgattcaaaaaataataaagtcttagcatgttctgattgtaatgctacaaaaggagaaagagctccatatgatgcttttgcacatttaacagaaggtaaatttgtttggaataatattttggcaaatttattagatgaaaataataataaaaattttagaaataaagcatggcgattttatcaaggtgcttttgaaaagtttttagaaaataaacctatgaataaaagatttactacagataatagttatatttctaaaacagcatcaaaatatttaaattctttatacaataaaccaacaaaaatatttcctgttaaaggatttttaacttctcaattaagattagcatggggaataaatggtgttttaataccatttgctaaagaattgttaacaaaagaagatcaagaaaaactacaaaaattattgtctcaaaataaaaaaattagaatagataacaggcatcatgctttggatgcattgattcttgcttttgcaagcagaggatatcataactttttaaatactattaattctaagggttataaaataaattataaagaaaaaaattggttatagaaagttttgttgccgccattaaataaaactgtagaagaatttaatgattttataaaaaataaaattttggaaacgaacataagtattaagcatgaccatgataagaacggtcaattgtttaaagaaacaatataccaaacatattatttaaatgatagtaaatcaatacttgttagtgttaaaaatgtaaaagatatagattttcctttagataaaaaacctaaagagagattggaaacggcattatgtaaatataatataaaagatacggataatgcgaaattaaaagaaaaaataaagcataatgttgaaaaatataatcaaataataaatgttttacctgatataaaagaaaaattagaagaagaaaatatagtattaaaaaaggaaggtaaaaaaggaaagaatataacagaacaattgaagtttaaatccgcatgtgaatatgtttccggtaagtattatcaaatagaaataaaattaaataataaattctattctgcaaaaaatccgatacaaaataaaacaggttttggttatgatacaggagataatctttgtttagatttgtattatgattctaaaggtaaattatgtggagaggttattagaaaggtaaattttatggcagggcaaactccagaatacaaaaaagatggatatgctctttttgaaagaatttatcagggagatattttagaagttgatcaatcggataaaaaatggtctctaaaaaataagacaaattctgcacctaaaaatagagtctttgtaaaggttgctacttttactgaattaaatgcttactacgaaaaaggtaaaaaagatcagatacaaatttatttttgtaatatattaaaagcagatcaaaaaaaagatgattctttttatatttcgagtatgcaagaatataacccaagaaaagttattttgtcatcgttgggtataataaaatatcgttcggcagtgttaaaggataaaaatgtggagaataattgatattagcggagatggatattatttatctgtaaagaataataatttatctattctaaaagataataaagaagttttacatgcttgttttgctgacatcaattctataatttgtagtggtaataatattgtatatactaataccgtaatacaaaaatgtttagaaaataaaataccattaacattttgtaataaatctcacttgccaataggtatgttaattcctacattttctataaacgaatatggacaaagattacaaattcaaattaaagccagtgtgcctttgaaaaaacaaatttggaaacaaataataaaagaaaaattaaaaaatcaaagtttgtgcttgaagaactttaatattatggatgtttcaaaaaaacttttggaacttgctaatgaagttaaatccggagattccacatgtagagaaggtataggtgcaagattttatttttcttctcttttcaataattttaatagagataataataaatccgatatattaaatagtgctttaaattatggttatattgttgtaagaaattgtttagcaagagccatcgtttcttccggtttaaatcctgcattaggtgtttttcatagcaataatcataatccgttttgtttggctgatgatttaatagagcctttgagacctattgtagattatcaaataaaaactaatattaatgaatttttatcagagcaaggattaaattctaaactgaagaaaatattagtttctataatagatagtaatttattttttaattttgaatcttgtaaatttacatttgcattacagaagtatattcagtcatattattattgtttaaataataaaacagataaactttgttttcctaaaatttttaaatgatatcaaaatataatgctatgtggatattagttgcttttgatttgccaacacttacaaaaaaacagcggagaattgcgagtaactttagagaacaacttaaaaaaagtggatttgttattcttcaaaaatccatatatagctattatgcatgtacaaaagatagatgtgatactgttgcaaatgcaataaaacagtttgttccagacgacggacatatagttatttcgtttttgacagatagaatgtttggtttaacaaaaaactactacggtaaaaaaacatccaaactcaaacaaccggaattgtttgatgaattactttaagataatagaaccagttgaactggcattttgcgaaaaaactcttattagagttgccctttttatataaaacttttaaaaaaaatcataaactttagggttgttaaaaaaatttattagagtttttttaaaagttttttcacttctctcgtcataatttttacattgatattttatcaaataacatttcaaggggcaaccctaacttcaagctataatagaactcttaggttcggattttatcaaataacatttcaaggggcaaccctaacccatcttctaccggatgttccataagttttattttatcaaataacatttcaaggggcaaccctaaccgccgtcggtgcggtgaaaatactaatttaattttatcaaataacatttcaaggggcaaccctaaccaagaatctaaacatatataaatattatttagttttgccaaatctctaatcttccaatttagaaatttaaatacaaactgtaaggaaaaactacaatctgttcacactaatatatctattattaaaacaaaataaataaaattacaaaacatcaaatcaagtttatcataacgagtaaatattc

SEQ ID NO: 856 - DNA, 16192 bp, synthetic construct
  source 1..16192: mol_type = other DNA
  misc_feature 1..16192: note = Synthetic
cgaggcccgcaggatcgcctggcccacagcgctccgcgggcatcgcaggcccaccgtcccgtggtaatagaccgcatcttcgatcatcccggccggctcgccccggtgcggacggcggtccgggacaacgagcgtcagcgggcccggccacgtcttctgcgcgagacgccgggcgaccagcggcagcggcccggcgtaccgctcggcctcgtgagggtcggccaagtggagggtgaacggcttgtcgggggtgcggcccttgagttgctccagggccgcgatggcctcggcgctcatgacgctcgcgccgacgccatagaccgtttcggtcgggaatacgatgagcgaccccgaggcgagcgcccgcgcggcctctcggatcgcatccgcctgggcttccgtgtcggtcgcagtcaggaagcgtgtttccatttgccgcagatttgaatcggcggcgggccgaaagtcaagcgcgcaacaaaacggttggccgggaaaagcacttgacgaagcaccttttatggcgtacgttataacgtacgttgtttcggaggcttatcatgacaacgattgccgtcaccgaagcccgcaagagactgtataaaattctcgacgacatcggccggtctcacgaaccgattcacatttccggaaagcgcggcggggcggtcctggtgtcggaggacgactggcggtccatccaggagacgctctacctcgtctcgattccgggcatgaggcagtccatcatcaagggccttaagacccccgtcgagaagtgctccgaggaaatcgggtggtgacctggacactcgtctatactgcccaggcgcggcgcgacgccaagaagatcgccaggtccgggctgcgcccgaaggccgagaagatcctggacattctccgggcggacccctaccggacgccgccgcctttcgagaagttgcggggcgacctgcacggggcgatctcgcggcgcattaatatccagcaccgtcttgtgtaccaggttctcgaggacgttaagacggtcaaaatcatccgtatgtggacgcactatgaataaatcgggccggcgcccctcagtagcgccggcccgatcctatggagtcgccgcgacaagcgctaccggccgctcgcctggatttgctcaagcacctcgcgcgggacgccgaggaacgcctcggccatccgcgggtcgaactgctgtccggccatccgccggacctgctccagcgcatcgtcgatgctcatcgcctcgcggaacgggcggcggctggtcatcgcatcgaatgcatcggcaatcgccaccaaccgcgccacaacaggtatctcttcgcccgccctcaggtcggggtaccccgtgccgtcgtacgactcgtggtgcgagcggatgatctcggcgacttcaccgaagaagtcgagcgccttgaggaactgcgcccccgcctccggatgccgccgcacgagttcccactgttcctccgtgagcggccccggatggttgacggccgattcgggaactgcgatccgccccaggtcgtgcagccgcgccgcgatctggagcgccccgacctgcgattggctcagttccatcgccggccccatctgctcggcataggccagcacgcgggccgagtgccccttgaggtacgggtcgcgggtctcgaccgcctcggcgatcgtctcgagcgatgcataaatctggcagcgctgatggtgatggaccttggccgtcaagatggccgggcccatgactcgggcgagttccacgaccgtcttgacgtcctgggggctgaaatccccgctgccggccggccgatgcagcagcaccaccccggccgcgtgcccctggcatgggatcgggacggccaacagccgcccgtcgggccacaattccttttcgcagggcgccaggaggacgctctcggccacatcatccacgtggacgcttttctgtgtctgggccgcgcggcacatgacgcccgatttcagcggctcccgcagccagcagagcgccggcggatcgtccgcgtccggatgggcccggaccatgaggccgatggcggcgtcgtgctgctcgtagagcgccaccgtgctcgtctggcaggccacgcggtcgcccaccagttccgccgagaggcccagcaggtcctccagttcgatgatgcccatgaggcttcgcgcgacgtcggccgtcagcaccacgtcgtctatctggcggataaggcgcttgttggagagcacgaggtcgtggctggcaatctggagtttctggttcaactgggcctgggcctcctgaaggcgggtgtttgactccgccagttcagcgaaccgccgctggaacgcctcgcggttgcggcggttgcggatgacccggcacaccgcgcgcgaaatcacgtccaggtcgaacggtttctgaatgaaatcggagaaccccagtcgcatggcctcaacgcttgcttccagcgtgccgcgcccggatatcgctatcaggcccaggcactcgttcgactgccgcgctttctcggccagcgagaggccccccaggccgggcatcacgaggtccgtcaccaggcagtcgaactcctggtcgccgaggcgctcaagggcccgcttcgggtcggcctcggccacgatctgccacgtcgggtctgcctctcggagggcgtcggcgaccatctgggcgatctcggcctcatcatcgacgacgaggatccgcgcctcgacctcggtctgcgccagttccgctcctgccgcactcatgttcgtcagccccttcttcgctgcccgcgggcccgcccaggcgaggtctccgcttcgcttcgatttatgcccgcggctcgtgtgccggcacgattaaaggaggccgagcgacgtatggccgcgggtcgctcggcctccgttcttggcaaccacggtgagggctagccgcgagagcgaggggggagggagaaggcgtcgcgctcaccgtggaattctcatgtcgggcgcccggccggttcacgccccgtggcttgcataccgcgggccgtgcggcgatggccgagtcatccgtttgtcattttcgctccttcgttctcctggattatcgggaatgtcatccgcaccgttgtgcccttgccgggcgtcgattccagtgccatctgtccgccgtttgcctggaccgcccggaacgccttaggcagtccgagtccgcgatggcgtccggcctcacgtccgcagaagaacgggtcgaacgcccgcgcccggatcgccgggggcatccccggcccgtcgtcggccacgacaaaccgaactgcctgctcggccgaggccgcaacgacggcaatcttcacgccggccccgtgtccgttcgagcacgcctccaaggcgttctgcacgacctcgcgaatcgcctcggcaacctgtccagggtcaacgtggatggccggcgccgcctgggccgcctccagcgtgaccgtggccgacgtgcccgccgcacgcttcccgaactcgtccgccaccgcctgcgccaggcccacagggtcaaccttttggaactgtggcgccggcggccgggcgaactggcgaagttccgtgatgatgtcgctgatccgggccgcctgctcgacgatggtcttcaggacatcgcgtcgggcaggggccggttcatcggccgccagttgctgcgcgcggccgctgatgatagccagggggttgttgatctcatgtgcggcgcctgcggccatctcgcccatcgaggcgacgttccgctctcgcagccgctggtcctgcgcggcctggagttcgcggttcacctcggcgagttcctcggaaaggctgaccaagtccgcctcggcctggactcgcttcagggcgacgcccgccatgctcgcgagtgccgccaggtcgctcgtctcggcgggcgtcaggccgcgcgaagcattccgcatggcgaacacaaggccgcctaccttccgctgctccacgaccatcgggattgtgtggaacggcccgctccccagttcggcgccttgccgctcgaagagccaaccctcgatccgttcggcccggacgaccgttcccgccgccagtgtcaggccgccttcgtcgggcgcgagcgcatcgagcccgtctcgcctgtttatcgggtaaaggaaatgctccagcaggtctccatcggccatgcaccggatgccttcgacgtagtcgccgtcgcggccgacaaagtaggggaccaccgtgccgacgccgagtgcctcgcgggccgcctgcgccacggtctggagtacctcgcggaccgagtggcatgccgccagccggccgttgaggcgcacaaggaggtccgcccggttcgcctgggcctcggattcccgcgtccgcgcatgcccggcacgatacagccggcccagccgcacgttcgccgccgagacggcccgccagaggtcctccagcgacggcctggcgtccatgccgatgctcccggcactgatgtcaagcacctgggccaactgatggccgatctgcgccgccccgccgcccgaaagccccagccgctccgccgcctcggaggcgctctcccgaacctggtcgctcttcaggtaactgaacccctcctgccgcgcgatgatgtcggcaaggctgaccacctgcgccagcgacccgaggcccgtccgctcggccgagggcacgtgtgcctgatggtggagccagatggcgttctgaagcgtctgcgagaagccccatcgctgcgcgagacgtttgccgacgatggcgtggtccacaccgaggacggcccgctcggcctccagcaggtccgcacccccggattccgcacgggccagcacttgggcgtatgacttgggcatcaccagcgccagggcgatgaaaccgatgtcatgcaaaattccggccagcagcgcctcctcgggccgcaccgtgccgatgcggctggcgatgatctgtgccgccatccccgacgccaggatgtgccgccacagccggttcaccgggagttcgccgagcgtctcggggccaagggtgtcaatgctgaggaagttggcggtcaggaggtctatcggcaacgcttcgacgatggcctgaacgctcgtggcggactcgggcgtgcggccgctttccatcgccaggcgcagagcacgggccgacagcgccgcatcggcctcgatcacgaattggatgtcgcggcggttcggatgatccgcccccagcagcgcgagcaggtgatgggcaaccccgggcagggtcggcaactggtccacctcgtcgaggaggacctcgatttttcgacgttggaggcccgaggccgacataagcgggttcccttccggcgccggctacatcttgagaagttctgaaatcttgttgatgagttcatctacctggaaaggcttgtgcagaaaggcctggatccccatgtcgtagagcgcctggagtttgtcttcctcgacgatgccgcttatgatgatgatcctgatgtcttccaggccggggttcgtgcggatcgccttcgcaacgacgttggcgttgatgtccgggagcatgtagtcaaggacgatgacgtcggggtggaactgctgcgtcagaaggccggcgtcgtatccgcaggcggcggtcttgacctcgaatcgcccgtcgcggtccagcgcatcgaccagcatctccacgatctcggcctcatcatccaccacgagcaccttcttcttgctcgtgtcgaggttcgacaggggaatcccgttctccttcatgaacttggccagactctcgcgcggaatccgccggaagcgggaaccggggacatagaatcccgccagtttcccggagtcaaagcaccggattattgtttgctggctcacgcggcagatcttggcggcatcccctgtagagtaaacctctttcatcgcacgctccctcgctcggccccacgcatggcgtgtgacaactgcgcatagcaattttacccatctcgcccatcttgccaaattatgtatcggcggcgggggggtgtcaacttaaaactttcactttgctaaactgggaagaagcggttgtttcagaaggccaggtccgataatgtggggccgcacgcatcacgcactacaaatacatggtccgcaatagacagagggctgaacctttcgttcagccctcgacgctgacttccgaattatcaggcgggcagccgaatcctttcgcgtcaagccgtagaatcaaccgccgtaacggaaggcatccgcctggtcatcaccagccgccgccccagccgccgccgtagttcggcgtctgccactggccgctcttgccgtagtctcttggctggcccgtattggggtcgacgttcgggtcagtggtgctcgttccgccgcccttgctgccatccttcttggcggtcttgagttccttcaccagtttgtcaagtgcagccttggcggttgagttctcgggatcgagtttcaggacctcactgtaaaagccgccggccgcccggaggtccttccgctgctgcgcatcagcggccaggtcaagcaggagcgacaccgccttctcgcggcagggcttctcgtactgctcgatgatcggctgcttctcatcttccttccgcaggccggccgccactgccttggccttgttcgtcgcgttgatgtactgccctgccgcctgcaacttgaaattggtgagggccttggggttttgtttctctgccggcttctcagtttccttcttgaacagatccatcgacttctcggccaccgcgatgatgtccttgatcggcttcgtaagcgtggccatccgcatctcgtgcgggtccttcgtcgcggcgccgtttgtggtccccgcggccggcactgaggccgctgcgcctgcctcggcttttgcaggggcagcgccggcccatgcggctgctgaaagacccagtaccagcgcgctcaccagtcccgcgagcatcgcgtgtctcatcgccaatctccttgtctgtgcgtggactttcaccaccccaccttgctaaacgtaccaactgccacaatattgtacgtcatatttgacgcccaagcacaagaaaatgttcactcaaaggacctcacggccgcccctgcgccagggccttgacctcgcggacccacgcggtcgccgccgcttcgtcggccgcctcggccatgattcgcagaatcggctccgtgttcgacgcccggacatgaacccagccgtcttcccacgcaagatggaggccgtctcgcgtatcggccgtggcgcgcggaaaccgcttccgcacggcctcaaagaccgctgccggttccgcaccgcccagcggcgccttgtctttgaccatcttataggcgggcagttcggctgtcaactcgctcaacggggttccgcgttcggccagcatctccaggacaagcgcggccccgaccaggctgtcgcggaccggccccacgcgcgggtcgatcacgccgccgtttccctcgccgccgatgatgcagttctcgcgggccatcgcctccgccacgttcagttcgcccaccggcgtgcggaaaagccgcacacccgcctccgcagccacatcatccatcatcctggaggtcgagaggttgcacgccagcggcccccgctcgtgcgtcagccgatgccggcacgcaagcgccagcgtgtattcctcgcctatcgcccgccccgcctcatccaccaggctcagccggtcggcatccgggtcgagcgccaggccgaccgccgcccgatgctcgcggaccgcccgccccaggtcgcccaaattctctggaatcggctccggcccgcggctgaagaggcccgtcggctcgccgttgatcatgacacaccggcagcccagccgctcaaggagcatcgccatctcggccccgccggcgccgctgccggcatccaccaccacgcggaacccgctcgcacgcaccgtcgcggcattcacgatggccgccgcacgctcgacgtggacggccgccgcatcgggggcgaactcggccgggccgacggcctcggccgacaccggggcggaggcctcccgctcgtacaggtccagcaccgcctgcccggcctggcgcgacagggccataccctccggcgagaggagttttatgccgttccacgccgtcggattgtggctggccgtgatgaccgcgccgcccgccgccgtggtgtgcctcaccatgacgctcacgccgggggtcgagaggattccgcaatcgaccgccttgcagccggccgccgcaaggcccgctcggaaggcatcggccagcatcggcccggacggccgcgagtcccgccccatcaccaccgtagtagtagggtgcgtgcttgcacgcacgccgggtcctgcggcgccccgcaggcgcctgccgaacgccaggccgaaccgggcggcctcgcgcgggccaagtccatcgccgatcaccccgcgtattcccgaaatgctcacgatcagttgagccatgccgtctccgcgctgcccgcctcgcgtgcaccataatgtatcggccggcgggggaaggcaaggcaaaacattgtggattgtggatcgcggattgtggattgcggatttatcacggcgtagccgaaggcgaagccagattgtccctattatgttggaccccgttggggcggatttgcgactcgcccgccgttgccgtttcgccgtgactttgaaccttgaactttgaaccttgaactgtgtttggccgtcgcacgtaagtgccatttttgcaaaaacacttacatcaatttcgacctccgaaagggcaaaaaaacgcgttttcggaccccaaaacggccctggcgctagcgccagaggggttcgacacctcaaatgttaagatgggcaagacgtttttcgcgcggttttgaacggttttgacacggtttttacagttttttgacggttttgaacggttttttcactttctttaacaggcccaaattgacgtaagtgccatttttgcagaaacacttacgtgcgttttgccctccaagagcgcaaaaaataatcaggttccaggcatcagggccataccattagtagggggtcaaagcccgtccgatgaccatatacggtatggaattttgctgggcacctgtacaccgtggcctcggcgcggccgattgcggattgtggattgcggattgaacggagaggcaacaacggagcagatctcaccgcggaggccgcagagaacgcagaggggaacctggggtaaggcaaaaaggcaacggacccgacgcagagaaggccgaggacgcagagagccacaaacaagaagccgtcaaccttgtgaagccctgaaagggcgaaagacaatagcccagtggcatgagccctgggaatcgaaagcccgcgcccgccttcttctttcctctttttcgtagccccatcggggcgactgagacccgtagtgcctccagcctccggtctccagtcgaagcgcagcgaagatccgccgtggcggacctcaagccttttcagggtgactaggtgactgggtgactgagtgacggagcgaacggaccagacagcctagaggccgagactgccggggattgtcccgaaagggatgccgcccgaggactttcatccgcgggcggcagtgccctgcgaatcctttcacataaggccgtgaaaggccttggtgtgaaaagacgcgcgaactggggttggttacacccaaatataatatggacaacgggcaggtgtttgtagataatatgcctcgttcttgccctgcgaacattgcagatgaaggggggcaaccgtgcggcagcacacgccgaaacaaaaaccgcaggcagtttttgctggctgcggtcggtcgcccgaaggcggtgcctgcgaattctctcttgttgtggaaagagagtcgcgggccaggattggttacactgaaggaacaatataccgctctgtcgcgccgggtcaagagaaaaatcccgcagtaaaacaaggcttgtcgggagaggcatttcaggaaaggaataggcgatgactacttccttggggctggacatcggcagcaattccgtcggcagcgcgtgggttgacacgggcaagaaggaaatccgcctgggcgacagcgtcttccccgcgggcgtggaggattcggatgacaagagaggaaagccgaggaatgccaagcgggcctcaacgagaagaacccgcaccacgcttgcgcgccgtgccgagaggaagcggatgcttcggcagtgtttgactaaagccgcgctcttgcccatggacggaaaggacctgcaaaccctgatggatatgaatccgtgggagttgcgtcgaaaggccctgactgaacctcttagcctccaccaattcggccgcgttctcgttcacctgaaccagcaccgtggcgcttcgggggttcaccttggggcagaggaagataagagcaacaagaaaagcaagatgaagagcaagaaaggaggcgaggaagataaggaaggcgcggtcaaggaagccattggacgccttcgcggagaaatggtggataggtatgccactgaaggtgacgatcgagatggtctcaaggcaagcagagagaagttcgccgcgtgggcccggcaaaggcttgtaaccgtgggcaggttcgtggccgacgaaatgccggatcgccgaaatgaaatgaagacaaaggacaaacgcagcgacagggaacgggacaaaggccatccgcgtatctggtgtaatcccgttcgcaaccgcgaggggagattcaagttccacgctgaccgcgaactcatccgccaggagttcgttatgctatgggaccgacaggcgtcgtttcgcggtccggtggctgcgctgcttacacctgaactcaagcagaaactccttgatcccacggagagcaccgattggcggtgccagggtcttattttcggacagcgccgccaaacgtgggacctgggtacgctcgggcgatgcgtattggaaccttcggaacgctgtgcgcctcatgcggaccgattcgcctcatattaccgcacggtcgaaacggtaaacaacataagaatcataccgtctggacaaagccccaggccccttacggttgatgaaagaaaaaagattctgaccttgctacgcggtcctttgggcgtccatgaaaaaggcaaatatgctggtgagccaaagaccacagtaaatgtcacggatatccgccttgctctcggactgggtaagccaacaaggcggagtcagattcggttgaacatcgaaaatgatccggatcgtgagatcaacaccgattggttccaccgcgaaattgctcatggtgctattggcgaggactcttggaacaattgggatgaatcccgtcgggagagcgtcaaccgagccatccttaagttcaaccccgatgatgatgagcatgccagtagattgcgggacggcgctatttcctggtgtggcagcacaaacgagcaagcggaacgcctgatagccgcctggcgcaagcgcccgaaacttgaggaccgtgttaaactctcacgccgggccattcgcaacgttctggccgtgatggatgcagtgccggaccatgcatccttcggcttcgataacctccatcagtggcttactcagattgaagcccgcaagttgattgccgaggatgtcgatttccgcgacgtcaccacggggcggcctctagatgaattcgccaagcaccgatacgccaccggcgcaaaggggctgaacaagcgcgacaggcactacctgaagaagcacttgctcaagaaggacggcgagaccgtgtttggaccggatggaagaccgattgcaattttgccgccggcgcccatgcttacaaatccggtagtccgcaaggcgatccatgaggtccgaaggcacgtaatcgagtatctgaggcaatttggccgcaaaccggattacatccgcatcgaattgggccgcgaagcgagaatgaccaagaaagatgcggatcgcactctggagcgaatccgtcggcaggaacgaattcgcaagaacatcgtcaagcaattcgatcttggggaccgcacgcgcaaccagcaaaacgccgccgtagagcgcgtggttctggcagttcaacaaaacggcatttgtcccctatgcggcaataccgatgtcaaggactacctgtgcccaaccagagcggccgaaggcaatggagtggaagtggcgcacattatcccgttgggcaacggcggacccaatggatggagcaataaggtactggctcacacgaaatgcaaccagaacatgctcaatatgaccccgcgcgatctttggggagaccggttcaaggagaagatgaagcgggtcgaggaaatctacaaggaccggaacctcccgaagaaagaggatgccgaaggacaggcggaatggccattgtattttgaccgccgcgacgatcatgccaaactggacatgttttccaagagcgtaaaagacctcgaaggtttccgcgagagccaattgaaggacactcgctatgccgcgcgacaagtaatggcctatctcgctgatgcgctgtttgaaggcaaggggctccccgaacggagaggcccgcgactgatcttcgcctccaccggaatctggacgaagaggttccgccgggaatggggactcttcttcgatccacacgggcagagggccaagggactggcaccggatgaagagaagtcgcgccaggagaagaaccgggaagatcaccgagaacacgccctcgatgcactggttacggcgatggcaacggaagaaatcaaagactcctggttaaggcgggcggccgaggccgagcggctcaaaatggatgaggatgtttatcggcgagagcatccgatcgctcccccatcgccatggaaatcggtcaaggagttgcaggagcaggccaaacgggagatattcggagaccccgacaagccgcgtcctgtcgcgcaccggccggccaagaggaagatcgtcggccccttgcacaaagaaacgttatacggcgctgttcttgacaagaacggggtccgaagccgggatagatgtaccaagaggcaaagtgtttatgcgacccccgatgattgcttgaagccctcgcacctgcgggttggccgcatggaaaccttgttggaagccatcaagagaatcacgaaggaacttctggccgaagggctgggtagaaaagaggccaagactgaggcacaaaggcaagtcaactccgagggcttcaaatttaagtggaccgaacctgatcctcaaaaaacaggggttgtccgtgatccggaactttgccgtgttcttcggcgacaactggttcaacgtggcctggatcccgattcatttacgccggcacagttaaaggcgacgattgaagcccaggggcctctcactcaaaaaagcggggttcccatacatagcgttgtgctcctctggtccaataaagaccctgccgtgttttcaagatggcaaaccgatccggcaacgggggccaagatcaaacaatatgatgctttaactgatagcggagaccggagggccgcccgtatttatgacgctcagagtaaccaccatattgaaattcgccgtgatgacaaagaccagtggtctggaaagatcatcaagacttggaaggtcgccgagcgtaattcggaccgcctgcgggccgtgcgcgacttcctgaaaaagaacggcgtgcaggttcggcgtccgcgtaggggggagcgcagtcctccgccgggcgtaccgctacgacggttgcccaagccggaaagagagcggatcagaaaagccgtgggccagataaacagccaatacccgctggtcgataggacaaacgacccggtaaagggcggcgactttgttatgtctctgtcacagggagaaatgatattcgctcgtccttgggactcgaaatcaaaagggcctcttggctcaccaaactactttgttgtggtcaaattggacccgcccaacagcattgtcttagttccgcattgggacggacgcagggccaaggggcggaaggacgaaaacgggaagaaagtccccaattcgcaacgagacgattttaccgtgactcccggcaacctcccaagatgtggccccgccgatggtgagccgccttacaaggtccgcgtcggccctctgggcgacgtggtcaggctgaacaatgattaagcgcacaatcgaaatctcagggcagggcaaccatctgtccgtttcggacgggtcgctcgttatccggcagggcggagaggaagtcgggcgcgtgccgctggaggacctgggtatcctcgtgctcgatgcgccgaccaccacctacacccactcggtgatcactgaaatccttgcggcaggggcggtcatcattccctgcgggcgcgaccatcacccgtgcggcctgttcctgccgcaagagaacagcctccttacggagcggcttgccgcccagacggccgcgcccttgccgctcaagaaggttctgtggaaacaggtcgtccaagccaagattcggagccaggcgggggccctggcaccggatgcgccggagcgcggatacctggcgaacctggtttcggccgtgcggtcgggcgacccgacgaacgtggaggcccaggccgcgcgcatctactggccggcgcttctggggaaggacttccggcggtctccggaaggcgcgccgccgaactgcctcctgaactatggctacatggtcctcaggtcgtgcgttgcgcgggccgtgtgcggggcggggcttcacccatcgctcggccttcatcaccacaaccgctcgaacccgttctgtctggccgacgatctgctggagcccctgcggccgcttgtggatgtccaggtgcgaaggctcgttgaggggggcgtcacggagataaaccgcgactcgaaggtgcaactcctgtcggtccttgcggcaacggttgatgtcggaggcgagaaggggccgctcatggtcgcccttgagcgggtcatggcgtcgctcgtccgctgctaccagggcgagcagaagaaactggaactgcccaggctatggaactgagcggatacagggcaatgtggctgctggcgatgttcgacctgcccgttgacacgaagaaggctcggaaggagtacacgctttttcgcaaggccctcatcaaagacggctttacaatgatgcagttctcggtgtatattaggcactgcgcgagcgaggagaacacggaagtgcacgaggggcgggtggtgacgttcctgcccccggacggcgaggtgagggtcctttcgatcacggacaaacagtatgagcggatgcgggttttctgggggaaaatgcgaaaaccggccgagcagccgccgcgccaactcgaacttttttgagttggattcgcggcaactgctcggcctgacccgacttacggcagcactagtgtaaccaatcccagcccgcggtcaatccacaactggccggcgtgccggcggtacgagccgaggagtgtaaccaatcccagcccgcggtcaatccacaactcacgggtcatccggtcggctcgtgcggcagtgtaaccaatcccagcccgcggtcaatccacaacacaattttctccgccggcccgcccttccccagtgtaaccaatcccagcccgcggtcaatccacaacggaactcgtggcggtccgacgccggatgttagtgtaaccaatcccagcccgcggtcaatccacaacgggcgctctacgcttgggcgaggattcgccagtgtaaccaatcccagcccgcggtcaatccacaaccaacgagactccgggggaaccagttaccttagtgtaaccaatcccagcccgcggtcaatccacaacagtcgccgccggaccacaggaggcattcaagtgtaaccaatcccagcccgcggtcaatccacaacagctcaatatgaccaacctcgtactgatgtagtgtaaccaatcccagcccgcggtcaatccacaacccactttccagtcgcccgcgcccgtcagaagtgtaaccaatcccagcccgcggtcaatccacaacacgagatcgtcagccccgcacagtcggcccagtgtaaccaatcccagcccgcggtcaatccacaactcggcccatcgaacgccgtgtcaccccagaagtgtaaccaatcccagcccgcggtcaatccacaactccgtaacagaggtatcc

SEQ ID NO: 857 - DNA, 23717 bp, synthetic construct
  misc_feature 1..23717: note = Synthetic
  source 1..23717: mol_type = other DNA
  variation 15638..15812: note = n is a, c, g, or t
gggatgctggtcgatcagcgcatacagatgcggctgggtaaatttcgggtcatcgccttcattgtgtccatgacggcggtaacacaccatatcgatgaagatatctgtgttgaagtcctggcgataccgggtggcgatctcagcacattttacgacggcttccgcatcatctccattcacatgcagtacaggtgcgtggatggctgctgccagggacgtacaatagtctgagctgcgggcgtcgtcaaagtccgtggtaaaaccgatctggttgttgatgacaaaatgaatagtgccccctgtattgtaccctttcagctcgctcatctgcataacctcatatacaataccctgcccggccactgatgcgtcgccatggataaggatagggagtatcttgtcgtaatcgctgttgtacatgacgtcagccttggcccgggcaaaaccaacgaccacggggtcgacagcttccaggtgggaggggttgggcatcagcttcagatggatggtcttatccttgtccgtctgcacttcactgccataacccatatgatatttcacgtctccgctgcccatggtttgatccagtttggccgtgccttcgaattcgctgaatatctgttcgtaggtcttgcccataatgttggacaggacattcagacgaccgcgatgggccatgccgatgaccacttcctgaacgccatggtcggcggctgtattgatgatggtatccagggctggaatagtgttttctccaccttccagggagaaccttttctggccgatgtatttggtatggaggaatttctcgaacatcaccccctggttcaccttttccaggatacgctttttcttgtccagtggaagagggttgaggaattttttctccatctcggtggtaagccaatcgatcttcttctgatcgctgatgtatttgaactctatccctacatgggccgcatagcagctctgcaggtgggaaagtatcttacgtagcgaggtagtgcccagcccgatgagattgcctgcaaagaaactcttgtccatgtcctcttctgtaaagccaaaaaaggccaggtcgaggttggcgccacgatctttgcggggacgtatggggtttgtcttagccaccaggtggcctttattgcgatagcctaagataagacggtaggctcccagttcctttttccaatccactccgtcggaggtggtcagcatcccgtcggcaggctttgcgcccccggcagccgtgtgaacgccattggaagagccattcattccgccggcagctttcccttgcgtaatggcaaagtcaaatccttcaaaaaattttctgaactcaggatccaccgcgtcggggttctttacaaaatcctgatataaaccctcgatataagaggggtgagaattagttataaacgaatagtccttcatagaagcgcttgagcattatttccagaaaaaagtccgcaaatttggcctacaaatatcgttgaaaatagtcatttctacccctatgacagtcattttctcttgtttttaaccatacctttatccgggacaaggtttgttcaccttccttgtttccacccacttacaacggaaggataatctcccaagtgcattttgggcaatttttacgaataaaacccttccgaatttggaatattcatggcatggggctacctttgccgtcctaaaaatgtcgagtaatggcaaatcacaaggcaaccaaaaaagatgtaaggcaagccaccaagcgcagggatcgtaatcgctactatggcaagaccacccgtaacgcgatccgggatctgagggagatcaaggtgcagaaggaagctggcgacaagctgcctgaagtagccgctatgatcgacaaactggcaaaaaaaggcattatccacaagaacaaggcggctaatctgaagagcaagctgacccggaaagtcaatgctttaggtgctactgccgctaagtaagctatcttattttcatcttaatagtgagcattctcctttgggcggatgcttttttgtttttggtaccttcctttccccagggttattccacctggagaaagtcttccagcgcttttacgaatttatcccccagatcacgtatatctgactcatcctcaacggaatggaatttaatttttgtacttcttccggattgccgcaggcttaagatccccacttcgttctgtgccagggtaagataattggcatcagcgggccgccaattcttcattatgctaagaaaggactaatatcttctatctctgtcaccgccaggacgccagccgccacgatctcctctatctccacgatcacccctatccccaccacggtcgccgcgatcaccgccaccaccataaccaccaccacggtcgccacgatctccaccgccaccataaccaccaccacgtccaccgccataaccgccacggtcgccaccgcctctgccgccgcgatctccgccgccaccataaccaccacgtccgccgccataaccgccgcggtcgccaccgcctctgccgccgccaccgccttttgactgctcttccgcctctttcacggccagctttttacctttgataccagcgccatccagggtttctatcgccccctttgcttccaggtcatcgggcatgtctacaaacccgaaacctttacttttcccagtctccctgtcaaggacaacttttgcggaatgcactacgccatacaactcaaacatttcttttagatcaacatcgtcgaaatcagaaggtaaacctgctacaaaaagcttcatgcccgtgaatttggagtaaaaatacaaagatggatgctatctacgctaataatattaaaatttgttctgtaatttttggaatatgattttcagtgcatttgtacgcttttgatacatcataagtgttgctaagggcttgcatttatcaccttaacatattgcagcaataattcattaataagttactatttcaatcgactagtccacgccccctttccgggtggcttttgtctgtgccggccatggcgttggctgtcctgttttcggattcacaggaagcacgcttttctcccgggatgttttgacaggatcttcgctggccatgtatgcaagcgccgctgccaggatcgcattattacgcagatcgtcaaaaacgatcttgtcataggtatcccggttggtatgccaggtatagttaaaataggaccagctcttcgagcttaaggagaaggcaggcgcgcccacggcgacaaaggaggcatagtcggaaccaccgccgccaggcgtacccggaaaatgagtttctatcgaatccctgatctccgaaggcagcggtgcgagccagcgggtgaggtattcataggcatgcaaaaagccctgcccggagagactcgccaccctgccggtaccattgtcctggttgaaaacgacctgtatgttcttaacgatctcagggtgatcttccacaaaagccctggatccattcaacccttgttcctcactaccccaatgtcctaccaggatggtacgtttgggattggggtacacttttttgaggatacgcatggcttccatcatggtaagggtgcccgtgccattgtccgtagcgccgctgccaccgtcccaggaatcgaaatgagcggaaagcagcacatattcatcaggcttttcagtaccctttatctcagcgatcgtattgaaggtgggtacaattccccgctcttttgactcggtgtgcacgctgatcctcggtttgtcacccgcttccgtaagtcggtagagcaacccatagtcttccagggcaatatccacggtggggaccttttttgtatagccgccgaagatcttgtctacgccaaagccggccgaccagttggaggaaataatgccggcagcgcccgcattttccaataccgcggcaagtgccctggtcgtatagcccgtctttttaatacgcagggcccaggcctccgtctgtgccgtacgttcctttttcattttttcaaaggattcctttgtggcccattcctgccagttataatcaggacgtcccgtaggctgaagcatggataccatgacaaatttgccttttacattcggcagccattgctgaaaggcaaaggaatcagccaggtcgggtaggatcaccagttccgcggttacggtattcttccccattcccgggctccaggcgagctgcgtgccttccagcgtccttacccgggggtatatcatatcgatgtgagaaatacccctctcccagcctctccattctccccatttttcactatgtgccggtattccccagctgctgtattttccaatagcccaatctctggcctgctccatctggggagtacccaccagccgggggccaatgacatcgaaaagttcgtgcgccagctgccgcagctgggaattttcattttcttctctgacaatattgtctatgactgcgtcctttagctgggcaacgacgggtgtgaaggccagacaaacgcttataaagaggaggtaaagcttttgcattctctaatgtatgaaatcctatttataataaaaggagtccaggaagagaaaccggtttgagtttttagcctgctcctgatgcgcattcctgtcgatgatcatcacattgggtgtaccgggctgataggccgaccatgccggcaggccctgtccattagggtcgcccgtcctgataaaattgacaaaaaagccctgcatgatctccgatgttctatagtcatccgccgtccatgcatagatgttatacaacgtgaggttgccaagcgcataagcgatctctgccgaatgaggggcaatggggaagggcggagttctggccggcgtctttgcatccgcccacggaggctgctgttgcgcatagagatagcggtagacaggtctacctcctgtccttgcatgcagatcgatccatttccacgtgctataacccagaaatctttcggtagccaggtccgtagccgatcttagtacttcatccctgttcgtggcgggataatttttcgcagcttcttcggcgctggaaccgtatatttttagcaacgctgaaaagtaattggggacggtaggttcgttatctcctatgatatcattccaggatacttccgtggcattccagccggccaagaggggaacacccgcctgccggcccgtggtaaatatctctcggggagactggggcagaaaatatccgtcaatgatcgtggaaaaatgaaaacccgatctggcagcctcctccatcaactgttcagcgggttcttcccgcaaagcgtcaaaagatgtattcagagcatttgtaaaccgggcgcccatctgttctgccatattgagtgtaataggtggtgttgcccccactatcgacccgctttctccgatggcgccattaaagagtccttttgacaagggagaggccatctggacactgacggacatcgagcccgcggattggccggcgatagtgaccctggcggtatccccgccaaacgccccgatattaatctgtacccagcgcaaggcggcctgctgatccaggtagccatagttaccgctgctatgatgggatgattcgtcggtgagacgaggatgggcgaagaagccgaatatcccaagcctgtagtttacggtaacgaccactatcccttttcgcgccatggaagcaccgtcataacgcacctcggacgcatcacccgcatataaacctcctccataaaaatataccaggacagggtgttttttatcagtcgatgtattaggcgcccacacgttcagatagagacagtcttcgctatatttcccgctgcgaaagagcatgtccttgaactgagccgtttgcatgggacggggagcaaaacgcaaggccttacgcacacctttccagttctttacaggctgcggctccttccatcgaagatcaccgacaggcggttgtgcaaaagggatacccctgaatatccgtatgtccccggagtccagctctccttccagtatgccgttggcaatatgcacctgaggtgcggattgggcatagcttgtaacaagggccagactcaaaaaagccaggcagtaaagttctttcatggctgtccgtttgattaatgttgactgctgtattcctaaagtacagattttcctttttttaatcacattcattaccattaatgcataattaacccatccgttaaccggtctggactactttcctaacattcagctgtaacaaaaaagagatcaaaaatgcagacctccccggcgcctcacccagagccgttgcggcctcccccgtcggcgacgtagtgggtaaaataacggtgggttatcagggctggtttgcggcgccgggtgatgggtcgcccattaatgtgtggtggcattggagccaggactggggtcagccgccatctcctaccaaccaggtcatcaaatgctggccggatatgcgggagtatacggctacttttcagacggcttttaccaatctcggcaacggtcagccggcgacgttattctcctcttacacacagcagactatcaacactcattttttatggatgcagcacaaacctatggtcgtaaattctatattatgtatgatgtcagcggatggacgaatatgcagtccgagatcaagacggactggaccaacaagatgtcggccctggtgtcttcatccgcctatgcccggcagaatggcaaacccgtggtctgtatctggggttttggctttaatgacaacaatcatccatggagcgcagctgtctgccaggatgtggtaagttggttcaaaggtcagggctgttatgtcattggcggtgtgcctacgcactggcgcaccggcgaccaggatagccgtcccggatatctgagtgtatatcacagcttcaacatgctgtcgccatggatggtaggcaggatcgggaatgtctcggacgtggataattattacaacaatacggcgctggcggaccaggccgactgcaatgccaatggcatcgacttccagccttgcgtgctgccgggggacagcggtcagcgcgcccatggggattttatgtggcggcagttctataatatggtgcggctgggcgctcagggtatttatatttccatgttcgatgaatatggcgaaggcaaccagatagccaagtccgctgaagatgcttccatgaaacctacgaattccaatactttcaccctcgaccaggatggggtccactgttcttcggattattacctgcggctatcggctgatggaggcaggatgctgaaagggcagattgcgttgacagctacacgaccgaccccgccggtggtaagcggcaccacgggcgtgaccttctatcaggatataaactacggcgggacagccagtcagctgcttgcaaaagggagctatacgttgtcgcaattggcagcaaaaggcgtaccgaatgactgggcatcctccgtaaggatccccagcggatggacggtgatactatatcaggatgataatttctccaggcagtcatggacgctgacgggcgatacgccaagttttattacgctgaccccgaacgcaaatgataagctgtcttcgtgtaagatacaatagccataccatcgcttgttttcaggccccgtcattcagctggcagggccttttttgttttccccttcaggcaacggatctgcgatccctttggtttgccggaccaggggattatgtttatcttggcggcgtatgaatatcagcattcccatcaacagaaaaagattcccattcgctgttgtagcatatcttctggtcactgttctttttgtattcaatctgttgtatcgctgggacgcgatcgaaggggcatcgggacctacggattggatcttacgtatcattcccatagggtttgctctttttatgaccattatatccctggcagactatataaaaacgctgtttgataaaaatgcgtcccttagtatttccgaaaggggaatagatgataacctaagccttttttcctgtggggagataccatggaatgagatcctgggcgctgagatcatcaaagtgttcaagaccgatatgctcattgtccatattcttgataaagagaaatatatagcaagacaaaagccgatcgcccggctggtcctgaaaaggtttttaaggaaatggggctcccccgtcgtgatctcggccaaacggatcgattatgatctgcaggagttgaaagaggtgatcgagggaaggataaagtaaattactttttcgccggcttaggtgatgtagagttgagtccgtctatgtgttcaaaaagattggggtcgatatggttccataacgggtccaaaataaaatcgacaccctcccgtcttgctaatttggaagcaggaacaaaatcttcatcaccagagatcaaaacgatttgatttacttgtttttttaaagacaaggaagcaatatctattccaatcttcatatctatacctttttgcctcatttcgtaaaatacatcgacctccttcacatcgccgagagaaatctcaccttttaataaagcttttactttagaaggatatatctgccagacgccggaatctttaatatgccccaaacgaagtgctactttacgctttttcttaagctcttcgaataattcaagacgtaatttatagatatccgtcttaccgaggtcaatggatttgcctgagatagggttatgtattctcttatttaacggagagcaatcataatagaaaattctatacagctcataatttggaggtacgtgcttcatagcagctttacaaatattcttcgctattacttcagcgccatggattgcagctccactataaagatcgtaatatcgctttaagaaaaatccgccgtcgataaggacagctacagttggtttcataaaaaaagcctttgggttcgcttctcgctatcgtttgagagggaaatgccaaaggcgctatcagcaccaaagataaatacattcccaattcacaaaaaataaatatattttcactgcagtataaatgcagtttcaaaagatcagtaccgtggaaaaagagcctatttttacgtttatcgtgatcaaagcccaagccacggacagatcattagtaacctccatgctcacccaatcttttgacgacaacagactatacaccgattaattattactttgtcggaaaattttacgccatggatactattaccgacgacttcatgaaacaaatgatgatgaccaccaaaccatatacgatggtcatcctaaccaagggcccccatttcaacaggccggacgccccgggcatcatctgggaacatggccggcggaatttctcccttcgtgcggaaggtcttctttctgttgtatttcccatccgggatgaaagtgataaagcaggtgtcggggtgtttaatgcctcggtagaagaaacaaaaaagatcatagaggaagacccggccgtaaaagaaggaatacttagttatgaggtacatatgacaagaagctttccgggggataaactgccgggatagccagatctcttataaacaacaatcccatctcttggatgggactcctgtaaaagtttacactacggaataatccttattgtgatttgctttagtaaagatatcgaaaatcattgtcaaggcaaaatagagaaaatgtataccatctttgaaattagcaaagggggtgagtgtatgaagtttcatcgtacatctacagttcgaaagaccgtcatcctacaaacccattccctttgataattaacccattgtgcaaggttttgcaggctatgaacggcgggatttttatttgcttcaaatatgtttctgaaaattgattttgccatgacaaagcaaattttaattttaaaattcttacagtaccgccattatctacttttagaggtactgtgttgtgatttgcgtcattaaccttaaactcttaccatggaacaaaaaccacctgccaattacattctcggcctggacctgggcgtatcatctataggttttgcagtcgtgagatctataggtgatcagccaggtgaaatcctcaaattgggcgtaaggattattccccttagtaaagacgacgagacagaatttactcaaggtaatgctatttcgaaaaacatggatagaaccctcagacgcacgcaacgaaaaggtcttgaccggtaccaacttcgccgcaaagcccttattgaagtgctgaccgcaaataacatgatgccggacagacgtttgttgttggaactctctccgcttgaaatttggggcctacgcgcaaaagccgttactgataaggtttctttacaggaagtgggaaggatcttactgcacctcaatcaaaaaagaggatataaacacagcaaatcagatgaggctgaagataaaaaacaaacagaatatgtacaggaggtaaatgaacgttttgccagcatcaaagaacgcagtgaaaccatcggtcaacatttctatgcccaactgcagcaatacttttccgtcgcccaaaaaacagcaccagcttaccgtattaaagaaaaagtttttccacgtgccgcgtacatcgaggaatttgacgccatctggaaaagacagcaacaagaacatccatctgtcttatctacagatttgtacaatcaaatacgaaacgagatcatctactatcaaaggcggctcaaatcccaaaaggggctggtaaatttttgtgaattcgagtcgcagacctttacgactcctgaagggaagtcaatagtagccggtccaagggtcgccccaaaaagttcaccattgtttcaaatagagaaaatatgggaaagtatcaataatattctcattaagaacagaaaaggagagctatttgaaatatctgcggcccatcggcaaggaatcttcgatcatctgaataacaatgaccggcttacccagacagacctatataaaatactgggcattggccgcaatgacggctatttcaccaatgagctgatccggaaaaagggaatccagggaaatattaccaggatggcgttcgccaaaatcctggggtcagaccatccttcattacaattgaacttgcttttgtcatcaatgcagcgtgccgacacaactaccggggaagtaactgagcagcccgttgttgatactacctttgagaaagagccattgtttagactgtggcatattatgtattctttggacgaagaaaactgccaaaaaaaattagccaaggaatttggattcgatgagatcactgccagaaagctttcttcttccatagatctaacgaaaggtggattcggtaataaaagtaccagagccatgcgcaagatactgccttaccttatggaagggtacacctatgacaaagcatgtaccttagcgggatacagccattccgattcattaacaaaagaggaaaatgaaaggagggaattgcagcctagattaagtccgttaaggagaaatagccttcgtcaaccggtggtggagaaaatactaaaccagatgatcaatctggtaaatgccattattgatcaatacggaacgccctcctcgatccgcgtcgaacttgccagagaacttaggcaaagccgcgaagaaaggaatgacgcttataataacattaacaaacaggaacgggaaaacaaaaaaattgaaacactattgtttgagcttccctatttccagaacaaaaaaagcgtcagcaaacgggatatagaaaaatataggctttgggcagagttccgcggtatttcgccatacgaaccaggcaaatcgattaacctgagtgagttatattctaatgattacgacattgaacacatccttccccgtgctttgcgttttgacgattctttcggcaataagactatttgcccaagacgatacaattccggtgagaacgccaaaaaccggtcaacggcctatgattatatgcaatataaaagaagtaaggaagattttgaatcatacctgactctgctagaatccgcttataacgaccgacgtatttccaaatccaaatatgaaaaattgttgatgaaggagcctgatatcccaaatgacttcatcagcagacaattaaatgacacaaggtatatatcccggaaagctataggcttgctgtctaacatctgtcgaaatgtctacagcacctctggaagtattacgcaacgcctccgcacattgtggggctgggatcaaatattggagcaacttaatcttccaaaatatcaacaggttggtcttaccgaagaaaggcaaataactcgaaatggtcaaatgcatgtcataaccagaattaaaaactggagcaaacgggacgaccatcgtcaccatgctatcgatgctttagtaattgcatgtacaaagcaaaaactcattacccgcatcaatgcactaaatgcccaacacacaagagaagagatactaagtgaaattgccggcatagagtataagaacaagttatcgctattagataactatttattttcattcaagccattcgatactgctgaaatcgcccgaaattgtgaaaatataaatatttcattcaaacccggcaaaaaagtggccactttcagtatccggaaaataaagaaaggaaaaaagaaagtgccgattcaaaggcatatcattacgcccagaggccccttaagtgaagaaagtgtttatggaaagattaaaagaaagataaccagaaccgttaaattagataagagttttcttactgtggacaacattgcagatgaaacggtaaaactgatcattcgagatagactttcccaacatgaaaatgaaccatctaaggcctttggcaaccttaaaaaggatccaatatggaccgatggaaccaagacaaaatcaatttctcaagtcgatatctttgattacgtcgaagagtatgtcattaaatatgacatcagtaacattactgccaaagacgttcaacatatcgtcgataaacgaatccgggaaatcctggcagatcgattacagcagtatggcgacaatcataaggaagcatttaaaactacggtttggctaaacgaagaaaagaaaattcccattaaacgggttaggtgttatacaggacttaaaagtgattcagttgtactgataaaggtatcggataaaagctggggtatcgaatatgagaaatatgttaaaccggggaataaccatcacattgccatttataaggatagagatggtaaactccaggaacatgtggtatcgctgtggcatgctgtggaaagaaaaaagtatggcctgccagtggttattaaagatccttcatctgtgtggactgatatattaaataaaagagaactacctaatacatttctggaaaaccttccatcagataattggaaatttcaaaccagcatgcaacaaaacgaatgttttgttttcaatatgaatattgatgagttgaaaaaagctattcaaaacaaagagtacaaatgcatagctccgaatattttcagggtacgaaaattaacctccggtggttattggtttaaccaacagtttgaaacgactcccagggagagtttggaagacaaaagatccgggcgctgtatccaggccagtttaaccagcatgagtggaattaaggccagaataaatacattaggagaaattttccttgaatgattggccttctataaatttgaaaaagatcaggattttctcaataaatcagtcagaatcaccgttacatacatataagccaattcctatgataaagcgaacgctttatttcggttctcctgcttatttgaagaccgaacacgaacaattggtcattataaacaccgaaacgggagagctaaaatcggctccgatagaagatattggagtagtggtgctggatcatcagcaaatcactatttctcaggctcttattgctaaattattatccaataatgttgcttttattacctgtgataacacccatcaccccactggccttttacttaacctagatgggaacaccttacaaagtcaaaaattccaagcccagatagaggcctctattccgctaaaaaaacagctctggcaacagacggtttcggctaaattgaataatcaggcctcaatgttagaagccataaggatacccgcaaagaatcttcgcaattgggcaacagaagtcaaaagcggtgatgcggataatcatgaagccaaagccgctgtctattattggaaaaatatattccctgacttcctcgaattcaagagggagcggtatggtccgcctcccaataatttgcttaattatggttatgccattttaagagccgttatagctagatctcttgtaagttctggattattgccaaccttgggcattttccataaaaatcaatacaatgcatactgccttgcagacgatatcatggaaccctatcggcccttcgcggataaagtagtggtaaatatcgtccgaatgaatggtaaattcctggaaatgacaccgtcgatgaaaaaagacctacttggtataccagccctggatgtaatgataggcaatgaaaaaagtccgctgctagtggcagttcaaaagacaactgcttcattagcaaaatgttttgagggaaaacaaaggaaaatactatacccggaattcatttgatccgcatcgtataagaccaggaattctatgcaaacccgattaaacgcatatagagtattgtgggtactcgttttttttgacttaccgacggaaacgaaaaaggagcgtaaaatatatgccttgttccgtaaaaatatcctgaaagacggctttcagatgtttcaattctctatttatatgcgtcattgtagcagccgggaaaacgctgaggttcatataaaaagagtgaaaaaaattctcccagaaaagggtcatgttgggattatgtgtattacggacaaacagtttgggatgatggaaatcttttatggacatactccctctaccgctgctcccccgatacagcaactagaaatgttttaatggaggtaataggatcaaaaaaagacaaaaaatgggggatttttctttctaaaatcccccttaaatgcagtacagataagggtttaggccaaatccgttgtcgatgatctaaggtaccaaataatttgaaagcaaatcacaacaagtcaactgtctttgtatcatatgacacagttgtcgatgatctaaggtaccaaataatttgaaagcaaatcacaactatgaactggcccagcataatgccgtgaatgttgtcgatgatctaaggtaccaaataatttgaaagcaaatcacaaccgcgtcggcgtttgtttgcgcgaatatgaagttgtcgatgatctaaggtaccaaataatttgaaagcaaatcacaacgggacctgctatagtgccggcttggctggtgttgtcgatgatctaaggtaccaaataatttgaaagcaaatcacaacatttgtttttttcgatgaattcatatgcgtgttgtcgatgatctaaggtaccaaataatttgaaagcaaatcacaacaaccagttgttgattgcttctgtgtgttcggttgtcgatgatctaagnnnnnnnnnnnnnnnnnnnnnnnnnnnnnnnnnnnnnnnnnnnnnnnnnnnnnnnnnnnnnnnnnnnnnnnnnnnnnnnnnnnnnnnnnnnnnnnnnnnnnnnnnnnnnnnnnnnnnnnnnnnnnnnnnnnnnnnnnnnnnnnnnnnnnnnnnnnnnnnnnnnnnnnnnnnnnnntgaaagcaaatcacaacccgccggagccgatagcggttgagttggcagttgtcgatgatctaaggtaccaaataatttgaaagcaaatcacaacacccgctgaacgcgctacaggatcgtttgcgttgtcgatgatctaaggtaccgaataatttgaaagcaaatcacaaccgaagacgcccagtacattaactgttatttatttattgaaaaaaccgtccattcattttccaatcacccctaaactgaagcaaaattattttatctccgccagcaattccataacaaatcgatgcaagctcgtaacaacaacacctttgcttgttgtgaaagtgtcgctctctggagtaataacatatctatattgcggcgacagatcctccaagcaactgaaaaatccctttgaaatggaaggagcattgttcaacttaatttctatacatgccaatggagtaatccctttcaccagcaccaggtcacattcagcccccgcttgtgtgcgatagtaaaatagctcgataccggaaggtttccgctgatatatctgctctatcacatatccttcccaggaacctccaactccgggatgtcccaataacgaattataatccggtatgttcaataatcgatgcacgatacctgtatctcgaacatatactttcggagattttatcacccttttcttggcattcacaaaccagggaggcaaccgcctggcaatatatcccccttctaaaaaggataaatatcgaagaaccgtaggcgcgctgacccctaatgaacgcgcaaatacttcagcattccatatgttaccatttgtgtgagccaacatgctccagaaatttcgcaggatcaccggggaaaggtccactccgaataaatgtccaaggtccctttctatataacttctaatgaagtcatccaaccaatccaggcacgcttcgtctgtaccagccagcaatgcattcggaaaacctcccctaaaccagctttttttataatcattcttatcagacaattcggtaagtccgatgcccgacaattccatgtatgcaattcgtcctgccagagattcggaaactccattcaccaatgaaggagatgcagaacccagaagtataaaccgcccggcaatcctgttctcatcaatcaacggtcttagaatagaaaataagtccggcttaagctgaacctcatcaaggataatgcagatatcaccaagagaatgaagataagcataggcatcttccaatttttgtctgtcttgaggattctctacatccagataaagagactgtatcctgttttttgcaattgttttagcaagagtagtcttccctacctgccgggggcctagaacagctattgccggcgacctagtaagcgtactttcaataatcgattgtaaaaaacggtatatcattcatttcaaagatacaatatcctagtaaatccaaagtttaatttttgatttactaggtttatgattactctttctaaagagtagtttttataatcacataataatcatagatttattgcaccaccttcaccgtccccgccccattatacgaatgatattctccattgtacattgcatccgcccccacaggccccatccggtaaatccccggtgacaccgcccgcacggcatagtaataggtctgtctgttgctccgctggttgacaaagaaattgatacgatcatcccgtacatccagcgccgtaggcgtctccgcatccttgatccaatccatgccgggaatatccttggtccgcgggttctcgatctcaaagcccgccggcagcatatccgtgatcaccacattgtcgatgtccgtgctatatgtcttctccagagtgatctgcacaatgacaagatcgttctgatggaatgtattgccggcaatggggcggccgttgcgatcaaagaaacgtttgcgcactttcagatagctgtcctcttccttataagccccggtggcgctgatcccctccacctgccagaaataatagactttcccgctgccgcgcgtaacgatctctacctttggaactccggaacccgaacccttcagatctttagaagacagcttcagcggactaccattcatcgaacccaccgtcctgccgtctaccttgacgtctgccgtagccgtggaccccgcctcgcgtcttgccaccttgcccatgcccaggaaactaaaagccaactcctgcgtcgtgtaccagtaacgctgtttcagtttggcggagatatgtctcaccatggtctgtatttgcgggttatccggatcggcatccacgagtacattgagcgcgatagattcatccctgatatcggaataaaagctgccgcctgtttgtgctaccgactcttctcccgcaaattgagaaggcaggaactccttaaaacttttcttgtcccccgacagcgcataggcagctgagagcaggtatttagcgtccaggctcaacaagcccgggttcgccttgtagtagttcatcacactgacattcggtctgcctgccagggacaggacgtacaggccgtaagcgacttcttttggcgctatttttttattctggtcgcgattgtaataataagtaatggtttccctgttcttgagacggctgttgatataacccagcattgtctcaagcaggcccttatccacgtcaaagcctgccttttgcgcctccaggaggaaatgtgccgaatagatggtagcccaccagttctcagttccttcattgtcccacagtgtgacagcaccgctatacagttgccgcatcttgatcttacggatggcttcctggacattcgaattggccgaggcccgcgaagccgcattgccttgccgcatcaggtccgccaggtcgctataatacaattgagggaaggcggcggacaccgtctgttcggtacagccataggggtattccaccagccagttaagatattttgacaactctatcacagggctcctgctcaccaggagctgataatccacgctggatgggataaagtcgccggcattccaattgatcgtttgcgaagcgccgcctgtgacagcgccgccgtccgtgatcttttgcaagggggcggaaggccggacacctatctccgtctcatctgtaaagtgttcgcccatggcagccacatccaccgatattttaccggtgccgatggttggcggagccaccagttggaataccgcacggccttcactaccagccgcaacggaaagggacatatgatcgtcgcctgccacacgcacagcgccggacactttcaatcttgcctccgcactcgcagcagaattggtcgtgttagtaatcgtcaccggcatggtcaccgtgtccccgggacttaggaacctgggcagcgccgaactcagtacaatggggtcggccaccgtcatcgtcgacgacgaagccccaaaacgctggtccttgtacgccagggccatcaatctcacctcgccggagaactggggtatatcgaattcaaactctgcttcgccgctgccgtttgccttggcaataccactccagtaggagacgatctttatccgtttggcaggcatagggttcacccgctttttcatatcgccttcagcatccccacccgtactgctgaggctgggccgtacttcggggaaaagcaaggggtataggtcataaccattgacctccagggcacgcttggcataaaaatgtgtatagggatcgggagtttcaaagctggatatctgtaatacgccattgtccacggctgccaatgttaccatgctgccggcagcagccttgacccgtaccttctgatgtgtatgggaacgaacggccttctgggcttcaatacttacggcgatcctgcggtctttttcctctactttcaccgattggtaaccatgcgccaccgtcagggggatatcggacagctcgtgcggcttgatcaacgtagccgtgatatatacgttggggatatcgtcgacagacaagggcaggtcaagcgaagcgtcccgtttgtccacgttgacatactgataggatactaccttatccgtctccatggtcaccagcattcggccgctgaacggggttttaaaatgggctttcactggctcgccggtataataggagtctttgtccagatcgatgtctatatgtccttcattattgacctcgaaggaagtgttgtcaccgccccaggatccatagctatagaagctccggctgacataggcgttggcgccgggtatggaaacccgcagctcatagtcgccgggactgcggggtacaaaggaatagcgggtgctttctccactgatagtgacaaggctggaggcaattaccttggtttcctgttgcgattcataccggaaatagctgccgctcttggtcaataccgtcctgtattcacgttttatcacctgcacacgcgccgaagccccgttcagcactttttcatcgcggtctaacgcgatcagggggaattgtatggcctggttgagcgcatagtaagaatatccgtcgtccgacaccccgaaataaacgggctgtgtatatatatcgacgctggtgctccggctgacaggccgtcccgtttcgtcaaagacggttgcaaagaaggtagtctgcaacagacccaggttcttatacatctccggcacctcgtacttttccaccgcattgccttgctcgtccgtcttgccttctttcgtatccttattaaaaagggtgctttgattggccaggctgaagttatagttcctgtagttcttcgggttgaaagtcttctgccgggtctgtacctcatattcatatttacggttggcggctggaggtccaaagaagttcaccgcatggatgctcaatctggcaatatcgcccgcctccaggaatggtttatccagtttggccgtcaccttgattctgtccggtacgaactcttcgatacggaagggttgtgtagccagcaatacatcgttggacgtatatacctctagggagtaggagcctgtgatggcggattgtgcaatgtccatactcccttccagggaaccttgctcattgaggctcttgcggaaggtcttcagttcctttccattgggcagcaggaatttcagcttgacgggcagctcacccggcgctttccattgcctgtcgcggatgatcacggagaagttcagcttttccccgggacggtagatatctctttccgggtagataaaagcgtccagtcccgtggtattgctatgtcttccccccacttcaaaccgggaggtattgacctttgtcgtgccgaagggaagataattgaagtcgtccgccgtcttggcgatgatcatggcaggtttaaacccggccaggtccttacgggtatatgcgatctccgctacgccatccgcattggtagcgcccatgcccagcaattggttgttcgccccatacgccaacacgttgacgccggccagcgccgccgccgtcttgatggagttggcaaagaccagcattttttcgctgccttccctggcgataagaccaatgtcagacaaagacacaaatctgttgtcccggacccaatagtctttgacactccggatcatgatgtgataaatacctttgaactcagggagtttgtcggcaatgctgaagttgaacagtctgttattaccgctcttgggcagagaacgtgtgtccacctcctgttcatagatcacatctcccatcgtaacatcgcctccattgtcatatccgccgtaatcgtaaccgccttcttcatccccgtccccggaactgggtctgtttgtctccttgggtgtatacccataccgctgcgccatgagcagattgttctcatagatctttgaaacgatgacctttacttttgggacattgatgatctttacttcgatattctgggctcctttgccggaaagatagacgcccttgctgttgacaaaactgacagagggcgccagttcgccaaaggtgatattcgtattgtattcctcatgcagtacgccgccgatacgcccgcggaggcccttggtcagggtaagcgcatagctctttgattgatcaaaattgtcgctgctgatgataaatccgttttccgagggttctaccgtgaatttgacggccgggtccagcttgataaaagaggccaggttcgctgccaccacctgctggctggtcaataccttgatcgtccccgtcgtcccgtcatgctccgtattaacgtcattgatctgcaggacaaagggagaggggatggtggacttgctttccagcttttctttcagaccattaacgccaccctccggcacaagccctttgtcaatagaaatgacagcttctttattcttatcctccattttcaggttgagcagacggaccgtgatcttgtcgtcggtggaaagggtttgtaaagtatagctcaccggctggccttccaccgcgatctgtaacttctctttcagggaattggggttgacagggtagttgaattgcaggtcgacctgcggcacagccgtggtgctgttctcatcctgcagcacccaggaagtattggtattgtccagtttgaggtccggggtatgaaacaccaggtccgcgcccttgttgatacggccatagctgctgtattggagaatatcgttcttcagggtagctttgaagctcgtagccggggtcaggggctgagccggagagaacaccagctcgtccggatgctcccagcgaaaccggccggggatctttggttcaaagctgatgtactgagtggagtcccatcggtcaagaagggaatctttgaccaggtcctggtcaaaccggaagacgaggttgccaagtgcaggcacttcgtcacgggcattggtatattgcagactgacggtactgcggttgcaggacgtcatcaggaatgcggaaaacaaggcggctaaaagggtggttgtagtaaaaccagatctgatacgcataggaggtcagattgaagatgggaatgctttattattaataataaaaactttgtcaagatacaataaaatacatgccggcagccaaacgcacgggataaaaaactaaaagtattttaacgatgaacctaaggaggaattgttggagagtacataaattggaggaaaatatcctattgtgaaggtatattacggatatggatattgtcaaggggggctgcgataagaatttgttaaagccgtaaaaatgaaaaaactcttttttaatacacgtctgcgacggagattggtacggaccctggccggggcggcggccgtttttctgctttttcttctcctgaaccggatcttccccttacccgacaagatagaatattccatcatcatcgaagacaaccagggtgaggtggtcaatgcttttctcacccgcgatcaacaatggcggatgaagaccgagttgggggagatctcccccttgttgcgcaagacaatcgtggaaaaagaggataaatatttttactaccatcccggggtcaacctgctggccatgagccgggcattttttatgaatatcctgcatatgcgacggacctccggcgcttccaccatcaccatgcaggtggcccgtagcctggagcccaagcggcgtacctattggaacaaggtccgggagatgttccgggcccttcagttggaatggaaatacagtaaggacgagatcctgcagctatatctgaacaaagtaccctatggcggcaatatcgaaggcgtcaagtcggccgccatcctgtattttaaaaagaaccctgatcacctgtcgctggccgagatcaccgccctctctattatacccaatcgtccttcttcgttggtcatagggaaaaataatgataagatcatcgaagaaaggaacaaatgg

SEQ ID NO: 858 - DNA, 16073 bp, synthetic construct
  source 1..16073: mol_type = other DNA
  misc_feature 1..16073: note = Synthetic
aggcttgcgcttcgagtatcggccagccgaaaccttcgatccacgagggaaaaaggaggcatttggcatgagcgtagagtccgcgtagggcttcgtcgctaatgtcgtgaaggtaatggatgtgattgcttaagctggtgcagtcgttgcgagccagttgggcttcggagaattttgatccgatgatcgcgagttgggcgtgaggagttttatgcgcaatcgctgcgaagaggcgaagcacggcggctcggtttttataccatttctctccgccgatgtggacgtagatttcgctgtgatccgacagcttgagtggattcgctaactgattctgaagttcagcgcgggaggtgtgcgcagcttcgataaaggagtcgtccagtgcatttggaatcactggtctatagttcggagagtcgcccacgatacgggcaacatcgtcgcgagtcgccgccgagacgttggcgatatggcgactgcgcttgagcccacgaaggatcatgttctgttgctgtttgccagatgcgcgtagcgggttctgtggtatttcgcccaacgctgatctgacggcgagtaggtcgtggcaggtgaccagatgcatttctttagtcagtccactggtgtagatggcgttggaatgatcgcaaatgtggacgatccgaggctgtgcgatccggtggatcgctcggcgtaaaaagatgggggcgagtatgtatttgtcgaaataccccagccactttccaaagccatacgtttttgcgcccagtttgcctacgatgatcggcgggtggaaaatgtcgacggaaagcccgcactcacgcaaacctctagcaagtagctcagtgaagcgctgcatgctccgctgcccgtcgggcagatagttgccgacgagtaaaacatgtgcacggttcgctatgcttgttcgcggcattatttagtagccgcgtagagggcggcttgctcttgctcgagcttgaggattttttcgtagacggcctgagcatcggcaatactgggctgaagctcgtctaaattatagcaaccttttaaagcagatttgatgtggtctcgtttcgcatcgggggagaggtggaacccaccctctttgaagacctgttctttgtttgcctcactgctctcgtatagggggaagttggtatgatagcggcagtttactctgcggatgacttctccatagtctttcgtcactagattgaagtcggcgatgatgacaccgtcgctgacgcgtagcacgttctcataaaagcgtcgatagctgtagagattgttcattaagaaaattttagcctcagcgagcagcttatcggacataccccgatcatgaatctgatagtagagggcggcgagggagaggcaggcatcttttggtgcgcgcaccaaaaccatggtgggcacacctagctgcactgaacgaataacttgcgcgtgcgaatgcacgtgcgtggcgatactgtgttccttatcttctgcaaatcgaaacgcagagcgggcaaaactattcccagaacgtggaaaaccttcgatcgtgatggatgaatccgcactcacgacccactgcctcgaccagtgtcgaatccgcttcagcctgataagcccgatgtagagtctcgggtagtcttcgaggaagtgttttatactagctttgttcattggtagtggtttcgggtctgggcactttttgcgagcgcatcgcggcgatcgttaagccaatcccgagtaccgtaaatccgctagtggttgagttgccgaattgcccaatcagcagattataggccgttgcagagagaaaaatcaaccccatgccgcttcctttccggaatgcggccagtgcgaatcgaccaagcgcgcaggtaagccaaacacgccatgcgatatagagcgtgcccaataagagaccaccttcggctgtcagccgataccactctccctcgccgaggtcgaagcccttttcgccggtcaagagcttcgcgcccacttgagtgcccgctcccaagcctacgccgagtagggggatgtcattatcaatcgagaagggcccgatgaattcgtctatagtccttccaatgatagcgccaaatgcgccgccgtggcgttcggaggtggagcgttcccagcgggcgaagaaggcttctcgggcttcgtcgaagaccggaaactgacctgcgatgaatatacccacacagccgattaaggcgattcggaagtaacgtgaaaaggctccgcgctggaaggtcgagctcagcatacccgtggctatggtgatggcgacagctagcatgagcgcccggctaatcgacacagggatcgcaataatcaatgcgatcgaagcgccggctagcagaagtttgccgtagcgcttgtgctgcgtgactccagagatgaggaaggctgccgtgattgtgtaaaactgaacaatacctgtagtgaaactgaacgtgccgggcgggcggaatttgccccgagctccgctgaagccagcacttcccttgccgccgacgccttcattgacccatgaattctgcggggagttgaattgtaagacgatgagtacagtcatgccgatggcacaccatagccaaaaacgtccgagcacgatgacttcgtcctgtttccaaaccatgcccatgatgaaggcgaaggggatgtgaaagtaattcgctcgtagcccaaagagtccgacgcctagatccccgtggccgaacagtagagtgatgaagaaccacgctgccacgagcacgcctccagtgactgtgtatatattaaaagggaagcggttgttcaccatcgcccatgcataggtgacaaggacgacaggatctcgcgccagaagaagggcatccgatagactgggcaaaaaccacttacgcaaagcgccttcaaacaccaacaacgcgatgtaagtgccaattaaggtgtgatacaccctaagctcttgcttctgttttggcgactgggctggtttattcacgtactagaatgagtcctctaattgttctgccaaatttgcggccatattatccttatagcgatgccaagtatgaaattgtgctttttcgactgcggcgacgcgcatcgtttgtaggtcgtcggggtttttgtgaagatgttcgagcttctctgcgatggcttggccatctcgaatgggaacgatgtaaccttctttaccatccgttattaaatccggtgctgcggtgtgtgtcgtcgtgatgatgggcaggccttgtgagagtgcctcggtgagcacgaggccaaagccttcaaagagtgaagggaagacaaacacgtcttgtgtggccatgagctcgagaatttgcgagtgaggtaggctctcgatccatgtatgtttttgtagggcttgctccatcggcaggcagggcgcgctcaggcgaccgaccagtgttagctcgacgcgatcgcccatgagttcgacggcatccagcaggtaggagaggcctttgcgctgtccgaggcttccgacaaataaaaccttcagcttcgcgcctttgggtcggggttgaacgacatcctgcgcattgcgggtgggcgggcagccgtatggcacgataatgggctcggggaggtcgaagggggcttccttaagagtgtctgcagtgaactggctcgctacgatgattgtctctgcgagttgaagctcctggtcctttcgcgtggttttttcgtcgctatcccgcagtgcgggcatcgtgtctgcccactcgggtttgagctctgcctcttcggattgtatccgtctcgccgcgcgccagtagccgatcggtagatcatacatacattgcacttgtctttccttggcggcagtgaagcagttgagcgcgccatcctcgtaggcgtagatggctgccggtagtcctggagccgagcgaatgtgtcgggctacttttagatctaatttacgatagacttgatcgacgcagaacggccccgtttcgtgttggcgaagtgagcccatgccgggtagcttctggctgaggagacgcatcatttcagcaaagggctgcaagcgaatgcgcttatgagaaatcccacactgtcgctgctcgaatagcttcttgcttaagagattcgtatcacccttacccgtggcgatgcaggtgtagaacgaatccaaaagctccgcatcttcgagtgcttcgacgagcgctcgcgcaaacgtattacccgtcgggtgtgtgacggcgattttacggttttttggaggactgctcattaatgtttagtctcgttgtacgagctcagtgaaagtcgcgagataggcgtctgcttgcgcatcgattgaaaagcgtgccagatgctggtctgcgttgtctgtcatctcgtcaatgcgcttcgggttttcgattaagctgcggatggcatctgttaactccgttgcgtcgtcattcttgaaagtgattccgcaggcaccgactgcttcgggcaggccgccgccctcagatgcgatcactgcgcagcccgcggcgatcccttcgagcgcgacgatgccgaagggctctttccagcgtgaggggaccaccatgacccggtgacgcgcgatctctttgtgcaaagcatctcccttcatatagcctgtaaaacggatgtgctcgctcagaccgagcgagtctgcctgagctttgagaggctcgagttcggggccgtcgccgataatggttgttttcggatataagtcagactttgccagctgcccgagcgcatcaatcaataggtcggcacctttgtcgctgaccaatctcccaagaaataccagatcctgatctctttccactccgccggaggccgcctgaaaggccgattcaaaaggattgccctggagcttagattcgcagttcagtccctcggtcacgtagcggctgatcgcaatgactttacagcgcttaaggagcatcgctttgatgcgttcctgccaatatttgtgggggtagtggcggaagagcgcacattgtaaggtcactgcagtcggtttgcctaataacaacggtgcccacagataggtgagggacgtattattctgccaaacaacgtcagcccacgaaaccgccttgcagagttcgatttttgagggcgctcgaaccacatcgtagcctaaaggctcggggctttcctcgatcgtttgcgtcaccacgcgcacgttgtgccctcgatctgtgaaagcctcggccatcactctcgaagcggtctcgatgcctcctacgctcggagcgaatacatagctggtgattagaatattcattggctctacgagttatctaaggttcggtgcagactctccgtatgtgtgcaatactctcttcagtttacgagccttccaatagcgaggtaagaaagtcttaggatccatcaagatccggaagagccaaccgagatacatgcgatcagcccacggagggatattggcttggaggccggaaagaaacgcaatcgccgcgcctatgcagatgatggtaggtttgtaatcgagctgttcgcgcaaccagtggccaagtatctcttgtttgccgcctgcgatggcgaggatcacgtagtcgggacgctctgctcgaattttgcttaggagcgcatcgtctgtaacgggactctcggtgtagaagggggcctcgtagaaattgctgctgcccaaggcgaatccttggttctggagaaattcgctggtgctttcagtatgagctggtgtcggcatgacccagagctgcttcggattacttttaaaggtagggtcttccacgagtgccttaatgaactttaggccagagtggcgctcgatggattgccccgtttgcttctgccaaagtaaggctaagtaaccgctatcgatcaagttgatatcggcttcttgcagagcgcggtcataatgtgtgttcatgcctagttccgataacccgggtcccgagggtgccaggaataaaccgcgcgtctcgtgagcttcctgcagcgcacgttctaggctgtcattatagaagtctatgccgagtatgtgtacggttttaaaagaatttggcatgaggtccgtttagtctatatcgcgggcgagtaagatgtcgtccgggctgacgtcgacagtgatctcccgccctaaaaattcgagtagaatttgaatgcggtttttggctgggagctgtgccagcaccttaccgttgagtcccttcaatgagccggtaatgacttcgatctcggcgccgggttcgatgctgagatccggggcttcgacaatgccttcagggatgcttgccttgagctcttcgatgatacgctcggggatgatacgtcgatcgcccaactcaaccatccgggtgataccttggctatgcaccacttgacgggagtgagtgtgatagtggaacttagcgaagatataaccggggaacattgcttcgacgaagcgcttcttccctgtgcgtgtcttcttgatctggctgattcgtgggcagaaaacttcgacctcttcgagtcgatccagtatcgccgcagcgatgtgctctcgcttggtctgcgtgcgcaggcagaaccattctcgtggctcggtgctggtttctgatgtagggtcgtgggacatcgtgatcggtaagttttggaaaataggtcgcaatagggtagtttcaacggtaaaagaacctctgaatggttgcccgagcggcttctttgtttacttgatgcgaatctcattccatatctaagcaggaattggaatttgtgcatttaaatgattggtaatcggacacagggtttacggctgttgagtcacgcgtttgtcgtgctctttatgttggtgctattcagcacaaaactgatgtttggtgtttatgtcttggagcgaatggactcgcagcaggttaacctcccgctctatttcctcgcggtcttagtcgctggagtcttggcgtatcggtataaagaagatcggatcgaagataacgatctgaattcattccgatgggtcggcgcgattcgtaagacgaattatcaaagcatcgtcctcgcactaatgcttttcggtgtggtttttacgacgaaggataaggcgattagccgtttgttcattggctccttcttggtgttgttttgggtgactgcggtgccattgaaccgttttattcccgtgtggatcgcggggatcgcctttcgtggtaataattctgtgcgcactattttcctcggtagtgagaaatcggctcgacacttggaggcctgggcgaatcgccagccgttttacggtatcgatattatcggattgatcacatacgagatggcaacggatctgaagctgaagatgccgatactgggtgaattcatggatatgtcgctcatcatcgatgcctacaaggtggatcaagtcgtgctcctcgagacgcgaggttcagactggtgggtcgattctgttctcgagatctgcgagaaggcaggctgtcgaatcctgatctttaatccgtgggaagaatacttcgaccaagagctgattcctgtcagtcagggggggcacactttcttttcactagaagaagagcctctggaaaatccgatcaatcgagccatgaaacgtacgctcgatatctgtatttctctgccggtcgtcgttattgtcttaccctggctctgcctgctagtaaaggtcatgcagcgtaagcagtcgccgggagctatgttttttaagcaggagcgttccgggcagcgtgggcgccagttcctgatctataagtttcgcacgatgcacgatcgcggcgatgatcgctcgcgagaaggggagcaagcgaagcaaggcgatgaccggatctatgccttcggtgagttcatgcgtaagaccagtctcgatgaatttccacagttcattaacgtgctcttggggagtatgagtgcgatcggcccgcgcccgcatttgatccagcatgacaatgaatttagcgagcaggtaaatatctaccgcacgcggcactttgtgaagcccggcattaccggactcgcccagtgtaagggcttccgtggcgaagtgactgagctcaagctgatcgaagagcgcgtccgctacgatctgcaatacatccgaaactggtcgttatggctcgatctctggatattggggaagaccgcgatccaggtgatcaagccgccgaagtcagcttattaatcgggacgtttgaaacggcgtgcaggcgttttttcgcggctgccagaatgctcaccaccacttgcgggcttcttgaatttcgctccggcgatcttgctcttggtcttgaaggggcgcttgtgtttgcctccatcgttccatttgccatcgccgccagcgtcgttgccgcgcttttggtagccaccgccaccgccgtgctttttcttatagcctccaccgccacctttgtagccgccttttttcttgtagccgcctccgcctccgccaccacgtttcggattcgggtcgaagtcttcgttgtcttcggcgatcttctcaccttcgcgactttcttcattgccaagcatgtcaaacagagcgctcgcgatgtcggttggcgtgtggccggagtcgagtaggcgatcaaccagatcgtcgtggcgtttaaacttatcttcctcgagcagcgctttgacttggttgaagactttatcggccttccgtccctccacttcttcgaggctggggatgggcatccgcttgacgacttgacgcgtgtagcgctctatcgcttcgagccggtagatgtcgcgtccatagacaaaggtcacggacttgcccgagcgaccggcgcgaccagtgcgtccgatgcggtgcacatagtcttccgggtcgtgggggaggtcgtagttgaaaacgatgtccacgtcgtcgatgtcgaggccacgggcggccacatcggtcgccacaagtagttcgacggagccgtccttaaagcgtttgatcacgcgctcgcgattggcttgtgtaatgtcgccgtggatacggtcggccacgtagcctcgggcggagagcgcctcggtggcgtcttctaccatttgcttggtattgcagaatacgataccgcgcgggttcgtttcgacgtcgagtaagcggcagagcacctcgattttcgatcggttgcgcacttcgtagtaggtctgctcgatcgtatcgactgtgagtgacttgcgctcgatcgaaatctgttcggcttggtggctgaaagttttgatcagcccttcgacgccgcgattcatggtagcggagaaaaagagcgtctggcgatcttccggcatgtcaccgaggatgatttccatgtcctcgcggaagcccatgtcgagcatgcggtcggcctcatcgagaatgcagaggcgaatcgcgtcggtgcggagcgtcttgcggcggaggtgatccattacacgaccgggggtgccgaccacgatgtgggcacccttacggagcgcgcgcatctggcggtcgagcggggcgccgccatagacgggcacggcgacgaggcctctgagcgcggacgcgagccggtgaatttcttcgcagacttgcaccgcgagctcgcgggtcgggcagagcacgaggacttgtgtttcgtcgcgattgatatcgatcatgttgagcgcaggcaggccgaaggcggccgttttacctgagccggtttgcgagaggccgacgatgtctttgcctgccatcgccacggggatcgtttttgcctgaatgggcgagggcgattcgtagccgaggcgttcgatgctttcgaggagttccgggcgtagcccgagatcggagaatttggtatccatagtattagcagtaatactgctgttgtttaaaatcattaattcgtgagcaaatctatgattagattactttttatttgctcgtttggcactgtgcctgttgaatatcaaaaaaaaaagagagcgccggagcactctcaataagttgtcgcgattcaaatcacttgtttaaacggatgttgtgatcgctgtctctgattttcaaaatccaaaaatgtaagctgcgcgtatgaaaagcaagatgaaaaaaggatatattttaggactcgatttggggtcacagtcaatcggttggactgtttgctattgcgacgagagggagcaggtgaccgggctgggcgatttaggggtgaggatttttggcgatggacgcgatgataaatcacgcgagccactggcagttggtcggcgaaatgcaaagcaaactgcccgacggcggatgcgttcagtgatgcgccgtcgagcactgatccgctatttgcagcgtatagaccttttgccagaagacgaccgtgcaaagcgagggctggcgcaattagatccgtatcatcttagatcggcggctgttacgagacagattgaacgttatgagattgggcgagctttgctgcacattaacaaacggcgcggttttaaatccaaccgcaaggagttccaatcctcagacgatgaagttgttggaatgaagaagggaatcgctgttttagagcgtaaacttggcaaggaaatgaccttgggacagttgctccacaaggagcggtcggctaatctaaagaatacggtgcggttcagaccatccacggcgaatggaaaaaattcatgggatatttaccccgagcgatcgatgtatgcagacgaaattcgtttgattctagatacgcagcgagagttttaccccgaccttgatgagaaagtattctcgaagcttcaccggataattattgagcagcggccattgaagaagccacgtgttggctcatgccgcttttatccggatcaagaccgagcaccactggcgctcccaagtagtcaggcttttcgtatcctccaagaggtcgccaatctcgaattgcgcgagaatggagagcttcgccagttatcagatgatgagaggaattcggtcgttcagcaattgcttcttaaggaagatcgtaaatgtcttaattctaagggaactgaaatactgtttagtaaattgaaaacgaagttactaggtgattcttcgttacgttttaatttagaggaaatggagcgtaaatcgctcaatgttgatcttacggctaaagcgctgtcttcacacgtctgttttggatcgaaatggtttgaactcagtcgtgaggatcaggatgtgattgtgcttaaacttgtaggtgctgaggacaagccactgcaagattcagatgatattgtacgcaagtggttgattgaggagtgggggctggaagctaaacaagccgaagcctgcttacacgcaaagttggaagatggttacggtcggcttgggcaaagagctttgaacgaactgttgccgcacatggagaatggcctgaattattttgaggccaaagaagccgctagtttggaggagccgaacctgcatacagaaatccgtgaggaactcccctattatggtgagatccttgaaaattatacgatgccagttcagaatgcttcgccatctgcctctgtggcaacctgtgaggcgaaatttggacgtatccctaatccgacagtccacgtgggcctcaaccagctccgttccgtcgtcaatgcgctgattgagcggttcggtgtgccttctgtcgtgcggattgagctggctagagattttgcattcagtgctaagcaggaattagagcttaaaaatcggcaggtttcgaacaagaagaggaatgacagagccagagacgcgattgcaaaagccggacaagaccctcggagctcggacaacttgttgcgcttcaagctttgggaggagttaaacgcgagtgatccgctacaaaggctgtgcccgtttagtggccgccccatctctgttgaaacgttgtttagctctgaagttgagatcgagcatatcataccgttctcacgtagtttcgatgattctttcaataacaaaacgctctcttttcgtgctgagaaccgtttgaagctaaatagaacgccctatgaggcctatgggcagcgtgatgattacaatgagatccgtgaacgagcgtcgaatttgaacccctcaaaacagtggcgcttcgagcccgacgcaatagatcggttcattggggagcatggcagtctgattgcccgcacactgaatgatactaggtatttttcgcgcttggcgacccagtatctacgggctgtgtgccctaaggtggagagtatacgtggggcgatgacagctagcctacgccgccaatgggggctcgaaaatgttttcgatgattccgggaagaaagaccgtagcgagcatcgtcaccacgcgatcgatgcctttgtcgtggcgtgttcgacgcgttcatttttacacaaattccaacaagcgacagaagcgatgaagcgggaattccctgaaaagaacccgctccatatcccgagcttccccgagcccttcgacggttaccatcctggggtggttcaggctaaggcagtgaagataatcgtctctcacaagcaagaccggcgtcgtccgctcggaggtgtggatgcgacgcctggcgaacttcatgagaaaaccttcttcggactggagtctgatgtcggcaatgagtcagtggtgaaagtccgaaaaccccttgcagaccttaagcgcaaggactgtgctaaaattgctagtccgcgtttgaggagctattttgagcagcaggctatgatacatgccagcgataaagaatggaaagactttctccatagtatattgggaacagggcgcattcggagacttagaatgctggagaaagccaataaaaattccttcgtcagatttaaggctcgtgatggctctacttatcgtttggcaaaaacgcgtgcgaatgcatgggtggatgtttttgaagtcttgaacaagagcggcaaggctatctggaaaatggaggtgacttctctctatcaagctgcgaatgagacaagctcacaaccgccttggaaaaaggaataccctaccgctcgaaaaatcgcgcggctttcgatcaatgattccgtcgcgctttgtggggaggatggcttctggcggttgttccgcgtgaaaaagatgtctaaaggtaaactctttgtgcgtgatctacgggtcgcccatgaagaaggagactcgctcagtctgcaactcagtgctactaaaatgcaaaacatgaaattggctaaggtcgccatactgcccgacgggaagttgatggctccaaagcatatccgggagaatttgtatgtcggatccatttatagtgatacaaagtgagggtgtgtctctgtcaaagaccagaggcttcctcgaagtgcgttccttcgtgaataaggacttggaaccgcggcgttttcctctggatgctctttcaggcgtattggtcgagtcgaaaggtgtcagttttagtaagtcggcgatcacggcattggctgatgccggcattccattggtgctgacagacgaaaaccaccagccgagtgtctctatggtcgcttatcgtggtcaccaccgaacggctgaaatgattaccggacaaagcgaaatgaagctgcctgtgcgcaagtcagcatggaagcggatcgttcaagagaaaatccgcaatcaagacgcagttctccggaaagtccataacgatacggggctccagcatatcgccatgcgtgtgaagtcaggagacgtggataatcgtgaaagtgtggccgcccggctctattggtctcgcctattcgggaaggggttcaagagagagacggcaggtggggatttgaatggcgtcttgaattacggttacgctatcctcagggcggcgatggcgcaggagattgcattgaccggtttgcaccctgcgcttggagtgcatcaccgaaatggcgcaaatccctttcgtttggtcgatgacttgattgagccttatcgccccaccgtcgattatttgggctttcttgccgtagacgaggggctttgctcggtttctaagcgtattaagcacctgatggttcagttatttcatgagccattgtttcgaaatgtcgagtgggggcgctctctacgtggtgctctgcgggggacggcacgctcttatgctgctaaggtcaaggacggtcgggttgagttcttgcccgcccctaaggatttaatgtcagaactattcaaggtttctgaaactggagcgcttatgcgatgaatgaaccgttaacaggttacagacttatgtggatgatggtaatgtttgatctcccagtcgggacaaagcgcgagcgaaagcgggcttccgagttccgggcgctacttctggattctggctttgaaatgtctcaattctcagtatatcttagatttattggtgaacgagagcgtgcgaaatctcacgttagatgggtcgaatctcaggtgcctaaagctggtaaagtttccattttattttttaccgacaagcagtttgcagagtcgattttctttcagaataccaagcgaaaaagtcttccggacattcctgaacagctgattttaatatgaattatccatttttcgagactgcggctttacgcaaggagctgaagttcagctccttgcgttgtcggtagttttgaaaatcagagacagcggtcaatccgcaacctgcctcgaccgatggtgccggggccgaggagttttgaaaatcagagacagcggtcaatccgcaaccacaccatcgagaacaagcaagtcatcgatagttttgaaaatcagagacagcggtcaatccgcaacccggcatcgttgaaggcgacggtctgacagagttttgaaaatcagagacagcggtcaatccgcaacaggcaaaggcttcttgaaacattcaaatatagttttgaaaatcagagacagcggtcaatccgcaacgctgtattcagtgagcttagggatggctttagttttgaaaatcagagacagcggtcaatccgcaaccagctcgacggcgcggcggaactttttgccagttttgattcgctttccgactgatgcgctgccagttttgaaaatcagagacagcggtcaatccgcaacggcaaggcgcttgcgcaaatcggtagcgtcagttttgaaaatcagagacagcggtcaatccgcaacgatgagtcggccgatagttctgccgaagtcagttttgaaaatcagagacagcggtcaatccgcaacgggctgccactctctaaagagcagaaagagagttttgaaaatcagagacagcggtcaatccgcaaccggcgctggcttctcatgcggcggcaatggagttttgaaaatcagagacagcggtcaatccgcaacctgcacaagatactgcccaacaatccggcaagttttgaaaatcagagacagcggtcaatccgcaacccgtagaggttatgcaccccggacacctttagttttgaaaatcagagacagcggtcaatccgcaacaatgcactcataaatgaatttcgagtattcagttttgaaaatcagagacagcggtcaatccgcaacttttgacgacaaatggagagccagcaattaagttttgaaaatcagagacagcggtcaatccgcaactgagtctttgcgatattgtccgccaccgatagttttgaaaatcagagacagcggtcaatccgcaacggtgcgagagatcgcataaaccggatcgggagttttgaaaatcagagacagcggtcaatccgcaacttggctacaccggcgtcgaaggcacactccagttttgaaaatcagagacagcggtcaatccgcaactgagattaacatttcaaagggcggcaagtcagttttgaaaatcagagacagcggtcaatccgcaacaagcgcggacagatgatgaaaccgggctacagttttgaaaatcagagacagcggtcaatccgcaacacccttcaagggtatgcggtgcgcttcatcagttttgaaaatcagagacagcggtcaatccgcaaccgaatgacgcttcatatctgcgtaagattgagttttgaaaatcagagacagcggtcaatccgcaactgccactatcacctcaattggtgaggcaatagttttgaaaatcagagacagcggtcaatccgcaacaagtgccttgaggatgtcatagcca

SEQ ID NO: 859 - DNA, 7248 bp, synthetic construct
  misc_feature 1..7248: note = Synthetic
  source 1..7248: mol_type = other DNA
cactgacctctgaacaatgaaccctgaactctgaactctgaaccctgaacttttaacgcttaccctgaaccctgaaccctgacctctgaactctgaaccctgacctctgaactatttattatcctttgaaaatgatcaggatgatcggttttgaagacttagtttaaagccgacaagcgccaataacaggccaaccaggtaataggggacatgtgcgtatacaaaaaaatcgcggatcatgatgatctgaatggttaaccatatgattagcacagcgccacaaagcatggtgagccggggaaactgacgatttcgtcgaaggccgattattccgacccacaaattaaaaacgccatttacagcaaaaaggatcatgcccgggattaggtaagatctgaagggcgtgtgctccagcagctcaatgggcatttgtaaaaaatcaccggatggatcataaatcaggctccctccgccatacatggcagaaagggcattaaaaaacaataaggcgatagccgtaattcgcgttgaggttcgcatgctcatgatcagcttagagtggctccgctacaatttagatacattcattgaattctccatttcaccaataaggttgttttgaattaaattcataaaggtttttattaccgaattttgcaatctttatctaagtcaaagcgctaaaatggtgttatattggaggggctttggcatggcgctccgttgaagtcaaaaataacaaccaaagaagatggcgaaagtcagtcgatataaaacaataggatcaatacgaaatatcatattggcgttcgttttatggatcggcacaattcagggttatgcccaaaccacggataccacacggctggttattgaggacggctggattgaaaagatgaatacaaaaattgccgctgatatttcatttaacaatgcctaccagatttttgaagtaaataccacaaccaacagaatcctgctctaccccaataccccgaataacttgcgcctaaaggtaaattacgatttcctgtccgttggttttcaggtttcgccggattttttacctggcaatggcgacaacgacatcaggggcaaaacgaagtcttttcaattgggcgccgccctgatttttaaacactggttcgccgaactgaactattctgaagtaagcggatattatcttaaaaacaccgaagatttcagggtatgggaaaaaggcgacccgtatatccagtttcccgatttgcactataatggattttccatatcatcgggctatacccacaattccaggttttccttgcgcagcttgagctcacaaaccgagcggcaattgaaaagtaccggaagttttatgccggttttcaattttgattactacaccattgacgaccggtctgatggtatgaatacacaaaagtcaaaaaatgcggaggtcaacatcggaccgggttatgcctataccttcgtcgcccgggaaaaattctatgcatcgttggggctatttgccagcctgggctatatgcacacctggctgactacccgtacgcctgagggtaacataaatgtcaatcaggataattttattttacgttggcatggccgtaccggcatcgggtacaatggccccaggttttacaccggcttatatgcaaatgttgcgggaacgaggtacaatcaggaaaacacaactgtattcaacacggaaaccaggatcatgtatcacctgtttttcggcatgcgctttacggctccccgtttcctgcaaagacaggtgaaacaaataaaaaagaaaatgccttagtggtagtgcaagggagggttctgttgaaatgagtagattgtagttttgatgaagtgtagttcttgttggtggacaacactaacaatggcgtaaaaaatgccctgatcgcatcgtgcaactgataacctgtttttaccagagcatactttgaagttgtcaatgcatacttcaggtttgccggtgcgtattttgggcagtccattgtatactttgattgtgctaatttgcttattgtctgttaataggtcaaaaaaataccccaccgaggtggggtcttagatttctcttcggcctatagccttattgtgataagatatcaattaggatattttttcttaaatttatgctaatataattaatttgatggctattcaaaaattctccctatatgcccattatatttgcttatgatatcggaactaactcactcggttgggccgttgttgaccttgaaaacaaaaaaatccttggatcaggatcagaaatttttcctgaaggtattaaccgcgatacaaaaggcgctgaaatctcaaaaaatcaaacgagacgaatgaagcgtcaaaccagaagacaattcttccgtcgcaggttaagaaagtttcggcttgctactattcttttcaatcatggcatgtttcctgatttcatagccttacacgatcagttctatccggacaaagtaaaagaccacaatcgtgaaaaattcaagaggattctccagcaggtacgtcaaccagaagaattaaagcgatttttcgctttgaatccttatgatttgcgttccaaagcagctcaaggtgagaaactttccaaaatggaattagggcgtgtgctttatcaacttgcgcagcgcaggggatataaagaaaatcttcaaacaccacttgaagatggtaaggctataatgaaaggtgatccttcagaggaaaaagttgggattgaagctacacgtgcagcgcttgaggaaaacaaaacattaggtcaatacctctcatctttggatactacccaggaacggattcgcaatcgttacacactgcgtagttggtatctacatgaatttaatgtaatctgggaatctcagaaagactattatcccgatttcttgactaatgagcttaaaaaacaaattggagacgaacaggagggtgagcttttctaccaacggccccttgttaatcagaaacacttattaggtacttgtacctttgaacccaataaacctaaatgccctaaaagttcgcctcttttcgaactgaggcgaatgtatgaattcatcaataatatccgacttgaaggaaggcgactcaatgaagaacaaaagaacattatcattgatctcttcaattcaaaagacaggtttacctttgaagaaattcaaaagaaattgtgtttgacaaacggaaatttcaactatgaaaaggaattaaaaatagccggaaacaaaaccctcgcagggctttccaaagtatttggtaaaaaagcttggaatgatatgagctgggaacaaaaaatgcatgcctggcatatcaaattaaatgggaaagacagggataaaaccatcgaatatgtcaaaaacaaatggggatttgatgataaacaagctgataaatttataaaactccgcctcgcagatggctatggacaacttagtacgcgggccataaaccggattttaccgtatttgaaaagaggtgaaggttacagcgatgcggttttattggcagggttaagtaaagcctttggaaacacggtatggaataattattccgacgagtataagaaggaaattgaagataatgtgcttagtgtctttatgaaagatgatgaaggtacaggaatggaccatgcaaaagatcttttgcgcgaagcatacgggctaaatgaccatcagttggacaagctttatcatcacagtgatattgatggaaacccccatcttggttacctgccggaagatgataaaaaaatcaaaaaaattaagaaccccgtggtggaagcggctttatttgaagtgcgcaggatgaccaatgccttgatagaaaaatatggtaaacccaacgagataaaaatagaaatggcccgtgaacttaaaatgggcgccaagaaaagggaagagtttcgctttaaacaaagggagcgggaaaaagaaaacatcgaggccaaaaagactcttgacgaatatggaatgccgtatacgcgaagaaatgtacagaaagtactgttgtttcgcgaattagaaaaggtgtccggtaaagcaataagtcctttttctggaaagaccattagtattagccaactgtttaatgaaggttattttcaaattgagcatataatcccttattctgtttcacttgatgatagcatggccaataaaacgctctgtgaagccgatatcaatcgggaaaaaggggatgatactccctatgaatactataagcgaattggtggcgattgggacgacatcaaaaaccgaatatttaaaatactaccttacaaaaaggccaaaagattcatttccaaagacaaccctgcattggagcagttcatatcccgacagcttaatgatacccgttatatatcaagatttgcccgggattatctgaaaatggcatgtcaaaatgtatctgttacccagggttctgttacagaaacgcttcgaaggcattggggactggatggcattttaaatgccccgcaaaagttagaagggtatccagatggggagtatatagttgcggtggatgttgatggcaaactaattgaaggttctcttgagccttgggtcccacagccggaacaaataaaaaaaatagaaactgataaacagaaaattggtaaacctgcccatggctatgtgcgaaataatgccttttacttgaaaaaattaagaaatgaccatcggcatcatgccattgatgcattggcagtggcctgcagcaatcagggctttttgcaaaaattggccactatgtccggtaaaggccaggatcgcaacgcagcgcttaatttcccggaaccatgggaagggttttatcaggatgctaaaaaatcaatcgaaggaatattggtgacctatcaccaaaaagaccgtgtgttgactaaggtcaaaaaagccctttttgataagaaatcgggtaagcgattagagaaaaagggtaaaaaactgtacggccagggcatagcggcaagaggcgctttgcatgaagaaacgtattatggaaaacgaaatagccctgataatggcgaagaaggatatcatatccgaaaggggcttgatcagcttaccccaaaaatggtcaatcaaattgttgaccctacagttcgtaaagcggtaaaagaggcccttttaaaagctgatcctactattgatttcacaaagaaattcaatataccaaaaaacgccttttttgaaatggatgacaatggcaaacggattcccaaagtccatattcccaacaggaatggagaccctattccggttaaaaaagtgcggattagaaaaacggcttctaatatggtacaactgagtgaggtgaataaatgggttgagcccggaagcaaccatcacgtattgctttttgatctacccgatggcaaacggataggtaaaatggtcaccttttgggatgcagtagaagctgaaaaacaaggtttggaaaccatcgaccggcaccatgaagaaggagccaaattttatacctggttaaaaaaaggggatatggtattgctgaatgtggaagaagatattgatgtagattctctatctaataaagaaattggcgaccatttatattatttgcgaaaaacgggacaatcgcaatacggcattatgttagtttttgcgctacaccgtgcagcaaatgttgatgctaataaggacaataacccaataatcttaagatgctcaccgaatactttcagaggtattaaggttgaaatctcaaaaacaggagaagtgacaagggtatgatagttattgttttcgatgaatttaaaatatctttcgattaattaatgaattgtatgtcagtgtgttgtgttgattatatacactaacacttgaatacaatgcaaaaaaggattatttcaattgataacccctatcacctttcagtgaaagacaaacagcttctcctgaaggaaaaaacctccgggcaatacagacaaacccctgttgaagaccttggtgtggtcctactaaaccacccgcagatcagtttgacccaatccattattcaggaactaatggatcaaaaagtggctgttgtctttacctcaaaaaattatctgcccgtttctatgctgttgccattagatagccattatattcaaaccgaacggtttaacctgcaagtgagggcaaatgaaccccttaaaaaacaagtatggcaacaaattattaaagccaagatcataaatcaatcacaaatgatgcgaaatatgggaaaggaccaggaagcgaaggcattaatgcaaatggccggagatgtgaaaagtggtgatagcacatcccgggaagccaaagcagccagatattattggactaaactatttggtgcagattttaaaagggaaaggtttgggcaggcgcctaaccatttgctaaactatggctacaccattgtcagggcctccgttgcgcgtgcattggccatttccggattattgccaacattaggcgtccagcacaagaacagatataatgcttattgtctggcagatgatctcatggaaccttaccgaccatttgtagatcatcaggtcatttcgttagccttatcatatggctcttatgaccttgaacttgacaaagaaataaaggctgctttgatcaatgttttgaatgcggattgtcatttgaatggtcagaaacgcaccttacaaagcgcaattttaaaaagcgcccaatcgctttccttatattatgaaggaaataccaaaaagcttgtttttccaattctggaacattatggaaacactaccttctgatcgtttaaatgcatatagggttatgtggatatttgtcatgttcgatttgcccgttgttacaaaaaaggaacgacgggcggccagccaattcagaaaaaaccttcaaaaagatggttttaccatgatgcagtattccatctatacacgtcattgtgccagtatggaagttttgcaaatgcatgccaggcgagtacgtaaaatgatgcctccgggaggacaagtaagtattttgaaaattacggataaacagtatgagaatattgaaaacttttggggtaggatggtccaatctcttaatccaccaatgaaacaactcgaaatgttttaaaaaaacgctttttcaattttaattatacagaattggcatcaattttctgcgtgaaaatatgcggtcaaacaaaaggatatcagcaagttagactacttgctaatatcctaaatccttaatt

SEQ ID NO: 860 - DNA, 23171 bp, synthetic construct
  source 1..23171: mol_type = other DNA
  misc_feature 1..23171: note = Synthetic
tttaaggtagaaaatgctaatcccaatggcgatcctcttggcggcaacagaccaagagctgattttgaagagcttggtgaagtatctgatgtgtgtttaaaaagaaaaataagaaacagattgttagattcaggagaatctatttttgttcaatcagatgattataaaaatgacgatgcaaaaagtttaaaagatagagcggataaagttgaagctttaaaaaaagaaaaagataaagaaaaatatgcatctattgcttgtaaaacttggtttgatgttcgcgctttcgggcagatttttgcttttaaaggtaaaaaagaagactcgggttcaggagtatctataggtataagaggtcctgtatcaatacaaactgcttttagcaaagagccggttgagattataagcacacaaataacaaaaagcgttaatgcagaaagtactgagactggtaaaaaatcatcagatacgatgggaacaaagcatcgtgttaaacatgcagtttatgttttctatggcgcaatgaacccgcagcttgctgaaaaaacaagttttagcgatgatgatgctcaaaaaataaaagcagttttgccaagactttttgaaaatgacgaatcttctgccagaccagccggcagcatggaaatcttaaaagttatttggtggcagcataattctaaattagggcaatattcatcagcgaaagttcataaatcattagaagttgataataacggagaaattaaaatttcagaattaaaagatttaaagcctgaaataatagaaggatactaaatgtatttagaagatgatttgcttcaattatcagggttgcagcatttattatattgctcaagacagtgtgctttggcatacatggaattgcagtgggcagacaacttcttcaccgccaaaggtattcttatgcacgataaagcccacagcgataaaagagaagttaaaaacggggttgtaatagagcgtgatatttacattaaatcttatgctttgggtttggtcggcaaaagcgatatcgttgaattccataaatccggcgcgcagctcattcctttccctgtggaatataaaagcgggaaagcaaaaaatgataacacagataaagttcagttatgcgcgcaggctttgtgtcttgaagaaatgctaaagatagaaattccaagcggcgctattttttacggtaaaacaaagaatcgtttaaatgttgaatttgacaatgctttgcgagaagaaacaataaatcttgccaaagattttcataatttaattgaaagcggcattacgcccaaagcgcaagcatcaacaaaatgcaacaattgttcatttaaggaattgtgtttgccggaactcacttccggcaaaaaatcggcgaagaagtatttgcaaagtatagtaacagagaataatacggagaattgaaagagtgttcagttattaggaaatttctaataactgaaaaggaataatcatgagaaaagatttgataatgcacgaaggtgagaggcgcgaaattattatttatcgcgatggttgtaatgcgccaaaagttgaagtgttgttccaacagcaaaatttatggcttacgcaaaatagtatggcgcaactttttgatattcaaaaagcagctatttcaaaacatttgtcaaatatttacttatcgggtgaattggaaaaaacttcaactgtttccattttggaaacacttcaaaatgagggtgcgcgtcaagtaaaaagaaatattgagttttacaatcttgaagctgttattgcagttggctatcgtgtaaattcagagcgagcaataatgtttcgtaattgggcaagtaaaattcttaaggaatatatacagaaaggttccgtgcttgatgcggagcgattaaaaaaaccggaatatatttttgggcaggattattttgatgaaacacttgaaagaatacgagatattcgttcaagtgagcgtcgtttttatcagaaaatcaccgatatttatgcgcagtgtagcgctgactataatgtgaatagcgaaactacacaactcttttttgcaaatgtccaaaacaaactccattgggcgattacaaaggaaaccgccgctgaaataatttataatcgcgctggccataaaaagccaagtatgggacttacttcatggaaaaatgcaccgcagggcagaataagaaaaaacgatgtcagtattgcaaaaaattatctaaatcatgaagaattggatggtttaaataggattgttgcaatgtatttagattatgcagaagaccaagcaaaacgccgcaaagtgatgtatatgaaagattgggcagaaaaattaaattcttttttgaaatttaatgagcgtgaagttttacagaataatggcaaagttacgcatgaaatagccaaatcttttgcggaaggcgaatttgaaaaatatcgtatagtgcaagacagattgtttgaaagcgattatgatagatttttaaagattgaaaataaaataaagcgcgtaaaaaaataaatgaaaaaactatttaataatctttacatcacaacgcaagaatcatatatttcaaaagagcgagaaaatttagttgtcagcttgcacggtaaagaaatatttcgcgcgccaatacatcttataaattcagtggtttgttttggcaatgttttgtgctctccttttttctttggactgtgcgcagaaaataatgttcaggtaagtttcttcacgcaatacggcaagtttattgcaaaagttcagtcgcctgtttcaggaaatgttttgttgagaaagcagcaatataaatattccgatgatgaaaaattttgtcttgatacggcaaaatcaattttaataggcaaattgaacaattcaaaaactgttatcaacagagctttaagagatcacagcgataaaatgaaagattgcgaaaaattgaaacaagtatctgaaagcttaagcaggtcaatgtcaaaagtattaagcgcagaaaatattgacatattgcggggaatggaaggcgatgctgcaaactcatatttcagcgtctttgatgaattgatattaaacaataaagaaaacttttttatgaaagaaagaacccgccgcccgccgcaagataatgttaattgtttgttatctttcatatacactcttttagcgcacgatgttgcttctgcattggaaggcgttggtcttgatccgcaagtaggattctttcataaagaccgccccggcaggccaagtttagctttagatttaatggaagaattccgctctgttattgcagacagattagttcttacattaataaatttatcccaacttgatgagaaaggttttcagcaatcttcaagcggcggcgtaataatgaacgatgaaaatagaaaaattgtgttagatgaatacagaaaaagaaaagaagaagaagtttttcatccgttttttaaagaaaatattcacatagggcttttgtttcatgcccaagccttactttttgcaagatatgtaaggggagatattgacgcatatcctcctttcatttggaaataagcttaattccctcgctccaagggggagagggcatggtgaggtgtaatgttagttctcataagctacgatataaacacaacagaatcgggcggagcaaaacgcttgagaaatgtatctaaagcatgtttagattacgggcaaagggttcaattttctgtttttgaatgtgaagttgatcctacgcaatgggtatttttaaaaaataaattgctgaaaataatagatttaaaaaaagacagtttaaggttttatatgttaggttcaaattgggaaagaaaaatagaacattatggcgcaaaagaagctgtggattatcatggcagtttgataatatgattttttgattaacaggcatattatttttttgacaattttttattagtgcgaacattaggtggtttagttttgttcattgacatcgcatattgaaaaatgaatgagaattcaaaatcataaaatagaacttgagcgaatatggagggttcgcataattataaaaaaataagttgaatttacaataagtttttgcagtactgtcgctcccttcacgggagcgtgaattgaaatgggtgggcggttggaagtaatagcgagcacggcggtcgctcccttcacgggagcgtgaattgaaataaaagcgtgaaaggagcgaaaggaagtgaggcttggtcgctcccttcacgggagcgtgaattgaaatattactccttatcttttcattataaaatttaaaaggtcgctcccttcacgggagcgtgaattgaaatcttttatacgggcttttaagggactatgtaattaggtcgctcccttcacgggagcgtgaattgaaatcgttgggcagctacgcatcgtcgcttgggacaacgtcgctcccttcacgggagcgtgaattgaaatataactgccggtatagcattgcgggcgttatttagtcgctcccttcacgggagcgtgaattgaaattgaattaatgaaaaagaaagaatatccgcagcccagtcgctcccttcacgggagcgtgaattgaaatttcaagagtgccatattttttatacataaaactttgtcgctcccttcacgggagcgtgaattgaaatcggcaattaatgctgataatacattaaatgttaagtcgctcccttcacgggagcgtgaattgaaatgcgttgatatttgcggggttaagcacgttatacccgtcgctcccttcacgggagcgtgaattgaaatacgctcattgctttaagcggcaattcaatcattttgtcgctcccttcacgggagcgtgaattgaaatacgctcattgctttaagcggcaattcaatcatttgtcgctcccttcacgggagcgtgaattgaaatattttattattgcgttccgaggctgttgaggcggacgtcgctcccttcacgggagcgtgaattgaaataacaataatgtttcgcccgctctcacggcgtcgttgtcgctcccttcacgggagcgtgaattgaaatatctaatgtctgctgatattgctcctgctgcgcaagtcgctcccttcacgggagcgtgaattgaaatttgtcagaacgtggaaaaatagaagccgtgatagtcgctcccttcacgggagcgtgaattgaaatttagggtcattgtatgttttcccgtcgtaaactttggtcgctcccttcacgggagcgtgaattgaaatagctggtcttattttattgattaaggattaaaagtcgctcccttcacgggagcgtgaattgaaattgaatgtttaagtaaggtaaaaggttaaaattaagtcgctcccttcacgggagcgtgaattgaaatatacaatgtatggcttaaagcaaaagaaaaatcaagtcgctcccttcacgggagcgtgaattgaaatatttaaagttatcaggagtgcgcagttgttatcaagtcgctcccttcacgggagcgtgaattgaaatatggcggagtagatgctgatatcgctaatattctcgtcgctcccttcacgggagcgtgaattgaaatatctattcagtgaagctgaaataaaatccgctggtcgctcccttcacgggagcgtgaattgaaatgcccatatttttccgcaaacgcatccgttaccttgtcgctcccttcacgggagcgtgaattgaaataatatatattttagagcatgccgaggggctcaaaggtcgctcccttcacgggagcgtgaattgaaattctgcgctaacgcttgagcaagtccgccggtggcgtcgctcccttcacgggagcgtgaattgaaatcctgtatcaggtgatctacgctcaatcccttattgtcgctcccttcacgggagcgtgaattgaaatcgacgacaacaagattttagagcggtatgattaagtcgctcccttcacgggagcgtgaattgaaatcgtctgtaagcatttccgcggactatccgttttggtcgctcccttcacgggagcgtgaattgaaataaaataccaatcgcttttattaattttgtaaggtagtcgctcccttcacgggagcgtgaattgaaataaaaaggcggcgggcggtgctaaaagaaagggaagtcgctcccttcacgggagcgtgaattgaaataccagaatttactcgcgctaaaacattatcacctgtcgctcccttcacgggagcgtgaattgaaatgtattttttaccattatattttactctgttcttagtcgctcccttcacgggagcgtgaattgaaatgcaaccttccccgcatcatttcacggtcgctttggcggtcgctcccttcacgggagcgtgaattgaaatcaatccacgaaacattatcttttgccctgttggtgtcgctcccttcacgggagcgtgaattgaaataaaacgtatttccaagtcgtcagcaattatttgcttgtcgctcccttcacgggagcgtgaattgaaataactcacaacgtaaacataaaccatcaatatgatgtcgctcccttcacgggagcgtgaattgaaattcctctatctttatttttatgctatttctcgtccggtcgctcccttcacgggagcgtgaattgaaattcgtttttattcccgggttatcgtcggtgccgttgtcgctcccttcacgggagcgtgaattgaaattatttgttgccgctcctgaaagtagttgataattgtcgctcccttcacgggagcgtgaattgaaatggtcaagagaagttatgaggattatgagttaccggtcgctcccttcacgggagcgtgaattgaaataaattgacttgcagctaattgatttatttgaaatcgtcgctcccttcacgggagcgtgaattgaaatgccttagcgccgcctccgtcaaaaaaaccggcttgtcgctcccttcacgggagcgtgaattgaaatttataaaaatattttaaaaactacgaggagcaaggtcgctcccttcacgggagcgtgaattgaaatgccaattccataatttcatttttctctgcgagaggtcgctcccttcacgggagcgtgaattgaaatcgcgcatatgcgagagtctataatgaaaattaccgtcgctcccttcacgggagcgtgaattgaaattgggaaacctattaagtggactcatatcgggggcagtcgctcccttcacgggagcgtgaattgaaataaattgacttgcagctaattgatttatttgaaatcgtcgctcccttcacgggagcgtgaattgaaatgccttagcgccgcctccgtcaaaaaaaccggcttgtcgctcccttcacgggagcgtgaattgaaatttataaaaatattttaaaaactacgaggagcaaggtcgctcccttcacgggagcgtgaattgaaatgccaattccataatttcatttttctctgcgagaggtcgctcccttcacgggagcgtgaattgaaatcgcgcatatgcgagagtctataatgaaaattaccgtcgctcccttcacgggagcgtgaattgaaattgggaaacctattaagtggactcatatcgggggcagtcgctcccttcacgggagcgtgaattgaaataaattgacttgcagctaattgatttatttgaaatcgtcgctcccttcacgggagcgtgaattgaaatgccttagcgccgcctccgtcaaaaaaaccggcttgtcgctcccttcacgggagcgtgaattgaaatttataaaaatattttaaaaactacgaggagcaaggtcgctcccttcacgggagcgtgaattgaaatgccaattccataatttcatttttctctgcgagaggtcgctcccttcacgggagcgtgaattgaaatcgcgcatatgcgagagtctataatgaaaattaccgtcgctcccttcacgggagcgtgaattgaaattgggaaacctattaagtggactcatatcgggggcagtcgctcccttcacgggagcgtgaattgaaataaattgacttgcagctaattgatttatttgaaatcgtcgctcccttcacgggagcgtgaattgaaatgccttagcgccgcctccgtcaaaaaaaccggcttgtcgctcccttcacgggagcgtgaattgaaatttataaaaatattttaaaaactacgaggagcaaggtcgctcccttcacgggagcgtgaattgaaatgccaattccataatttcatttttctctgcgagaggtcgctcccttcacgggagcgtgaattgaaattgaaaaggttatcgcagggcttgccggcaagattcgtcgctcccttcacgggagcgtgaattgaaatgggcgatgttgcatatcccattgtgcctgtgctgtcgtcgctcccttcacgggagcgtgaattgaaatttgattgggttgaccagagcggtaaaccatatttgtcgctcccttcacgggagcgtgaattgaaatgcaacaattagctgcggtataacatttacgaattgtcgctcccttcacgggagcgtgaattgaaattgaaatttttgttttgcttgaaatttttttgatggtcgctcccttcacgggagcgtgaattgaaatgagcatacgcaagagtctacaacgaaaactatagagtcgctcccttcacgggagcgtgaattgaaataaatcattcgcaacgcgtcgcacgcgggctcttagtcgctcccttcacgggagcgtgaattgaaatgtggctaatcaactcatcctcacttttctgtaattgtcgctcccttcacgggagcgtgaattgaaatgcctttacatctccggcgagatattttttagtccgtcgctcccttcacgggagcgtgaattgaaatgcagcgttaaatctctgtttttaaaagcttcggcaagtcgctcccttcacgggagcgtgaattgaaatacatcgccgttttcaggattaaacactcttctagtcgctcccttcacgggagcgtgaattgaaataataatcgggtcgtgctgaagaccttgcttatccagtcgctcccttcacgggagcgtgaattgaaataaccaatcttgggcgaaagggcagatagaagaaggcgtcgctcccttcacgggagcgtgaattgaaatatgtttaagcattccactccatccctatctttaagtcgctcccttcacgggagcgtgaattgaaattattgtagaacgatcaatgatagcgtttattttgtcgctcccttcacgggagcgtgaattgaaatagcgtcaagcatatcttcttttgcttctgcaattgtcgctcccttcacgggagcgtgaattgaaatgccgaagcttactaataactacgctcgggcagggtcgctcccttcacgggagcgtgaattgaaattacgaccaaatgcaagatattctttggctgggttagtcgctcccttcacgggagcgtgaattgaaataaaaaaagggaagacgcggaaaccgaaatgaggctgtcgctcccttcacgggagcgtgaattgaaattttgtgctcggcgctataacattcggattgggttggtcgctcccttcacgggagcgtgaattgaaatgagttggcattccaagaaccctatttagcattctgtcgctcccttcacgggagcgtgaattgaaattgcgcgcgcagaattcttccgcagcctgtttgtcaggtcgctcccttcacgggagcgtgaattgaaatttttaaccggtatgtatttggttggcaattattcaaacgacgcccaatttttagggcgattagaacaaaaatccttactatgtaattataaaactcattcaaacgacgcccaatttttatagtgtaacttgaatattaatcattaataactctgcatttttacattgcaaaaaactatatatttttgtttaatataaccatctacatttggaggttatatgccaaaacaagaacttgtatattcgtttgatttaggttcaggaagtattggtgtttgtgtgcgaagcggtaaaaatattttacatttaaattctcttctattagataatgagtttgcatctgttaaagaagcagctgcacaaagaagacaaatccgcacacgaatagctcacaaagaacgagaaaaatggtggaatgagcaagctaaaaaagcaggaatagaagtattacaaaccgcacaacctacaaaagaaaatcccaatcttaaacctgatagcagaatgttgatagaattcctcccaaagaattcaaaagataaaacaatatattcttcacatctcttaagaattgctttgcttcaaggtataaagcttgaaagttggcaaatatataaagcaataagatctgcaattcaacgcagaggttatgatgctaatttgccatgggctacagattatgattctgacacaaaagcaaactctgatgccgcaacaagatacgaagaaaaactaaaagagttttttgcagataaagaagaatattactatccatgttattacgaagcttatattcaaagtatttggtcgccaagtaatccaaaagacttaagcggcagattgtcagaaaacccaagccctgcaagaaataaagataacaaaccgcaagaggacaaatgttttccgtcaagagatttggtagaaaaggaattaaaagatttgctttctgctgctgcgaaattatttcccaaactaaaagataaagagaattatgtcctttacgggcaagctcaaagagcatatgcttcatatgaatataaaaaagatatagataaagaaaattacataagccatagaggaacttcttgggattggcaaggattattagggcaaaaagtcccaagatttgataatagaattattgcaaaatgtcgtttaataccgagatttaatgtttgtaatgcaaaaaagcaaataaataaagaagtatcttttttacttgctctaaaaaatatgaggtttacattagataatacaaccacgcaaagtttaaactgtgcacaaataaatgaaatttttaaaacatatgcggaattttgtgaatatgaaaaacaaaaagaaacagcagtagctaaaaaacaaaacccttgtacaaaaacgttctggaaaaattatgttcatgctcttggcggtgaagtaaatcccgggcaacaagaaattgctaaaccaaaagaaggcggcagaagcagtttttgcaaacccgcattaaatattttgcacagcttaattttatcaggcaaaaccccgcataattattatgcggaacttgtagaacaaacaaaaaacactgatttgcaaaaaggacttataaaagatgactatagatttttacttaatatgccaaacgattggaattcaataagtattcaagatacaagagaggaagataaaaaattatctcaacaagaagcattgcgaaaaatagatgaaattattgcaggggttaacaacagaattgtttgccacagattactaatgctaaaacaagttttgcaaaaattagatgatcaatttaacaaagagtatggtgtgccggacaaagtagtttttgaaatagccagagaagattttatgggtaagaagaagaaagacgaatatttaaaaaaagcaaaagatggaaagaaaaacaatgacgatgcagttaaaaagctaaaagatatggggttgcctgtctctgatcccaatatcataaaaataaaattgggcaatgaacagaagtggaaagatatttatgatacaagtgataagcgtaatttaatacctgaaaatataggtcaatatgaaatagatcatatagttccaagaacctcaagcaaaggcggttctgattcttttgtaaatttcattttaactaaaaacgctttaaatcaaacaaaaaaagatagaactccatatgaatggttaagttctgacaatagcaagtggcaagcatatcttgcgaatatcgctgatttttcaaaatctgccaacagtaaaaaaatagagcttttaacttccgataaagcagaaaatatagaaaagagaaaaacagatttgcaggcaacttcttacttggaaaagttagctcaaacaatagcaggcttatattttggttttggaattaacacaaaagacgataaaaaaagaattctcttttttaccggcggggaaactgcaacagttcgctctaaattagatttaaacagagtgttatataaaaatgatgaagaatttgaaaaagctcaaaaagccggtttaaaagaaaagaacagaaaaaataaaaaacatcacgctttggatgcgcttgttttaagcatgctgcctgaaattaaagtatctaaaagagagataatagaaaagcctgattatttccataaagattactgcgtaaaacagttaaaaagtattattcctcaaacaataaaacaaattaagccgaaattaagagcgaccatttatgctttaagaagcagatatgaaaacggcaaaccatactattattttatttctcgttttaacagcaatcttactttatttgaaaaaatggaagatgcaaaaaaagagataactaatatttttgatttgaaaattaaaaatgattggaaagtaaaattagaagaaaaaggtttaacacaagaaaaatggatagaatttttaaataaatatacaaataacggcaaaagaattaagcaaattgcaatgacggactctaaagcatttaaaaaagaagaaacttttaattctaacggaataataaaaaatgttataggggaatatggcagtaacggtgttaaagggcaatggataaaaggcaaagaaggtcatcaagggcaaattgtttataaagatgagaaaggcaaatggcgggttgagcctgtttatgtttttgagtctatatataacaagaaaaaattgtatgaaaataaatataaagacgttaggtttttaaaatcaggtcagttggttgaactaaaaaaagattatgaaaacataaaagccgggatttatattttgaggacattgaaaagtaatggcagttgtaaattagaagatataaacacgcaggaagaaatagataaatccgtaaatgttttaatagaacaatgcggaatgagaagttatgagaaaaaataatgagctaccatataattcatattttaaatcatgcaagcaggctttctgttgaccgaggctgcttagtctgcgacatacctgataaacctcaacgaagagttccgcttgaggatattcttgcagttatagttgccgcaaaaggcgtcagtttttctgcagaaagtttatctgcattattacgtaacaacagcattgttctccactgtgaccacaattataaacctattggaaaaaccgtaggacttcacagggttgttcataatgaagttttagatattcaagtttttcaagatttattttatatgcgccaaatttgggacgaaattattaaagcaaaaatttcaaaccaagcatgtgttttagacggcattaatgccaagcataaattgtgggaatatatcaaagccggtaatttagatgaaggcaatgccgcgcgtcattattggaaatattatttcaaaaaattcggacattcttcgccaggcggcagaactacaaaaggcgcgcaagatcctgtaaacggaatgttaaattacggatatgcggtaatagcggcaatggttcacagattgctgcttgctcacgggtttaatccggcgataggtgtttaccacaagtacagatttcgttcagatccgctcgtgtatgatattatggaacccttaagaccattttgtgattttatgttgttaaggttcagacaatcaaatatgcgtaaacaaattgacgaatgggcaaaattcgctgccaaagatatagttttctcaaaaataaatatgtttggcgcaaaaaatatcagctttaaccttgccatagataaatatataacttctttctcttcttgctttagagcaaaaacattaaacaatctttatataccattgcttaaagatattactttcaatgaaaaataataacagcaggtatcgcatgggctggcttattgttttatttgatttgcctacagatacaaaggcagaaagacatcaggcaaccaagtttagaaacggacttttagatttgggttatctaatgttgcagtattctgtttatgcgagatgtgcggtaacattagacaagaagaaagggtttttaaacgacataaaaaaaatcgctcctaccacaggcaatgttcaatgttattttattaccgatatccaatgggaagaatgtattactataacaaaaaataaagacaaaggactccggcagcttgaatttgaagataaaataagcgaccaactgcagttctggtaatagtttgataaattaaaagctgtcttgcgtacctttaagtagaggcaagacagttttaattttagttgaggcgggactaaaaaaatggacttccaaaagtatacataaaaaccaaaaaaattacaaactttaagagtgaatcctattataacaaatccatttttttagtcccgtcagaaccgagtaggctgcagggttgtcaataatattattataacaaatccatttttttagtcccgtcagaacacaaaaaaatacattgtgttacaatatggtattataacaaatccatttttttagtcccgtcagaacataggcaatttgttatacgtattgagttaaattataacaaatccatttttttagtcccgtcagaacctccgttgggcgctacaacgggtttgtctgattataacaaatccatttttttagtcccgtcagaacctacgctcttccagttctttttcgtggcaaattataacaaatccatttttttagtcccgtcagaactattcggcaacagccgcctcaatgcgccgtattataacaaatccatttttttagtcccgtcagaacttctcgtcgtcgcggctcgcccaagcgcacattataacaaatccatttttttagtcccgtcagaacatatgatgaattacagcgggctttatcgtgattataacaaatccatttttttagtcccgtcagaactgcttggcgcgtaacctacaatcgccaaatattataacaaatccatttttttagtcccgtcagaacacacctcttccaagcatgtttgtttcagctattataacaaatccatttttttagtcccgtcagaactatttcaaccaacggacaaaacacttggcgattataacaaatccatttttttagtcccgtcagaacctatctgctgtagacatattatagcacaatattataacaaatccatttttttagtcccgtcagaacgcaggcggaagatataaatacaacttctttattataacaaatccatttttttagtcccgtcagaacttaatgtagagcgtatccgccaaaatttcaattataacaaatccatttttttagtcccgtcagaacatattcagatttgtccaatcccaattctttattataacaaatccatttttttagtcccgtcagaacccacctcttcaaaaatatatttgccgatttattataacaaatccatttttttagtcccgtcagaacacaagaaaaatacattgtgctacaatatggattataacaaatccatttttttagtcccgtcagaacacaaaaaaaatacattgtgctacaatatgtattataacaaatccatttttttagtcccgtcagaacctcaacctcaacgtaatcattgaattgggcattataacaaatccatttttttagtcccgtcagaaccgcattatctacagatatatattcattgtcgattataacaaatccatttttttagtcccgtcagaactagtatgcctgctttaaccgcttcttttgtattataacaaatccatttttttagtcccgtcagaacaagtaagttcacaatttcgcccatctgtttattataacaaatccatttttttagtcccgtcagaacatattcagctttgtccaatcccaattctttattataacaaatccatttttttagtcccgtcagaactttttgcggcggtgtttggtgtttggttggattataacaaatccatttttttagtcccgtcagaacacaagacaaatacattgtgctacaatatgtattataacaaatccatttttttagtcccgtcagaacatattcagggtgatattgctctctcaccttattataacaaatccatttttttagtcccgtcagaactaataaaggtattgacgtgataaaagatttattataacaaatccatttttttagtcccgtcagaacgaaggcattgctgattacagtgtaacagggattataacaaatccatttttttagtcccgtcagaaccactttgagataatcttcccatcgccaaccattataacaaatccatttttttagtcccgtcagaacatgcgcggcaacgcctaatttattaattgaattataacaaatccatttttttagtcccgtcagaacccccctatcattttattagtagctcttaaaattataacaaatccatttttttagtcccgtcagaactacgaagcattgaacttttaacctgatacgattataacaaatccatttttttagtcccgtcagaaccgccgtagtttgcgatgcttcctgtatcggattataacaaatccatttttttagtcccgtcagaactcctcgctaattacataatcccttaaaagtattataacaaatccatttttttagtcccgtcagaacttcgcctaagtgcgctaattttgggttgtaattataacaaatccatttttttagtcccgtcagaactgaatcatccggaaattgcaaatgcgctggattataacaaatccatttttttagtcccgccagaactgtaggaagctgtttattgagttcatatttattataacaaatccatttttttagtcccgtcagaacacgcgctgtgcaaacgtattccgctgcgtcattataacaaatccatttttttagtcccgtcagaactgcggcagtgttaaatttttccctttcccaattataacaaatccatttttttagtcccgtcagaacaattgagcgttaaataaatgcaccttaattattataacaaatccatttttttagtcccgtcagaacttttgcttttattctttgtagttttgctttattataacaaatccatttttttagtcccgtcagaacccggatgttaaatgggttcagagcgccgatattataacaaatccatttttttagtcccgtcagaattttaatacatattagcaaattctaaaaagttaaatcagtgtaaagaatggatggagttttttatatcgtgtttgtttaatttagtatcttgacaaagcatactaacgcatgctaatatgccgctaaaatttacacaatatataaagaacgatttgttattgcaaaagagaggggaacaaattgcccctctcttttgttttagctataatacactatacatcaacaattccggagaaaaagtttatgaaattttcagatgcgcaggatttacttaataagtatgttaaaggcgaaacgcttttgcggcatagtttaacggttgcggtggtaatggaatattttgcgaaagaattcggcgaaataaatcctgagttttacaaaagcgtcgggtatttacacgatattgattttgaactttacccaaacgagcattgtataaaagctaaagaaattcttgaaacggaaaaagcaaattttccgcagcttaccgacgaaataattcacgcggtattaagccacggatataatcttacaaataatgtagaaccaatttcgcaaatggaaaaagttttatacgcaatagatgaacttaccggacttatttttgcctgcgccatggtgcgcccgtcaaaaagcgtgtctgatttagaagttaaatccgttatgaaaaaatttaaaaatcccgcgtttgccgccaactgcagcagagatgtaatttctaacggcgcaaaaatgctcaacatggatttaaatgaaattatagaaaaaacaattttagcaatgcgcagccagtctgcagccttgggcgtgtaaaaggattttttattttgacaacgaatttcgcagaacaaaaattacaagttcttaaagaatatttcgggcatcaatcttttcgcagcgtgcaggaagaacttattgacgcaacgcttgccggccgcgatgcgctgggcattatgcctaccggcgcgggcaaatccgtttgttttcaggtgccggccgttttgtttgacggcataacaattgtaatttctccgcttatttctcttatgaaagatcaaaccgcgtcgcttacgcaaaacggtataaaatccgcatatatcaacagttccctcacgccagcccaaaccaaaaaaattcttgataacgcgcttgccggcgaatataaacttatttatattgctcccgagcggttagattacgacgggtttttaaattttacaagaaaaattaaaatttctatggtaacaatagacgaagctcactgcgtgtctcagtggggtcaggattttcgtccaagttacacaaaaatagcgggttttgtcagcggaattaatccgcgccctatagtttctgcgtttaccgccacagccaccccgcgcgttagaaaagatattgttgatattttagaattaaacgcgccgcaaatttccgttgcaagttttgacagggcaaatttaaaatttgacgttcgtcatcccgtaaaaaaatttaacgagttaatagaaatattaaaagataaaaaagataagtccggaataatttattgtttaacaagaaaaacggttgacgaccttaccgaaaaattaaaagccgcgggttttaacgcggcaagttatcacgcggggcttaccacaaaacagcgccacgcaaatcaggacgattttatttttgaccgcgtaaacataatagttgccacaaatgcgttcggcatgggaatagataaatccaatgtttcgtttgttatccattacaacatgccaaaagatatagaaagttactatcaggaagccggcagagcaggccgcgacggctcgcccgcagactgcattgttttatacagcggtcaagacataatgacaaatctttttttaataaataacagcgacggcagagaatacgaaacgccggaagacgaattatatttaaaatcgctggaacgcgaacgcttaaaagaaatggatcaatactgcaacacaaacgaatgccttcgccattatattctaaaatatttcggcgaaattccatcttggaacgaatgcgcaaattgcggcaactgcaacgcggaatctaaaatggaagatataacaattttatcgcaaaaaatattgtcgtgcgttgtccgaatgcagggaaatttcggcaaaaattttgttatggacgtattaagaggcagtaaagccgaaaaaattataagttttgggtttaataaactttctacttacggcatttgcgctgaaagcaaagaaaaactaaaagacgtaattaattttcttacaataaataaatttttagccacaacaaatacggaatttcccgttttaaaattaggcgcccgcgcagcggaaattttaaaagataaaattaaagtagaaatgaaagtatcaacagctcaaaaagttgaagcggctgatatagtatctaaatataaagataaacccgataaaaatattgtaataaacaaagagttgtttgaagcgttaaaacggttaagacaaacaatagccgcgcaacaaaatgtgccggcgtatataatttttccaaacacggctttaatagatatgtgcggtaaacttccaaaaactaaagaagagttttcacaaatatcgggcgtaggctcccaaaaacttgaaaaatacggcgacatttttgtaaaaacaattattgagtttttaaacggcaggtgaaaacaaggaagaggataagaaggtaagtaacggcaagttgttaaagtagaaagtaggaaggagtaaggagcaagtgttgttaattcccctgacaaagatgataagagggtaggatggtaggaagataagtaacggcaagtaataaagaataagtaaaaggtaaagacaacgacatggctgacaggatgctgttattccccttttataaagggttaatgttcaaaaagtgtggttaaaagaggtatttttctaaccagattacgacgacaaaaagaaatattgatacaatgattatcaaaagggtttaataaacgtgttaaaaacgctgtaagtattgtaaaagcaatgccgtaagaattcatggaaaaacaaagcaaaacaaaacaagatttaagtgtcttaaatgcttaagaacatttatttggaagaaccgtagcaacaaactcaagaaacagaaagtttggtttaaattgtggattacacaaggctacactgtaaaacaattatcaaaattgtcagagcattcgcaatctacaattagaaggacacttaaatactggctttcaaaagagcctaatctttgtgatgaaaaagagctgtcaaaaatcacacatgttctttatgatgcaacatattttcacagaggcaattgctttttggttttggctgataacaaaacaaaaaagatatttttctgcgaatttgttagaagcgaaaactatcagcaagcaagaaactattttgacagattaaaagcatttggattaagaccaaaagttttaatttccgacgcgaatcaaacaatattgaaagtctttcaagatgtttgggctaatgccataatgcaaagatgtttgatccatgccagtttccaaacaatcaggtttttgcataaaaactctaagacaaaagcggcgcaagacttaaaaagcattgccattgcctgctcaagaattaaaagccaaaagaataaagaagaatttgaaaatgcttacacaaactggcgtttgaaatatgaaccttttataaaatctttgccaaatgaaagctatgaatacaaagaaataaacaaagcaaatacttttttaaaagactcgttaaaagatattttctattttttaaaagatcgtcaaatagcaagcaatacgaattatttagaaaatctatttaagacattaaaagaaaatatacgccgtcataatgggcttactaaaaaacataaaatcgcttttgttaaatggttttttttctttaaaaaccccaaaaaaaccacactttttgaacattaacccttataaaaaggggtgcccgatagggcggggtatttgttgttgctgttgattcttaatttgtaattaaaacaaacaatctggcgcttgtaagtaagatgttaatcctaaaacaagcctgccctataaataaggttgtaatacagggttagcgcctcggagtctgcgtagcagcagggtatttgtggcataatatataaaaaaagttgctaaaaaacccaaaaaagttttaaaacatagatgacaaaatattttgaagcttatagttgcttgtaatttcggaagattgccggttcatttattttgtatccatatttttaaaagaaaatatttcacttcccgtatttttgcgcgtaatcgttaattgcgtttgtggcgtttaaaatattgttaacggtgttacatccgccaacgcatccgccgaggcagcacataacttctataaggtttgccttagcgtgacctttcgcgtaagatttaagttttaaaattgtttttttatcaaaacccgccacatgttcttctctaactttttgccgcgcggctgcgcttaaatatcttttaaccgcgtttaacactccgccgaaagtgccgaacgtaagcgcttcttttgttatggcaagtttaaactgttcgtttatgcaatctttaagatttatatttttacctttcatcatggcttcaagctcttcaaagcttaaaacaaaatctaccaaattatccttttgcgcttccttgcgttttgacaaacacggcgaaataaaaaccgtcgccgcatgcggattttttttgcgcgcaatttctgccgcgtaatgcattggggtagcagtgtgcgaaacaaaaggcacaagttccggaatatgtttttgaactaaacgcacataagcgtggcagcacgacgttgtcataaaacgttcgcctttttgcaaaacgcgttcgttaaattccgcggcttcgttttcggcggtaacatccgcgccaagcgcaacttctataacttcagaaaaccccagctcttttattgcggtttttaatttgcccatgcttacgccgaactgtccggctattgaaggcgccatcagggcaataagttttttgttgcttttagttaattttaacacgcttaaaaattgcgttctttcaataaccgcgccaaacgggcaggcttttacgcacttgccgcagcttatgcacagcgagtggtcaataaccgcggtatctttatcggcgcctttgtcggctttttttattgcggataccggacaagattcttcgcacggaacggtaattttcaaaattgcgccgtaaggacacgcgtctttgcatttgccgcaatttttgcaggtatcctgatttatttgcgcgcggtgattgtttacggacacggaagtaaaaggacagcttctaacgcattggcgcgacaaacacccttggcaaatttcagaaaccatatatctgctttttacgcaagatttgcacgcagaacgcaaaattgtaagaagcttgttgctggagtggtcaaaattcgggttgttttgcgcaacgtaatccgtaagaggaagcgcttcgtcaatttcgtttacggaataaccaaacgccgccaaagcgcgaagacgcaaaattgcgcgctctttatattcgcagcatctgaaagttgcttcctgcccttttggaataatattaaacggtatgcggttagcgtctttttcaagagttccggcgtaaaacgcgcgggctatttcttctaaaacttcggttttaaaatgttcggaataatttttatttaagttcataatgcaaatattttagcatataaa

SEQ ID NO: 861 - DNA, 14968 bp, synthetic construct
  misc_feature 1..14968: note = Synthetic
  source 1..14968: mol_type = other DNA
acggcggcaattacgataaacgaaaacgcggactctgacgtttgcgctgatatgattcaaggattgaaaaatatttcgcctgctgacaaaacttacgcgcacacggaaggcaattccgacgcgcatataaagtcgagtttagtcggcgcaagcgaaacaataataattgaaaacggcaagcttgttttgggaacttggcagggaatttatttctgtgaattcgacggtcctcgcgatagaacggtttttataaaaacaatttaggagcgtaagatgaaaacatatcgcaaggaattggtttttaatgtaaataaacgggttgattttataaatattacggcagaagtagagcaggcggttattgacagcggcattaaagaagggcttgttttagtaaacgcgatgcatattaccgcaagcgtgtttatcaatgacaatgaaagcggtttgcataacgattacaaacgctggcttgaggagcttgctcctcacgagcctatatcgcaatatcaacacaaccgcacgggtgaagataacggcgacgcgcatctgaaaaggcagattatgggacgcgaagttgttgtggcaattacaagcggcgagcttgatttcggcccgtgggaacaaattttttacggtgaatttgacggcaaccgcagaaaacgcgttttaataaagattattggcgagtaatagcaaaatttgcggttaaagtttaaagcaaaacaattgtattttcaataagtttttatatttactactagttttctactaaaatctactagtgtagtaattgacaaaataaaacagatattatatactaattactaataataaaactattggtaaaataaaatgaaattacctgaaaaaccaaattttgattggaagcttatattagtgcaaataaatcatgagccaattatgcagtttttaattgattcaaattctgaattaaataagtctataaaaaaagcgattaataactgtgattactgggatagtgtaaaatattatcagattccggataatataactccggaacaattttggtcattgattaattttcaaaaattgagtattagtaaaaaacaaatagaaataggcggacaagaatttaaaattctagaaacatcagaaatacaaaaaaaattaagcataattgacaggcatttttctaaatatagtttgacagtagaagaagcaaacgaatattccgtaaactcattaatggaagagggcattgcttcaagccagcttgaaggcgcggctgttacccgggaaattgcgaaagaaatgcttagaacaaacagtttaccgaaaagtatagacgaacagatgattttaaataattacagggcaatggaatatatagatacgaaatgcggcgatacgttaagtccggaaaaaataaaatatattcacaaaattattacagagaaaactcttgaaaatgaagaacaagccggaacattcaggaaagatagcgtacatatcgttgattcaagagataatactttattatttgatcctcccaaagcggaaatcgtcgagaagcttatagaacaattatgttcttatgcgaataaaaatgacgaagatgattttattcatccggccataaaagctatagttatacatttttggcttgcgtatgcgcatccttttattgacggaaacggccgtacggcaagggcattgttttattggcatattttaaaaagcggatataaaagttttaagtatttggttatatctcgcattttgaaagaaaagccggctcaatacgcgagagcctatctttatagcgaatacgacaataatgatttaacttatttcattaattttaatttagatgtcatacttgagtcgataaaacgttttgatgaattcgtagaaaacaaaaaagcggaaaacaaaaaaactgcggatttgatagaacaggatatagaattaaatttcagacaaagaagcataatgaagacgtttatcaaagacaaaaatatcagaaatatagaatattttaaaaatactttaaatgtcgcttatgaaacaacaagaaaagatcttgattttcttgtaaaaaagggctttttggtaaaaaacaaaaggattaaacaatttgtttattcccttagtaataaattaaagggaaaattggaaaatagtaataattagaaattattgtattttcagtagattttgatattttctactagttttctactaaaatctactagtgtagtaattgacaaaagcaggtattaattcctctcttttgtcatccccgaaggtcgtaagagttttttcaaaactctgccttcggcagttgcgggggtccattttataaaataaattcacataaaggaaaaggaaatggcagacaaagacatcaagaagaaagaagaacaagaagaagcgcttccggcaaatattttgccgcgcaacattgaagacgaaatgcgaacatcttacatagattacgctatgagcgtaatcgtgggaagagcgcttccggatgtgcgcgacggcttaaagccgattcacaggcgcatactttataccatgaaagaaatgggtatgaagcacggcaccgcatataaaaaatccgcgagggtcgtcggtgacgttatgggtaaataccatccgcacggcgacagcgcgatctacgaatccatggttcgcatggcgcaggaatggtctttacgctatccgttggttgacggtcagggaaatttcggcagcatagatggcgactctgcggcggcgatgcgttataccgaagcccgcatggacgcgattgcggacgaaatgcttgccgatttagacaaaaacacggttgactttatgcccaactacgacggctcgctaaaagagcccgtaattcttcccacgaaacttcccgggcttttaattaacggttcgcaaggtattgcggtaggtatggcgacaaacgttcccacgcataatttaagcgaagtctgcgacgctgtttccgctttgatagacgatcccgaacttcccgtttcggaaatcggcaaatacataaaaggcccggattttccgaccggcgccataatactgggcaaaggcggaataaaagattatatgatgaccggcagaggctccataaaaatgagagccaaagtcgaaattgaagaagccaaaaacggcagggaaaccattatagtcaacgaaattccttatcaggtaaacaaagcaaatctgataatgtccatagccgaccttgtgaaagataaaaaaatcgacggcatttccgaccttcgcgacgaatccgcccgcgacgacataagaatagtcatagaaatcaaaagagacgcgaacgcccaggttgttttaaaccagttatacaaacatacggctttgcagtcgtctttcggcgttataatgcttgcgcttgtcaacaaccgcccgaaagtgatgaacataaaagaagtgcttgaacatcacatagagcacagaaaaattgttattgtacgccgcacaaaattcgagctgcaaaaagcagaagcaagagcgcatattttggaagggttgaaaatagcggttgacaatatagacgccgttgtaaaaattatcagaggcgctaaagataaagacgacgcgcgtgaacagctgatgacaaaattcaaactttcaaaagcccaatccgaagccattttggaaatgcgtctgcatcagttaacaggccttgaaagggaagaattagacaaagaatatctcgaaataataaaaacaatcgaaaggctgcgttcaattttggcagatccgaaaaaagtttcggcattaattaaaaacgaagttgaagaaatcaaaaaagattacggcgataaaagaagaacgcaaatccaggctgctgaagcggattttaatattgaagatttaattcaggaagaagaagtcgcggtaacaatgtcgcacgcgggctatattaaacgcataccgctggacacttacaaagcgcagcacagaggcggccgcggaattaccggcatgactacaaaagaagaagattttgtagaaaatctttttattacaagttcgcacgcgtatcttttgttctttacaagccgtggacgcttgtactggaacagggtttacgaaatacccgaagccggcagagcgtctaaaggcaaagcaatagtaaatctgctgcagcttgctccggaagaaaaaattacagcggcaatacctataagaacgcttaaccttaaagaaataaaagacgaatatttattaatgtgcacaagaaacggcacgattaagaaaatagcgcttgaagaattttctaacccgcgcaaaggcggtatagtagccataaaacttgacgacggcgacattttaaccgaagttaaagcggtcggcaaatgtccggaagtgttgatagcagccaaaaacggccaggccatacacttcaaagtagacgaagtaagggctatcggaagaaccggcatgggcgttaacggcatagatatagaaaaagatgatgaagtaataggaatggaagtgttgtgcaagggcgatacggtgcttgcggtaagcgaaaacggttacggcaaacgtacggaagtcagcgaataccgcttaacgcaccgcggcggcaaaggcgtaataaatatgcagactacggaacgaaacggcaaagtaataggcataaaacgcgccaacgcaggcgaagaaataatgataatgacgcaaaacggcataacaataagaatgaaagtggataatatttctgtgataagccgaaatacccaaggggtgcgccttgtcaaactggatgcggacgacaaggtagcagcgatagccagcgtggtaaaagaagaagacgaaggcgactcgccggaaacaacagaaaagaaataaaactgaaagcccctgaatttactaatttagggctttagagtttaggttcttgtaacctagactctcgcatttggatttagtatcatgtgttaccgtaaacgtaattaaatgttttttgttcaaattgttcttttagaagatgttaactgccggccgcatcaaacacggcagctttcataaaaataaaatgggaggttttgttcatggctccagaaaacgatgacaaagacattggcagaagaattaccgcttcagacataaagtttcaggacaaatatgtcacggagaatataacggtaaaacagaatattcttacggaaaatattcgcccagaagatgaagcaagaataataacagcggatagaagcaaagctttactcgaaaaacttgaaatgctgaaatcaaatcaagcgttcaatcaagttttagatgacaatgaactcaactcaataatagagaacgttcagatggcgacggaatattcgagagtttctcctatgcaaatatcccctgcgcttaagataaattttgaatccgtgaaaattgcgtctctgaagctcaacgtcttaagagaaactttcgtaaaatccagtccttttcccgacgccatatacggccgggtaaaatattcttccacgtacaattcccgccccataacaagcgcaaaagtgatattgctgttttccaaacaaaataccgcgccccaaaagaacgtgcttaatagactcataataatgccaaacgatgtattctacgcgtacgacataaccgattcggacggcaaattcaatataacaacgcccaacggagcgaaattattcgattttctgcagatttcaatccagcgcggcgcaaactcgtatacactgcgtttatcgcgtgacgaagtctttaagaaaaaaggcgatctcggcgacataatcgtcggcgatgaatttttcgagtctgaaggcatggtgtcgaaactcacgcttatttccgaaagcatcatggatcttctcgggcgaaaagaagaagaaggcaaacttgaagacaaatccggacagattgaagtaaaactcggagaaggagatcaaactttttctctcaactggtcaaaatcttcaagcgctaattttaaatacaaagttttgcacagattggttgagccgagcatgtctcctccggcaggcagcgacagggaacgcgtcgacctcaatgcgcctatagacgttacggctttcaaacaagcctttatcaaatatccgaaaggacagccgcggatgtcttcgctcggcatgggatatgtagtaaccgtcgggcaagaatggaaaccgagccatttttcgcttgggaccttgctttattcgctggcgcttgctccgggtgaagagcagcgcattgccgtttccgaacgcagcgaaaccatgatggttaccgaccgcgaatccgttacctcgcagcagtccagctcttatacttcttcccaaaacgacgatttatcggctctatacaactcttctctcgacgaaaccgcaaacggaagagccagtatgcaaagccacacccagggaggggcaagaggaagcagcagcgggcttttaggcgccatattcggaggaggttccggttcttcaagctattcggacacaacggccagccagtctttcagccagtcgcataatcaagactataccagctccgcggcacagagcttccagcaaaatatacagcgcaatgcttcggcggccgctgcggccagccgcgtcggcattcgtcttgcttccgcccaggaaagcgaaatggtaaccacaaaaatcattgccaacaacaaccattcccacgcgctgaccatgcaatattgggaagttttgcgcaattatgaaataacctcaagggttgaaaatgtgcagctggtcgtgtatattccgcttgaactcatacagtttctgcctaccggtgaggactttgcgctgactcccgagacgctgcagggaaggattatctcgccgtcggcttttataaaaaggtatgcgcggctaatcgaatacattgacgcggttgcgtccgccattacgccggaacactctgtcggactcgaaattttgaaacgcttctgttcgtatcccaaatgggaaattttatctgaaaagtcctcggcagggttttccgtaacattagagataaagggaagtttcctgccttttgacaatattaaagccgcaatacggctcaaaaacggcatgcggatatattccgacgatattacctataccggattgtcggatatctcaaagaatgatttccatacaagcagcgaactgcggacagcgataagcaaattgcgcatgaattcaaataccgccgcaaaagcaacgtttactataccgcaaggcataatcgacgacgatttccaaagtcttgaaatcaccaataccatttcaaacttttcttacactttaaagcctccgcctcatctggcaacgttcaacaatctcagctctttgcccagctggctgaggtcgtatcttaatcagtacgaagcgttcgccagaccgaacgttaatttaactttcaacgaattgtcgcagctcggagcattacgtatcgcctccgttgctctcagaggtcaagataaccaaagcgcttatgtcaacaataattcgaacctgcatttggcatcttccctgcaatttcctatttacgacaaagtaaaaaccatgactttcgagcaagttcaaaaaatcgagagcatgttccggcacgtgctggaaaactcggtttattattcgcaggcggtatgggcgtatcttccgcctaacgagcgcgccatgatgcttgaaaaatatacaatcggcttaccggacaccagcggagatatcggttcgagtattccgcttatgaattgcgtggataacgaaatatacggtttttacggcaactgcatgctgatgccgttttcttatcctccgacattggcaagcaggcttgacatcactaaccgcgaagtgcaggacgcattgtataactaccatacgatggctttccgcgcgccgagttttatggtttctctgccgactcgcggcatggtcggagaagcggtgcttggcagcagcaacgcaagcgaaaaaattgatttgacgcgtttctggaattggcaggattccccgattacgcacgccgattcgataaaaccgtccgattttaaccaagaccactttataacaaaagatacggcagccccgaaggaaatcgcaggcactaccaacaatctcacaatcagtcatcagggagaacaggcgaaagatttacttgcggcgatagcgcaaagaccggaatcaatgcaaaatatgagctttagcgatttgcagcagcttgcgtcaaaatcggttgaaacggcgtcaagcgagcgtacggaagttctcaaaaaccttacttctacgactaattccgcaattgaagccgtatccagtatagtgcaagcttcgatgggtgtcaccccggccgggcaaaacaatcaaaacaacggcaacaataattcgcaacagggcggcaatcgaggcaaccaaggcaacaataataacaccaataataatacagggcaaaatggcgctccggaaaatacgcaaaacaataatacgccggcaggatccaataataacacaggtacaggtacaggcagaggagggagaaataatggataatacaacccaagaattttatcagatgcttttggacattataaaacaggaaaattcgccggaagcagcggcagcccgcaacatgattttacagcggatagctctttccggagacgttactccttcaagaatcgaagctccgcaaaatattacgcaaatcggcggatacatcaatctgttggaaagttacggacaaaccgaaatgcgcaatcaaatgctggcttccgttctgggcattgcaaataatgcggaaattccgggatatatttctcctgtgctttattttgaaatgaaattaaacgacagacccgaatgtcctcaacaagcctacctgccgcttagttatcatatgcgaagcgatttttcgcccgcttttgccgtctcaatgaacgaattgcataaggcaggcgcgtatcttccggtagtctcgcaaaaaccggcgcttccggcgctgcatgccgctgcgccgtcgtcggacgaaattttgttcctgctgggcagaatgattatgatttctccggtagcggcttttagcgaccctgaaaccgacccgattgtagttgaaggaaaatccggagtaggcgccgtttatgtgcgcaccggaaacaatgcggacaagaaaacgcttgaagtatttgtacgcaaagaggattcttccggctatgagactaaggaagttacgggtttgtttgcaccgcttgcggaaattatgaaaaagtccggctggattgcaaaagaaagtgacggcgataaagatgatccgcaaaaagcgttatgctgggttaattttacgggtctgatgcctgaaacaagcaaattaggcaaagaacttgctcttttatacgctccgcagcaaattacggcgtctaaagtgcgagaaatgctcaatataacctttaatggacagggattcttttaatatttttagcatggagctgttgtgtttcagtaaaactgaaaccgattataaaatttatcagtttaacattttgtattccttgtcaagcggccatgcttgtagtacaggtatttaattcactgcaagtacaaaaaagttaaacaattaaacccccgcctgtaaatttatttttgcaggcgggaggttaatgtggatcctcgattaaaacctgacttttcttcaaattcgctaaattttaattcttattgccgtttgtatggacgcatttctgtttatttcattgaaagttttgatacgaaattttaatgtttccatcttttaaaggtagcagccatcgcaagcgtggtaaaagaagacgaggaaggcgactcaccggaaacaacggaagaaaagaaataaatacaatacaaagcccctgaatttgatatccagaggctttgtattctaagatagatattttatgatacaggcaaagatatggaaaacattttaaaaacaaaatataattttattgatgagattgaaagaggagtgttatatgccaaaaaacgagcttatttattcgttcgatttaggttctggaagtatcggcatttgtgcaagaagcggtaaaaaagttttatatttggactctttgcttatagattctgaattcgcttcagtcaaagaagcagcagccagaagaagacaaatacgcactcgtatagctcacaaagaaagagaaaaatggtggaacgaacaagcagtaaaatcaggaatagaagttctctcaacagcccagcctacaaaagaaaatccaactctaaaaacagataaaagaatattaaccgaatttcttcccaaagattcaaaagataaaacaatttattcatcgcatcttttaagaatagctttgttgcaaggtgtccggttggaaggctggcaagtgtataaagcgatacattctgcaattcaacgtagaggttatgacgcaaatttaccttggggttcaggaacagataattctgatgaaaaagacaactcagaaagttcaaacatatataatgaaaaactaaaagagttttttggcgataaagaaaaatatcattacccttgctattatgaggcatatgttcagggaatatggtctacggaaaatcctaaggatttaagcggcaggttatctgaaaatccaagccctgcaagaaataaagacaataaacctgcgcaagaaaaatgtttcccttcaagacaacttgtggaaaaagagctaaaagcattgcttgcaagcgcagcacaattttttcctaaacttaaaggtaaagaagatttcatactttatggccctgcggaaaaagcatacgcttcttataataaagacgataaatatactcaatacaggggcacaaactgggattggaaagggttgcttgggcagaaagttccgagatttgataacagaatcattgcaaaatgccgcttaataccccggttaaatgtttgtaaagccggtaaacaagtcaataaagaagtttcatttttgcttaatctaaaaaatatgagatattcaaaagacaatacgacttctatggcattaacgccggtacagataaatgatatttttaaagtttatacgcaatatatagaatcggaaaaagagaaagagcaaaataaaaaatcaggagttaaaattcaaaacaaaagagccggaaaaagtaacccgtttacaaaaactttttggaaaaactatgtcagagacacattaggcagtgaaataaatgtcgggcaacaggaaataaccaaaccaaaagacggcggcagaagcagtttttgcaagccggctctgcatatattgcacggtctaattttatcaggtaaaaaacctcatgattattataaagaacttgtagctgcaaataaaaatacggatatcaacaaaggacttgttaaagacgattataaatttttgctcaatatgccaaacgactggaattctataagtattcaagacacaagagaagacgataaaaaactatcgcaaaaagatgcaaaagataaaataaaagacatcatatcaggcgtcagcaacagaatagtccgccacaggctaataatgttggttaaacaattagaaaagttaagtgacaaacttaaaagagaatacggcgaccctgataaagtaatttttgaaatcgcaagagaggattttattggagagaaaaagaaaaatgaatatataagttctcaaaatgcaaataaaaaggaaaacgaagccgcggtgaaaaaattaaaagatatgggtattgccgtaaactctcaaaacatattaaaaataaggcttgggaatcaacaaagatggaaagatatatacgacacgtctgaaaagcgcgatttaattccgcaatatatacagaaatatgaaatagaccatattattcctcaaaaacttggcgggtcggattcttttgtcaatttcattttaactaaaaacgcattaaatcaggcaaaaggaagacgtacgccgtatcaatggttgcaaacttcgtctaattggcaaacatatcttagtaatgttgaagcgttttcaaaatttgcaagccctaaaaaaatagaattgcttacctcggataaagctattgaacttgaaaaacggaaaacagatttgcaggctacgtcgtatctggaaaaattggctcagcaaataaccggcttgtattttggctttggaataaatacaaaagacgataaaaagagaattttattttataccggaggcgaaacggccaacgtcagaagcaagctggatttaaacgagatactttactcaagcaaagaagaatatgaaaaagcaaagcagtcaaacttaaaagagaaaaacagaaaaaataaaaagcatcacgctttggatgctctcgttttaagtttgttaccggaaataaaaaccaaagcaaaagtagtagaagaaaaaccggaatattttaataaggaatattgtaaaaaagaaatatcaaaagttatcccggaaactataaagcagataactccgaagccaagacagactatatatgctttaagatgtcgtatagaagaagatggggagaagcattattattttgtttcgagatttaatagtaatttatctttatttacgaaaattgcagatgcaaaagaagaaagtaaaaaaatctttgatttaaaaatacaaaaagattttcaagaaaaattaaaagagaacggtttaacgcaagaatcttgggaaaaatggctaaataaatattcagggtacgggaaaagaattaaacaaatagcaatgatagattcaaagagttttgatgaaaaagatgtttttaattcagatggaacaaaaaaagaaattatagacaaatatggtgataaaggcgtaatgcgcggacaatggattagaggcgaagaaagccatcaaggtcaaattgtttataaagaacaaaataaatggaatgttgaacctatttatgtttttgagtctgtatataataaactgaaagaatataaaaataaatatgataaagttaaattttttaagtcaggacaattagtagtattaaaagaagattgtaatgatataaaatcaggtgtttataagctaagaactgtcaaatcaagtggaaggtgcaaaatagaaagtgtagatactcaaaaagagatagaaaaaaatattgctatttttatagaacaatatggtatggaagtttataaaaagcaatgagttatcatataatacatatcttaaatcatgcgagtaggctgtctgttgatagaggctgccttgtttgtgacattccggataaacctcagagacgcgtgcctttggaagatattcttgcagttatagttgctgcaaaaggcgttagcttttctgccgagtgtttagccgccttgttaaggcataacagcgttgttctgcactgcgaccacaattataaacctatcggtaaaaccgtggggcttcacagggtagttcataacgaacttttagacaggcagatttttcaggatatttttttcttaaggcaaatgtgggacgaaataatacttgcaaaagtaaagaatcaggcttttatattggaccacatttctgctgaacataagctatggggttacataaaatcaggcaatttggacgaaggcaatgccgcaagacattattggaaattttattttaaaaaattcggccgttcatctccgggagtgagagtaacaaaaggagctggtgacgcagtaaatggaatgcttaattacggctatgcagtgattgctactatatgtaatcgtttgcttttggcacacgggtttaatcctgcggtaggtatatatcacaaatacagatttcgttccgaccctttggtttatgatattatggaacctttaagacctttttgtgattttatgttgttgcgtttcagacaagcaaatcctcgcagtaaaattgacgagtgggtaaaatttgcggcaaaagatataatattttcaaaagtaaatgcattcggttcaaaaaacatcagttttaatctcgcaatagatagatacataacgtctttttccaattgttttagaagtaaaactttaaataacctttatatcccttctctcaaagatacaaattttagccatgaaaaataattacataggcaggtatagaatgggctggctgcttgttttatttgatttgcctaccgatacaaaagaagaaagacatcaagctacaaaatttagaaatggccttttggatttaggttatttaatgcttcagtattctgtttatgcaagatgcgctgttacattagataaaaagaaaggacttataaacgatataaagaaaattgcgcctacgactggaaatgtgcaatgttattttataacagatatacaatgggaagaatgtattacaatcactaaacagaaagaaaaaaatactcgccaaatagacaacaaagacaaaataaacgagcaattacaattctggtaaaaattttaattaagatctgctttgcgtacctttaagtagaggcaacgcagtcttaattttagttgaggcgggactaaaaaactgaacttactttaattttacaaaacacaggacttttttgcaaattttaagagtgaatcctattataacaaattcagttttttagtcccgtcagaacttaatttccgtttcatcttataaagaagttattataacaaattcagttttttagtcccgtcagaacccagtacgtttttatacgatgtatgatactattataacaaattcagttttttagtcccgtcagaacgcccgggagtacttatatgcaaaaaatcgcattataacaaattcagttttttagtcccgtcagaaccgattcgtaaatcgcctgcaagcttatttttgcagacaggcggggggggggggaaaaaatacctgggtttttttttcctttttttttttttaagtttttttttttggtcagggggatttttt

SEQ ID NO: 862 - DNA, 23840 bp, synthetic construct
  misc_feature 1..23840: note = Synthetic
  source 1..23840: mol_type = other DNA
tgtaataatagcgcgcggcggcttcgaccccgcggcagctgttgccgaggtcgacgcggttgaggtaggcgcgaaggatgtcgtctttgtcgtgctcgatttcgaggcggcgggcggcgagggcttcgcggattttggtgccgaggctgcggcggccggcggggcggctgatcttgaccagctgcatgctgatggtggaggccccggagcgcgagctgccgcgcaggcgccccgcgacggcgcggccgacggagagcgggtcgatgcccgggtggctgtagaagcgtgcatcttccgcgcagagcacggcgcgcaccaaggtctcgggcaggggaccgggcggcaggggctgcgtgcgcatgccctcgccgtcgcgtcggtagccgagcagcacgccgtggcggtcgcgcacttcgccgtccggcggcgcgctgcaatcgatgctcggttgcgtgaagggcaggaggtaaaggagagctgcggccagagccagcggaaccatgaccgccagggccagccatctccgccgccgcttcttcttccgttcgcggggatcgtcgagggaggctgcgccgcgggactcctcaggcgtcgggagctcctcggtcggcggggtctcctcggtcggcggggtctcctcggtcggcgggagcgtcgaacggtcggcggatgcggctgccggttgcggggacttcatgtcggggtgcgggtagcgggtagtcgtcggggcggggtgtcatgcgcctgatgggctgtggcgatgcaccggggtgaggctttgggggcgtgggggctttgctccccgccgcaccggcggcggggagcgtgttacctgtcggggcgttcctgtttccccccgacatcattcagccggctcggcgctcagcttttcgggcgtcgagagaccgtaactttgcgggctgtacatcatctcagcgcgggcggcaggcgccgtgacctcaccgctgcgcacgacgcgcgcgacgtagcgcacgcagacgtcgccgccccagctgttgacgtaggctctgatgccgtccttgccggtggagatatcgctcaccgaggaggaggcataccagccggagggctgcaccagtcgagcgacggacggcgcgagactctgcgtcgggctgttcgggtcaaccacctccatgacggagggcaggcgatcctcgatggcgacgtagcgcgagcggccgctgcccgtgtagcggcagagcagcgagacgcgcactacgtcaccgacccgcagcttctgcgtggctttccagacgccgttctcctgcagcgcctcgtagctgcgggtgatgaggaagccgtggtcgacgtgctgatcgggctgcgcgtcggcctgatatccctccaccgtgccgaaagcgtacaccgggccgccctcggcgaggaagacctgattgctcagatcgagcatcgccgagcggtgcagcagggtgccgggcttgatggcctcgccgttgagggtgatcgggccggctgcggaaccggctgccgtgccggccagcgtcggtgccaccttgaccgccgcttccggggcctgttgcggcccctgcgccgcggggctggcgtcggcttgctgcggcgcctcgggcgccgaggcggcattcgcgtcaccgccgctcatctcgctgcccgcggagccgctcagagccaggtcggcgaggtggcgccggtggtcgagcagcgcatcgatgaggatgcagctccagccgctctcccaggtcgagaggcatccgccggagcgcttgcgcagcacggcgcaggcatcggcgatcagccgcgtgtcgttcgggttgctgtagtggcggtagagcaagctcagaaggtcgcagggaacgctcagacgccgcatctcgacggaaccgagggaagcggctatgtcttgctccacctcgggagccgcgtgcgcggctcgggcccggtcggccagcgcggcggcgcgctcgtccttgatgatggcggcggcgcaggccgtgagccacagcgcatcctcccgcatcttcgggtgcgtttcaagcagcgcagagagatcctccgcgccgaacgtaccggcgagcgcgagcggcagcaccgagatgagattggcctgagtggagctcgtgagccgatccttcagaccttctcggacggagtaggagagccacggctcctgatagccgtgcttccctgcaatttgccgcaccagctggacgtagggggagaactcggcgttgacgtccccctgatcccagtaggagtagcccgcagcccggccgttattgtacgagatgcgcttgttcagcttcgagagcgtctcgctgatgacggtgtagggcgccttgcccgcgggcagttcaaagcccggcagatccttgagctcatcggccagcagccagggcagcagggccgagctcagctgctccgagcaaccgtgcgggtagctgaagagaaagtcgaaggtgcccgcgatcggcgccagcgggtgcgtgctgaacgagagattcagcggggtgcccgcattgaagttcagcgtcacgaattggcgcgtgcccatcgcctcgcccggcttcatcgtcgtgcagacgtactcgcgcaggcgcgggcgcgccggattgatcgggaagctcagcttcaccgcatcccgcatgcgcttggccgccccctcgggcagttgaccctgctcatcgacgggctcgacatgccagctgatcgacgcctgcgcggcctcggacgccgccccgacctcgggaaggctcacgggcagggtaaccgtcaccggcttgttgcccgtcagatcaaccgtgcgagacgcctcctcgaggctcagcccctgaccctgcgccgtcagacggaatcgcaccgtcgcattcggatcaagacccttcacctgctcgggcagcatactgagcgtcaccggcagatcgaggcgatccccctccgtcgcagccatcggaacctgcggctccagcatcaccggctggttcacctcatacgaactgcgtgcgcgcccgaactgacgaacccccgacgaagccaccgccatgagacggtaacgcgtgagcgtatccgggttgcggaaggcggcggagaactcgcccttctcatcggtgcggatgctgcccagccagagagcgcagggcttgaaattctcgcgcagcttcaccttggtcatcggagccgcgtcgctcacatcggaggccatgccgtcgccgccgccgatgaagacacccttgttgccgtagtcatagatgctgagagcctcgccgatgagctggttggccgagttgcgcgtgctcacccccatgcggacgtcggtgttgaagaagcgcagcgggtccggcagttcgtagccgtgcacctgaagcgttccctcatccaccgcatagagcgtgacatccgcccccggcaccggagccccgtccgcatcgcacaccttgccgctgaccttgcagtcctcatccggcagcagactctgctccggtgcctgaagctcaacgctcagcttgtcgtgcgacggctcgacgtgcagcatcgtcgacgccgagagaatgttggccgtcccgtcctcgctgcgcgtctcctgcgagccctgaacgaggaaggccgtcacgcgaacgccgggcgcatcccccgcctccagcggcagctcaatgacgggattggcgggatcgatccgctggctgaagtggcgcagcacgccctcgcgctccaccgtgacgaagagctcgccgccggccggcccctcaaagagcagccgcgccgtctcgcccggcttgtacatgcccttgtccgccgtcaggttgagattgtccgcgcggtcatagaaccaggggcactgcccgtcgccgtagaccgaataactcatcaccgtgcggaagggacgccccgaggcatcgctgcccgagaccgtcacctcgtagatgcccgagcgcggcgtctccaccgtgagatcgggctgcgccttctccgtgccgttcagcgtgatgggctgcgcgtcgacgagcttctcctgcatcggcacctgccgcacctggccgaggaaacggttgccgatgcgatagggcgagaaactcttgcgcgtgaccgtgatgcgccccgtcacgggctcccccttccaggggcgtccctccgtatccaccagcaggcagttgacgggaatcccctcgccgacgcggacaatgcgcgcgccttcgcgcagacccacgtacacatcggccgggtgcagctcatcatggcaggtcgcgcgcagcgcctgattgttgccgttcgtcaccgtgagactcgccgtgagcacgcgccgctgatccgaggccggcagcgtgaaactcatccggccgcagccctcatcatccagcctcgtgtcgctgctcatcgtctgccccgacggcttcgaccacgcatcaatgccgtagtaggctctgtagaaatccgcatcgtcggtgccgtacccgtaatcgccgaagcggtagtggcggtagcccgcagggcagaagtgactccggcggaagtcgagctgccagtcagccttgccgtttgccaccggagccgtcgtgaagttcacggcgcgcccgctgatcgtcaccttgcgctgcgccgcatcgaccttcatcgagctctccacctcaaactcattgcggcggaaatccgagacgaagatgttctcctgcccccggcgcgcatactccagcagcagctcgcgaaccgccttcacatcgcccgggtcccggacgtagtcagccgccagcttcatcagctccgagctgttgtcctcatcaccctcatagcgcgccagaagcttgacggagagagaggagccggccgccgcctccaccggaagatcgaggctgaaggccccgttcccctccaggcgcgccggaatctccttcgcttccccctcgcgatccagaatcgccgtcaccgagcgcagcttcggcacccgcagctcattgccgcgccgatcgcgcacgtagcccttgaggtgggccacctcgcccgggcgatagaccctgcgatccgtgaaggtgtagatctgcgtcaccggcagcggattctcccgcagcttcgcggaatcgagcatctcattaatctcaaagtgaaaatactgcacatccggcatcgcctcgtagtcattatcctgcaagcgcgaaaactccgtgatgtagctgtcctccccgcagctcagctgcaggaaactcggcttgctctgcgtctccagcacaacaaccccgtcgcgaaccgcgtgctcctccaactgagaaccatcagccccgagcagacgcagcgtcccctcgcgcagaggcttgccgtccgacaggcggtaggcgtacacaagcacgtgtcccttccagcacttccacatcaggccgagatccgtcaactgcaccagcccctgcgtcagcaccttgccctcctcatcatccaagccgccgtcactcgccgcatcagcctcgaactccacaaaatagagcccgtgcctccccgcattggggaagagctcgcgaagcgacacatccgcccggccgaacgtcgtcgtgagcgccttgctcgcctcgcccagcacacccggcagcaactccgtcggcacaatcgtcatcgcccctccgcggttggccaggcgcgaggcattcgtatccggcagactcgagtcgcgctccggcccgtaatagttgcggtaggcccgcagcacgcgcgccgcattggacgccgaggcatcgagccgacacacgtgcacgcggagattctccacgttcttcgcccggcacgaaagcttcggctccccgtccttgcccggactcagcgtgccgaaggacgcatgggcctgaagctgaggctcgcggggctgcacagccgtccagaaactgccgagcaccttgtctccctcatcgccggcagactccagcgtgagcatgacatggcggttgccgttattcatcttccagatcaggcgcgtgcagagcgtcttcgtgctgccgtccgcctgcggctgctcgcgccgataggcccgcgacgcctccgcatcgaggcgcagcaccagctccttgccgcgaatcatcgcgcggaaagccccgtcgcggtaaaccatgggcacgggatccttcgcgtgcttcatctcgtgcaccttccacttgaagcggctcatcagcgcctcaggatcgctgagatcaacacccggagccaactggagctccacctcatactcgcaggggccgagacgcttgttgctcaaaaacacgtagggactgctgcactggctgaccagacgctcaacatcctcgtagcgcgtccccgcggcgttcggactcccgaagcccggtatgacgatctgacaaacatccgtcgcctccgccggcagctcaagataccagagaccgcgcagcggctcatcagccggcccggcagcaaagagagccttgtctccctcattgagcccgtagcaatcctccttgagcaaggtccagtagtgcagcacgtcgcggcgcgtcgcacggcgcagcttcaccggcagctcgtgctcgtccttgcccgtcgacaagcagcgcagcgcccccatcgcccgatccagcatcgcgatgcgctcatcgctcccgtcgctcgtgtagaggaacaccggctggcccgggcccggctccttgatgcagaccagatcatacagcccctctccgcagaaacgctgcggctcgatcaccaactcctcccccttggtgccgcgaagacccgggcggagactcaccgtcgctacatccggagccgagggaacatcaaacgcaaccaccagcgtcgtgcgattctgccagagcgcccgaacgcgcccgcccttgtccacaatcaccgcatcgccggcatcgctgcccacctgatcctctcggatcacgggggaggggaagacaatcaggcagctgcgctgcccgttggaagcccactgccgcagcacctggcccctgcacttggccagagccggagctgccgccggcgcagcggcgggttgcttgtcggaaggagccgccgcgggctgcatgtcgggagctgccgccggagccgccgccgcgggctgattgtcggaagctgccgccggcgccgtcggaacctgagccccgcttatcgcggcactgcccagaagcgaagtcgtgagaagaatgggtgttttcatgggatgaaaagcggtgtgatggatagatggttagagggtgctgccctcctgccgcacaaccgagtatcgcgcctgcgcctccctgaggaagcagcccgaacacgaacccgtcggaagatcgcggtcaaacggagagcatctgatgaactgagtgatgtgatagaggaatgataacgaagaatagaggcgaggcggtgacgctggtcagcgcccttgtcacaaaagatacgccggaaaagcgcctcatctttcagaaaaatcacgcaaaaatcccaaaaaaggcaaactcgctcaatttctccgccttcacaaccgcttgcaccggctccactcccactcgcgccctcggtttgccctctgtctccggcgcgcagccccccccctcgcgaaacggcggcagctcgacaccgcgccaaggccggcgccgcccctcctcgggccccaagcccctcatgcagcgccgttcacccccacatgctcgagctgcttgccgctcccccactcgcgccgcccgagcgactcttgcccacccgctgcccgcagactacgcccgccggagggcgtcgcacgcggggggagtcgcgccgccgccctcactcacccagcggcagcgtcagcagaaaagtgcagccctcgccgccgccgcgctccagctccagatccccgtcgatcgagcgcatgagatcgcgcgaaatcgccagcccgagccccactcccggcttgcggcccttctccgcctcccccgagcgcgaaaagggctgaaacagactgcggcgagccccctcactcaagcccggcccattgtccgcaaagcggatgttcaggctgcggtgcgtgcgcagcagactgatcgtcaccgcgggcgtccccttcgcgcagtgctccttgtcgcagtacttgatcgcattgtccgccagattgttgagcacctgctccagcgagagcaaatccgtgcgcagcgacagcaagcgcatgcgcgcatcccccgtcaccgtgaactgaaaacccgccgtccgcaggcgctcacccacccgatccagcaccggcttgagcagctccgtgcagggccccgcatcctgccgaccgcgcaccttcccgcggctcagcttcgcaaacgagagcacattctccaccaagtgcgccagccgcttgctctcccggaaaagagtctcgtgataatccgccaccttctccggcggcaccgtcccgtcgcgcagcatctccgtgtagagcgaaaaagtcgtcagcggcgtgcgcaactcatgcgtcaccgcagaaacaaaatcactgcgccgtcgctccagccgcgcatacaaagccagcagcgcgaaaataatcagaatcgagagaatcgaaatcgcccacgccgtgtgaatcgtcccgctgagcgcctccgcacgctccgaagaatcactcagattcaccttgccccccgagcgcagcaccagcggcagcccgctcagattcggactctcccccgcctccggcagcccgatctgcggctccagcaactccggcgcaatcgccggcttcaagtgctccgccagcttcggcacatcaatcacgaaaccctccgccgcatagccctgactcgtcggcacctggcgcatgtacaccagccaatccttgtaaaaccacgagaaaaactccccgggctcccccgtcagctccagcggcttcgacggatccgactcctgcacgcggtaaaacccgaacaccggcctctccgtctgcggatcataggccctcagctcatccgagggatcaaaaatcggcgcatccggcacatccgccttgcggcgcatcgtattcgtaatcgcccccgcccgcgccagctccgcgcggaaagcctcctgccccttcggcaccagcggcagcggatccagaggagcctgaaagaaaaagccgcggttgaaatccgccatccccccctcgggcatcgggtaaaaagccgccgccacatccggcgcatgccccagcttcgcccgctccgccgccagcagagcatccaagcgctcctgcacccgcggcagagacaactccacgaggcggcggcattgcgtctgctcatcaatgcgcaccagcttgccctccagatgagacgcctgatacgccagccacagcgaagccgcaatcgtcagcagcccgaacaacagaataacccagataaaacgcttgttcacaacaggagaaaaggatgaaaaatcggaaacgcgaggaaacaacgaagaagacgaaaagacagacgagcgaagcgaagaagtcggaatcagaaaagggaagctgcgggagccgaggcgaaacgaagcagaaacgaagcagaaacgggggcgacgagaaggcgaaacgcagcgggagatcagagccgggaggattcagagaggaggttcagcgagaaggtatggagagaaggtatggagagaagggtcagagcagagattcggagaggaggcgtggaagtcagattcgaagggcaggggatgcagaaaggggatgcagaggccggcagcgagggggaagaacccggaggcgcgagcccctgcgccgcccggagcccgccggcaacgacactcaggacgacggagactcattccagcggtaaccgcgcccgcgcacattctcgatatgagccgccgcggccggcccgatcttgtccttgagacgcgtcagcgtcaccgccaccgtgcgcgtctgcgacccggaagccgactgtccccagacgcgcagcagcaactccccctgcgaaatcacgcgcccgggatgcgccaataaatagcgaaaaagcgcaaactccttttcactcagcgccactgagcgcccgtcatcaaacagcacctcgcgctcctccgccaccaaatgccccccgggaaaacacagcgactcctccgccgagcgactcacaccgggatagcggcgcagcaccgccgcaatccgcgccagcagctccgccacactgaaaggcttgaccacataatcatccgcccccagctccagccccttcacccgctccttctcctccccgtgcgccgtcagaataatgcagggcgtaccggggcactcgcggcccatcatgcgcagcagcttaaagccgttaatctcgggcatattcacatccagcagcaccagagacacctccgaagaaagcagcaactccagcgcgcggcggccatcctcagccgtcagcacggcataacccgccgcctccagcgaatcccgcagagcctcgcggatcggcgcatcatcctccgccaccagaatgcaacgactgctcatcaccccaccatcctagcacaaccaccctcctgcggacaagaaaaaagccgcggcaccccgcctcatcctcatgccgatcagagccatacagcaggcgcgacagcgcctgcccccgctgcgcgaccatcaccgccggccgagcaaaaaaaaagccctcccgaaggagggccggatcaaatgctcttgagaccgatgtgttggacaagctccaacagggaagcggcttgcatctcaaattttgtcttgattccggagcgattatatgacacactcgcagaagtgtcaatacccaacatgaataaactcaccttttcttttgatataggatacgcctccatcggatggagcgtgattgagaacaccgccgacaaaggagaagccccccgcgtcaaggccgctggcgtcgtcattttcggcgctgatgactgcctcgcctcagagcgccgcgcctatcgacgcatgcggcgcaccatacgcgcgcggcgcaagcgcatcgccagaatggcccagatcctcagccacagcggattgctcagccgagaagagcttgatgcccccggtcaccctgcacccttctggctggccgcgcgggccctccaaggcaaagcacgcctgagcctgctggaaacctggcacatcctgcgctggtacgcccacaatcgcggctatgacggcaacacactgtggaccaacgatcagggtaaagcaagcgaagaggaacaggaagacgccaagcgcgtcagcgcagccaaaaaagccatggcgcagtacggcacctcatccatggccgaaaccatcaccgcctttctgggcctcaatacagaagccgccgccgccgacttcaccgtagcttcccccaagtaccgacagtgcaactgggccttcccgcgggacgacgtcaagcgcgaagtgcaaaacatcatctgcaacagccccctccccgcatccgtggccaatctgctgctgaacgaagccgcattgcagagcgaagaactcgccgcctgcggcgtgatcctcccgcggcgctacagaggctccgtcctcttcggccagctcgtcccccgcttcgacaaccgcatcatcgcgcgctgccccatcacgtgggagagcgaataccgcagcgccctcgaagccggcaaacccgaaagcgacgcccgccgccaagccgacaaaatggccaaagtccccaaagccgactgccccgaattctaccgttaccgcttcgcccgcatcctggccaatctgcgcgaacacggagaacccctcagcgccgccctcaggcaaaccctcatgcaggaagccgttcgagccaaaaaactgaccaaaacaagcttcaggaaactgctcagccgccacatcgacatcaagagcagcaacttcgacaactactttgacctcgtcgacagcgccgataaagccctgattctggtgcccgaaaaagacagccgagacaaagcgagcgggcgcgccccctatgcccgccccgtgctgcgccgcgtcatagacgaaatcctgcgcggcgaagacccctgcaagcccgcgcgcagccttctgcatccggagggcgaagagaaagcgcaggacggcaccctctactgcattgccgaccccaactccgaggtcaaccgccatctcgccgcccgcagcctcgacagccagaccaacaacccgctcgtccggcatcgcctcctcatcctcgggcggctcgtgcgggaaatgatcgagcgctacgccggcggcgaccccgcgcaagtcagccactgctgcatcgaagtcgggcgcgaagtgcgaagctacgccggcttgagcaacaaggccatcaaaatcaaagaatcggaaaaaatgcaatcctttcatgccgccgtcagctactacgaaaaactgcgcggcgagagcgggggcgacagcctgccgccgctcaatgccaacctcatccgcaaatgccgcatcgccctcgacatggattggaaatgccccttcaccggcatgcaatacagcgcgcgagacctcccctatctggaaaaagagcacatcatcccgcgctccgaccgccgcaccgactccatggccgccctcgttttgaccttccgagaagtcaacaacttcaaaaacaagcgcaccgccctgcaattcatccgcgagtgcggcgggcagagcgtccccggggcaccccatctcaccatcctgaaagaagccgagtacaccgaactcgtcaaaaacctgcgcgtcagcaaaaatccgcacgataaatcgcgcaccgccacccgaaaaaaactgctgatgacggaacgcttcggagaaaacaaccaagtcaccgccttcaccgaaggccagatgacccagagctcgcagctcatgcgcctggccgcccgcgtcgtgcgccgctgcgccccccaagtctccgtcgccatgatcccgggacgcgtcaccgccgagctgcggcggtcctggaaactcttcggttgccttgatgccgccgccgcccgcaacggcaccgcgcccgcggaaaacttcaaagacctcagcaaagaagacatccgctcccggacccacctgcaccacgccatcgatgccgccgccctcgggctggcgcgcatcctcatccccggcggcaccaacggacgcgtctggaacgccctgatcagccgtcgcctcagcgaacaggacgaacaggccctgcgggacaacctccgccccggtctctacagcatcacccccaagcaccaacttcagctcaacaacgttccgcaagagaccctcgacacgctgtcggccgctctggcggaaaaccgagtcgtgcagcacatcccggccgacatgagcggagcaaagctcgaagccaactacaaacgcatcctcggcgttggaaaggaaaagggaaaggacatcgtccgcctgaagaagcggccggagagcgaagaggccaagcgcaaaaaagccgagcgccgagccaaatcaggcaatacgaaagagcgaaaaagggagcctgaagatccgctgcccctctccaaaatcattggcctgagggaggactcaaaactgcgccccatgaaagccgccctcgtcatcgagaaaaactacgccatcgcgctcgaccccgagcccacgctcattcgccaccaccgagtatacaagcaactcgcggaacggcgccgtcagaacggcggcaagcccgtgcgcctccttcgtgcgggagacctcatccgtctgccgtcctcccctcgccaccctgagcgagaggggctctggcgcgtcgtatctctcaaagatgcaaaaggaagggggattgtcgtagacctgcagagaccctcctcagcccggcccctcgagacgcatcccgacaactggatcaacgtgagcgtgaacaccctgcttcggatcggcgcagaaattctcgcgcaccgctacaccggcgacttctgatatgtcctaccacatcatctccatcgatgaagaagggtgccgcctcagcgtctcccgagggcagctttgcatgcaaaccggcgcgtgccggcgcagcgtgccgctcgaagacgtcgcctccatcgtcatcagcgcctaccggtgcgagctcagcctgcactttctcacccgtgtcgccctcgaggggatcggcctcgtgctctgcgagcagggcaaacccgccgccctgctgctgccggcctctcgcgccacggacaccgccctgctgcgacaccttgggcgcatgccgccgcaactgagccggcgcctctggagcaaaaccgtcacggccaaatgcgccaaccagtcagccgtcgccgagcaatggaaccccgccggcaccgacatcgccgccatgaggcaactggccttcggcgacaaagacttccgcgaagcggaaacggcgcgcctgtactggagaaacttcgccgccgccgtcgctgcgccggacttccggcgcgggcgcagcgccgggggctttaacgccctcttgaactacgcctacgccgttttgctctcctttgtcatggggaggctccttgccgtggggctcgacccctgcttcggcatccaccactgcgcgcgggcgcgctccgcccccttggcctatgacctcatggagcccttccgacccctgtttgacgcccaggtggtgcgctggatagggcagatgcgcgccgaggggaaaagcgatgccgaggccgccgaaatctcaaccgcctaccgccggcacatcctgagcaccctcctgctgcgcgtcgattaccggcaggaagcccacgagctgcgccacgtgatcgagctcgtgctgcgctcctttcgcgccgcggtgctggccgggcagagcagcccttacgaaccatggacactctcaactataaaatgggatggctcgtcgtcatgtttgatctcccgacgctgacgccgatcgagcgccggaacgccgcgctcttccgcaagcgcctgctggaagacggctatctgatgatccagtacagcgtctacgcgcgcggctgcgtgacgcacgatcgcgtgctcacgcacatgcgtcgtctcaagagctttctgccgcccagggggcgcgtgcgctgcctgttcgtcacgaacatccagtggcagaaaagctttctgttttacggcgatgaccctccggatgatccttcgcccgagcagctggcggagcagctccttctgtggtagcccgtttgacgaaaatctcgcggaagcgttgatagacaacgacaggcatggtacctagtgtaccatgcctgtcgttggaatcaaggcaaaactcatggccgcaaggtcaacctgcaaggcttagtgtaccatgcctgtcgttggaatcaaggcaaaacatgaccacggcggtataatcgtctatgtcagtgtaccatgcctgtcgttggaatcaaggcaaaacaagacctggtccttccccggcaacgagaaagtgtaccatgcctgtcgttggaatcaaggcaaaacatgctcgtcgacgctcgcgccaagggcatgagtgtaccatgcctgtcgttggaatcaaggcaaaactctggacgcccccgccaccctgcaaagacagtgtaccatgcctgtcgttggaatcaaggcaaaacggacaatatgcagcccgtgtcgattgacaagtgtaccatgcctgtcgttggaatcaaggcaaaactccattctcgtcaagttcttccaggcagaagtgtaccatgcctgtcgttggaatcaaggcaaaactgcgggcgatattgcgttcgtcgccttgtcagtgtaccatgcctgtcgttggaatcaaggcaaaactggctttggctttatcggcagcatcggtctagtgtaccatgcctgtcgttggaatcaaggcaaaaccgcaaaacttgtaaacctcctgcgtctggagtgtaccatgcctgtcgttggaatcaaggcaaaaccgcttgcagcccgtcacgcacaccaattatagtgtaccatgcctgtcgttggaatcaaggcaaaactcaaggggcacgtcgaatccgtcgccctcctagtgtaccatgcctgtcgttggaatcaaggcaaaacgtcgcacccccagagcaatgacttgcgcgaagtgtaccatgcctgtcgttggaatcaaggcaaaactcaaaccttgcggacctttcaacctttgaagtgtaccatgcctgtcgttggaatcaaggcaaaacctttgctgtggggtcatggtcgtggtttggagtgtaccatgcctgtcgttggaatcaaggcaaaactccccagaatgcggtcatgcaccttcggcgagtgtaccatgcctgtcgttggaatcaaggcaaaacacgcagaccctcggtcccgtcttcggcgaagtgtaccatgcctgtcgttggaatcaaggcaaaacagctcgccccatcggcgctcttcacgctccagtgtaccatgcctgtcgttggaatcaaggcaaaacatcagggcttttgccttcgatggcgacagagtgtaccatgcctgtcgttggaatcaaggcaaaacaatgcggcaagcttggcgtggcagttgcaaagtgtaccatgcctgtcgttggaatcaaggcaaaactgtaggtggcttcgccgttggcggcggtgcagtgtaccatgcctgtcgttggaatcaaggcaaaacgcggagggtagcgcatgctgcaaggtcggagagtaccatgcctgtcgttggaatcaaggcaaaacaatggctactaatgcgtggggctcaacaggagtgtaccatgcctgtcgttggaatcaaggcgaaagcgtgacgctgcgacgctttcccgcgccgcaggtgtccgcgggcctgccgacgggaggggcggcggtaggagccgcggcggacgggggcggtgccgccctgcatgcgcttgccgtggagttggccgcagacgcgctcgccgtgcgcgcgttaaacgggaggaggaccttcgcggttattttagtccccaacttcgcgtttcgcgggactttcttcttgaatattgccgccggtcgcgtaaaataggcccatggcagagatccatccaaccgctatcgtagaccccaccgccgaattggcggatgacgtgaaaatcggaccgtactgcgtggtcggtccccatgtgcggctgggtgccggctgtgtgctgcacagccatgtggtgctgggtgggccctctgtcttcggcaaggggaatgagttttaccccttcgccgtcatcggcctgcgctcgcaggatctgaagtacaagggcgagccgaccttcctcgaagtcggcgatttcaacgtcttccgcgagaattgcaacatcaaccgctcgacgacgcccgagacgaagacggtgatcggcaactacaaccacttcctgatcaacagccactgcggacatgagtgcgtggtgggcgaccacgtgattctctcgggcttcgccggcgtggccgggcactgccacatcgacgactgggccattatctcgggcttcgcggcgctgcaccagttcgtgcacatcggggctcacgccatggtgggcggctgcgcccgcgtgccgcaggacgtgcccccctacgtcattgccgagggcttccccgccgtggtgcgcgccatcaacacggtggggctgacgcgccgcggcttcgcggaggaggatatcaaggcgctgaagttcgcgtatcgcaagatcttcctcgacaaaaacaatgacaaggaggcggcgatggatctcgtgctggccgatgagacctatggcaagaatccccacatccttcacctcgtgaacttcctgcgcagctccgagcgcggcttcattcactgatgcaccgctacctcgtctttgatctcgacggcacgctcgtcgattcgctgcccggcattgccgagggggtgaaccgcgcactggcttcgctggggcgcccccgtcacacgcccgaggcagtgcgcgggatgatcgggcgcggggcagccaatctctgcgcggcggccatcggctatgccgatgcctcgctggcgccggcggaggaactggcgccgatgcagcaggccttcgcccgcgagtatgcccactgctggcaggggaattttacccgtccgtatcccggcgtgcgcgagatgctgctggcgctggcggggcagggggctcgcctggcggtgctctcaaacaagccgcacgaggtgacgctgccgatggtgcgcaccctcttccccgaggtgcccttcgacccgattttcggcttcaccgggcgcttcccccgcaagcccgatccggcggcgctgcgctgcattgcggagggctggggcgttgctttgccgcagttggtgatggtgggcgattcgcgctatgatgccctcacggcggagaatgccggctgcggactgctcttgctcagctggggctatggcggcgatctcagccgctggggctcggcggtggtgccctcggccgaggccgcgctggagcgcttgctgggcggcggaaagcctgagtaaggcggcttgttgacgtccggctgtcgccgtcctttttttgccggagagggtgccggcgcgggcttgcggagtgccccccctcctcccctatccgggatttgctcgggcgcacgctgcgcttgagggcgattcgtgcccggcttctgtctttcgctcttgccttgcgcgacggctcagagcagttcgcgcagcacgttttgcaggccgaggccgatgagcagcaggccggcgcaggtctccagcccgcggcgcggcaggtggcggaggagcttggcgccgctgaagcagcccagggagccggtaaaggtgatgaggccgatgaggctgacggcgagcaggatttgcggcgtgctcaggttgctgccgcagaggctgccgatggccatgcagacgccgacggccagggcgtcaatgctggtggccagcccgacgagcagcagggcgggcaggcgcagcggctcggcgcagggcccctcctcctcttcgcccgaccaggcgttgcggatctgcacgacgcccagcacgccgaagacgagcagcacgatccagtgatcccatgtctccacccagtccttgactctcagtccgcccgcatagccgatgagcggcatgagggcctgaaagagcccgacgcagagggcgagcttgagggcgccgcttcggcgccgctcgcgcagaatgaggccgtagctgaaggagaagaccatggcgtccacggccagcgcgaggccgacgatgagcacttcccagatattgagcatgatggagttgtttgggatggagagacgaatgcacgcagcagccgaagcgccccgtgcagggtgcttcggctggggaatggatgcgagcccggggactctgcccgcgggctcgcgtcggcagttgcttacttggagaagtagcgcttgaggaggccgtcgaagcccttgccgtggcgagcctcgtccttgcacatctcgtgcaccgtgtcgtggatggcgtcgtagcccagctccttggcgcgcttggcgatggccagcttgccggcgcaggcgccgaactcagcctcggcgcgcatggccacgttcttggccgtgtcagccgtgaggacttcgccgagcagctcggcgaacttggcggcgtgctcagcctcttcgaaggcgtagcgcttgaaggcctcagcgacctcggggtagccctcgcgctcggcctgacggctcatggccaggtacatgccgacctcgcagcactcgcccgtgaagttggcgcgcaggccctcgacgacttcggcgtcaaggccctgggccacgcccacgcgatgttcgtcagcgtagttcttgtcggtgtccttgagctcttcaaaagtggtggcgccgcaaacggggcagacttcaggcatggtgtcgctctcgatgacttcgccgcagatggtgcaaacgtatttcatggtctttttctctttctgttgtgttgctgtgctgttggtgtatgccgcaggcacgttcgcactttatcagctcctctgtgtgttagtcaaggctaatctggaattattcaaaaataaatgcttcacttttcctgactatcagctccaccgagggagggaaagcgtatgttatgtgccgatcttcaatatatacgggcaaatgcggcttgaccgtacatgatcttgtggtagcataggggcatgcggtgcattcagtgcggatggcttgaagacaaggtgatcgactctcgcgtgtcgagggacggcacttgcattcgccgccgtcgcgaatgcctgcgctgcaattatcgctacacgacctacgagcagattgagcgcacggagctgcgcgtcgtcaagcgcgacaacatgtatgaggcgctggatcgcgagaagattctgcgcggcatgatcaaggcttgcgagaagcgcccggtgagcatggatgtgctcgacatggcggccgatgcgatcatcgcggagctgcaccgcgatcaccagcgcgaggtgccttcgtccatcatcgggatgaaggtgatcgagaagttgcagcagattgaccccgtcgcctacatccgctacgtgtccgtgtatcgccaatttcagaacgtcgatgagttcatcgagctgattcggcgcatggagcgcaagagtatcaacgatcccctgcaacgcaaactgtcactcgaatgatcgctacccgaaactttcgcccgctgctgcagacgggctactgcgtcgtctcggactacgatgagcgatggattgaatccgtgcttcaagaggcggcggatgctgcaggcgtgcgcctgcccttccgcgcggagatcgcgcgcgccgttctgctctatctggaaaaactctgcccgctgccctcggtgccgctggattttctcttcgcgcgcatgcggcggatgctcgatgaggtggggctcagcgctgtggctctccacctgcgcacgcagacgccccctgtggatatcgacctcggctcgctggcgcagcagcagccgctgccgcttttcttttacaccgagctgcagcaccgcatggacgagctgcgccgcttgggcgtgaatcactaccgcttcaccggcaaaaaggagagcagtctgctgctcggcaatcgccgccgcgcctgcccgacgcagcgccgcgagctcgaggagctcgacgacttcctcaagcgctcggtcggctgacacgctgaacgcccgctccaacccatcacggcgccggacgaagggaagccgccgcctctgcgggctcttcccgccccattccgttgcgctcagccgttgcgcatcggcttcccgcagcgcttcccctcatggggagctcgggacgcacacagccccggcaccgcctgacggcgggccggggctgcgctgttgtaaagggtagggctcccgggtgaggaacgggcgccctgcggccttattgctgggcgtaggcggactccacgcgctgcgcgacgtcgcggtagccgtagtccacctcgtagatgctctggtagcacttgagagcctcctgcttgttgccggcctcctcgtagaggttgccgatgaggtagaggatctccttcttggtgtcgtccatggagagcagctccttgttcgcctcctcgagctggcggatcgccatgtcgttcatcttcttggaggcgtagcacttgccgagcatcatcatggccttcacgcgcagattcgggttcgtgcgcgcgcgctgaagcgccggaatggcctcggtgaagtgcccggcgttgaagagcgcctcgccgtacttgaactgcagctgggcatccgtcgggttcgcatccacgcgcgccttcgcatcggccacgattgcctcgctgacctccttcttgcgggcgctcaggtaggccttggcctcctcgtcattcgggttggccgccaccacctgctcgtagtacgcgatctccgcctgcatggcacgctcgtgcatctcgatggccttgtcattgatggcgacgtcggcgccgccgctgagctggtaggcgtaggcgtagaaggagtaggcgttcgcgtagtcctcgagctgctcgtagaccgaggcgatgtccttgaccacctgcatgttcgtctgatccgcctcgtactgcgcggagagctgcgccaggcgatcctgaagctcggctgccgtcaggcccaccttgtcctgactctcgagatccgtcgtcgcattctgattcttcatcttcgtgcggaagtcgcccgagccctcccagttgccctgcttcatcgacgcgcgggccgagcagtccttctcggcgcgaatggcatcggcatccgtcgggtcgatcttgaggatgcggcggtaggtgtccgccgcctgcgagaactgttcatacttgatgtagtgcttggccagcatctgcagatgctttttgggcgaggcggccccctgacaaatcgtctcgagcgcgaaggccgcgatgtcgggcagattcagatcgatggccgcggcatagagcgcctcgttggccgagacggagtaggggtcgcgctccagatcatcctccacgctgctcagcgtcgtctccggatccttgcgcgaggtcgaaatgccgcgcatgcccgagaagatggacgagcggcgccccgcatccggcacgctcttgatttcgcaggctcgcagaatcttgcgcccctcgaggaagccgggcgcgcgcttcaccagcgtcttgagaatactgacggcatacttgtagtttttggtgccgacggcctgtctggccttcagccacagggcctgttgctcggcgttcaactcccggtcggtgataatcgtgatcatatgcaaaagcgttggaatgcagaacgtgctgcggtgagagagtcccgtcgcggcagcttcgggccgacgcgactttgctttctctttatttaacataaagcggctgcgatttcaaccttgtttttcaggaaaatcatggcaaaataccgacggcatgagagcagatgcagttctgagccgctacggctactgttcgcggcgcgaggcgccgcagtggatacgcgcggggcgcgtgagttatcgcggcgaggtgctgcggcgcccggccgaccgggtggagcccggcgaggtgctggtggacggcgcgcccgtgcccttcgccaacggcctctacgtggcctttcacaagcctctgggctgcacctgcagccaccgcgaggagggcaggctcatctacgacctgctgccggagcagtggcagcgccgcagcggcggcgtgagcagcgtcgggcggctggacaaagagacgagcggcctgctgctgctcacggatgacggcgccttcgtgcacgcgctcaccagcccgaagcgccacgtgcccaagatctacgcctacgagtgctccgcccccgtgcctgagtcggccccggagctcttcgcctcgggcagcttgatgctggagggcgagacgacgccctgcctgcccgccgagcttgttcgcgagacagccctcgcggggcggctgacgctgcacgaggggcgctatcaccaggtgcgccgcatgctcgccgccgtcggagcccccgtcgtgcgcctgcaccgcctggccatcggcccgctgagcctcgaggagctgcatctggcgcccggtgagtggtgcgccatcgatccgacgatttttgactgagaagggaggcgaccgagtgcgctcaggtgtgtcagactcatcggcggccgcgcgcgcggctgcccgtgcggcagaggcgacggagatgccgattgccgtgcgcgccgagttctcggtgctctacgaagatgaggaggtcttggcggtggacaaggcagcccctctgctgatgcaccccacgggccccaagcgcgagccgacgctgctgcacgggctcgagcttctgctggcctatgagctggcctgcgggggccaggtctcgctgatcaaccggctggatcgcgagacgagcggcatcgtgctcgtggccaagagcgcggcggcggcgc

SEQ ID NO: 863 - DNA, 23264 bp, synthetic construct
  misc_feature 1..23264: note = Synthetic
  source 1..23264: mol_type = other DNA
tggtgacgacggccatatgtattatgcccacacagaagccgagcataatagtaatattaagaaccactgtcacgaaatgtgtaaaatcttgtaaagacttttccacgctagcccagcgtgccatatcggggcgaataggctataatataaaacagttaatatgaaaagtgctaaagataagatttttcgccttattccttattcaatttttgcaatcttcttaactgctttgatgttttttggctctaaacctccagcagaaaacaatacttttgctcaagttgccctcacctctctagacgatcgcagtattgttccaactgccgatcaagtctccgagtcctatattgtggccgacttagcaaacagcgtttccatgccatcatcctttagtaatagcgccaactatatttccgtggcagctaaatataagattttcggtagtagtggtgattcggttaactccgacacggctattcttgataagcccactattatcgactcggaaagcttgtcgcggggtattattttccatattgttaaggaaggagatagcctagcgagcatcattcggcaataccgtagccccgtcagtaaagaccagctgcgttggagtaatgctctaaaaaccgaagagctcactgtcggttccaccttacttgttcctagtatcgctggtgttgtttaccgcgtgagtgagggtgatacctccgaatcactagcgcaacgttttgcttctaatgccaatgacattatcaaatataacgatctccaagatggtgccctcaccccagggatgactattacaattccgcgtggcgtcatgcccatgcctgagcgcccagaatacactaggcccactacctcacctcgtcgttttgcttctacttatggtgacggcacccgcatgaatatgcatgaaattgctaattatggtgcttggcgtggcacttattatgccacgcttaatgaaggtaaccgtaatggttttggacaatgtacttggtatgcgtggtggtggcgccgccataatatgcctagcaactattggctgccagccgaagcaattggtaatgccaacgtctggtactaccgcctcagtggcaagggttatcgcgtaggtaaaacgcctcaatatggtgccatcttccagaatacgtcagggcgctatggtcacgttggtgtcgtcacgggcgtatcaccggggaactctattaccatccgcgagatgaattatgctggccccaatggtaaactaaatcatgtctatgaatccaccattgcgtggtcggacgtttataagtttaattatatttacggaaagtagtttatgtttattgatcttgctaaagtttatatcgccgctggtaagggtggcaacggtgccatttcttttcgtcgcgaaatctatattgataagggtggaccagacggcggggacggcggaaaaggtggcgatgttgtatttttagctacaacacgcaaaaacactctcgtagattttcgcttccagcctaaactcattgccaaaaacggtgctaatggcgccaagcaaaagagtagtggtaagtcgggtgaagatttagtgatagaggtgcctgttggtacagtcgtcaaaaaagactcagaaattatcgccgatttaactaaggatgggcaaagagtcattatagctaaaggcggtgaaggtggccgcgggaattggcgctttaaatcttccgtacgccaggcaccccgttttgcagagctcggtacttcaggggaagcctttatggccgagctagaacttaagctcattgccgatgtcggcttgctgggctttccgaatgccggcaagtccacctttatttcagccgtcactagcgcaaggccggaaatcgccgattatccctttaccactctcagcccacatctaggtgttgctaaaattgatggctctgaacttttgattgcagatattccggggattatcgatggcgccgccatgggtaaaggtctcggtttcaagtttttgcgccatgtcgagcgctgcaaagttttactccatctcatagatgtctatacgcccgatgctggtgaagcttacgctaaaattcgtcacgaactccgttcttattctgaggagctagccgcacggccagagattattgcgctcagtaaaactgaaggtgttgatcaggatattatcgatatgcaaattgccagtattaaaaaacataatcctaaggcgcaggttctagccatctcatctgtggcgcaccaaaatctccagcaaactttgcgcgcacttttaaagcaggtccatgcagctacttctattaaatcacaaggcgaggcggcaaagtctcagggccaaagctccttaccagttattaccttagctactaaaaagcagcgtagccatcaccaacgctatgaaatgcgcgacaaccgccccgtgactattgaggataaggcagatgatgaagcgggggatgatattacgccctcagcatagttcagctaaacccttaacctgtgattatatctcgctttaggatcaaattaaccatcttggtattgacaaaatccatttctttgtattaatataagcataagctgatacgcttcacggggggttccgttgtattcatgcggagtgtggagacttagcaaaaacaaaaagaacggattaaaacaaaaactgtgccccaaagggtgggcgcgtagcagcactaaaacgaccacattaagtggtcgttttgggtaaagctttaaaaaagcatttagtaacgcacaattaagaggccgccttgcctacgcactatcggctcctcgccacttaaatcgagaactgtagttggcatctctccctgcgcccgccctcgcacaattacatccaccccaggtacgcgctctttcacttctttatcgttcatacacgggctgtcgccatggagattggcgctagcgattaagagtggtccagttttctttattagactcataaggtatttatgctgcggaattctaaaaccgatatttttaaaatgatcaaaatattcgcttttaaaactttgctttttcggcacaatcatggttacttcgctattcgcaaaatgcaaggccaagtttttagcgcgtcggttcatcttggcgtattttgaaattacatcaaggtttggcactaaaatcgtgaaaactttaccactagagggcatctgtgtcttgagcgcgcagagcattttaatagcgtcttcatcacttgctttaaccactaaagcaaaaaccgtctcggttggtacggcaagaatttttcctgctttaacagccttcacggcctcagcaagatttttttgtgccagtattttcatgcctatattttacaataaaactatatacttagcaagcgatgctataatatacttatgcttaaaaaacagcttgttttagttataatggacggcgttggtctagcggctagttcagattctaatgcagttgcttgcgcccgcatggacacacttaaaaatctagctaggcaacatctcagcctcagtctaggcgcgtcaggtagctatgttggcttaaaggcaggccagatggggaactccgaggttggccataataccatgggcgcaggcgagattattccacagatagcaagcctagtagatgacgcttttgcctcaggtgatgtatttaagagtcaagcctggtgcaagagtttaagtattgtaaaagacaataattccactttgcatttcattggtatttttagcgacggtggcgttcatagcaatattgcgcatcttgaagcaatgttaaagcaggcgcagctgtctggcgttaaaaaagtacgccttcatattttattggacggccgcgacgtggcgccatgctcagaacctaaatatattcgtcgcattgaatctttcattaagcagctaggtgctagcgactaccttattgcctcaggtggcggcagaatgactattacggctgatcgttacggtgataattggggcatggtggagcgtggctggcgcacgcatgtactgggcgaggcaagggctttccctagcgccgaaatcgccgtgcaaacttttcggcgagaacagccaggtattcaagatcaaaacctccctccctttgtagtagcaaaaaacggtgaggccatcggcaagattaaagacggcgattcggtaatctactatgattttcgcagtgaccgcgccctcgaaatcactgaggcttttacccagcccatttttacgcattttaatcggccatatttacccaagattaattttactggcatgactacctacgaccttgatcgacaaattccccataatattttggtcgcccctgccaagatcccgcagcctttgccagaatacttatctcaaaaaggcttacggcagtttgccatttcggaaacagttaaatttggccacattggctattatttcaacggcaataggcgcagcgtcccgaaaggggagattcgtcgtgagttgctatcttgtcagctacctttcgaactgtgcccgtggatgcagtctgcagaaagcaccacgcagcttgtgcgcgcgattgagtcccaaaaatacgactttttgcgcatcaattttccaggcggagatatgttggggcacaccggcaatatgcaagctagcatcgtggcgctagaagctatcgacatcgcgattgggcgcattatcgctagtgccaaaaagcatcacgccagcgttattatttgtgccgatcacggcaacgccgaagagctacgcaatcgggatggtatgaaaacttctcacaccaccaaccccgtcccctgcatcgtagccgatttttcggaaaaggcacaagcattagcattaaagccgggggattatggcctagccaatctcgccgccagtatcgcctttttactagatgtcgagccaagtcctcgttggctcccctctttcctagaatcggctgcgcccgccccctaggtttaagtttgccatcttaattctagacgcccagtatagattgatactttttatgtcttgccttttcgtttaaaatgctaacgcttgtcaaagctgctcctttccactacacttaaagaaaactaaagagagaaaattatgcagattcaaaaagctattattccagtggctggttgggggacgcgtcgtctacctatcaccaagattattgaaaaatccatgttgccagttggcaatcgtccactcgtcgactactctgtgcaagagctcatcaaggcaggcatcaaggatatttatatggttattggcaattctgagccttgtcaggtgcaagagttctacaaagacaacctagcccttaatcaatatctagaagagcgtggcaaggccgatcgccttagccttgcgaagactttgccagacgatgttactatccactatactattcaggatccttccgccaaatatggcaccgctgtccctattgcgatggtggtcgaggaatataatattaacgaaccagtcttagtctttatgggcgacgattttatttggaatccaggcggagaatctgccgcacaatctcttatcaaatccatcaagggtcaggatgagtcggctattttaggggtagaaattgcaaaagaagaagtttctcgctacggcgttctatccgtagaagacggcaagctagtcaatatcatcgagaagccttcagtcgctgccgcccccaccaatatgattaatgttagtaaatacattatgtcgcctagtttgctgcgtaaaatcgtcgactacgtccatagtcatgattttggtccactcgatcaagaatatgtcgttaccgacccgattgatggatttattcacagtggtggcgtcatgcgcgttgcgccaactagcggcgaattcctcgatggcggctcggtagagggctggctacacgctaataatgttgtctgtaaagaccttctacgttaagccgtatatatcatatatgctatattttatttaaagattttttggtcttttatttcatctggtaagtagtttttatctaaatgaaaacctgcttcccatttttgccccttgccgtaacctaaatcccgcattagtttagtaggtgcgtttcttaaccatagcggcacctttaatcccatactattagcggccagtttttgggctgtaaaccatgcatccgtagtttggcgtgattttttagacttcgctagcgccactacgacgtgcgccaaaattaaaccactttctggcataccgacacgctcgaccgccataaatgcatctagtgctagaccaagtgccccgttacccgctaagcctatatcctccgaagcaaaaatgaccattctcctcgcaataaactttgggtcttctcccgcttttagcatacgcgccagataataaagcgacgcgtctacatcgctaccgcgcatagatttaataaaagccgaaatcgtatcataatgttggtcgcccgctttatcgtatccaaccacttttttgccggccgcctcaattaccgtctgcaccgttattttctgcgccaaatttagagccagctcaaggttgcctagcgccgccctcgcatcgccatgagctaattcagctagataatctaaggccgccttatcgactcttttttctgcctgctcggctttaatagcgcgccttaaaacttttaaaattgccgctttacttaggggttctaatacaatcacgcggctacgagacagcagtggcgcaatcacctcaaaacttgggttctccgttgtggcgcctatcagagtaattagcccactttcaacatgaggcaaaaaggcatcttgctgcgctttattaaagcgatgaatctcgtctacgaacaagatggtgcgctgcttgaggttccaattctgttttgcccgcttcaccacctcttccacatcttttttgcccgctaccacggccgagatttctacaaaatccgccgctaactctctagcaataatacgcgagagggtcgtcttgcctgtcccaggaggtccccaaaaaattaagttcactggttcttttttacgtacaatttccgtcaaaattttaccttgaccgataatcttttcttgccccacgatttggcttaatttgttaggccgcattctctctgccagtggacgtgctaggctctgctccatatctctcctttatacatacattttaacatagcagggccgcaaacgactcttataataacaacataaaattataatatgtaaaccgaacaagttcggtttacctctgttagagctgtttaagctataacatcaaaaacataaatatcaagcttgacttcagcaaaaaccttaagtacaataataattagtttggacaagtttgagagattgccgaaactaccaaaacattactagagttattgcaaagttaatatttttaaaaaccgcgctggttttatttttttgctttcagatattaagccaagtaaactgatgccaggtctagtctgaatatgctacaattattgctaggtgcggtgcgttggcggagcagttacgcagaggtctgcaaaacctcctagaccggtgcaactccggtacgcacctccattaaaattagcccgagtggcggaattggtatacgcgttcgacttaaaatcgaatgaggaaactcatatgggttcaagtcccatctcgggcaccacgtgcagtatttttagtttgtttcatttttatatttgagtttgcttatcttgactatttgattgcgcttaagttttgtgctaagataaaagcgtaacaaggtcaaaataaaaatgtttacaagttatcgtcatcgattcacgcagttattttcagtttgcatgcttattggcgtattttgcgcctgttttttgttttgctcagcagaacgtagcaacgctaccgctgccagtttttatagtattttgagcagccaggggcaactcaataatcttcaaaactacgataaaattgccaccgagattttaggagacggtaatactaagaacgatcaccttgtatctctcattcttcgtggctcgtctttagataaggaattaaataacaatactttatccagctcgcttttaaatctgattaatatcagcgattttttagtgcttcgcaaagccgataactcggggcatgctatgcttgcctatgatatcgataggaatccaaacggctcgattagtgatattaggctcattaattctagcgacttaaaacaaaaacgggtcacaagcacgatcagtctcaaaaaactattaaattcgcaggcctataatgtgtcaaatgcctcaagttcactcgaaagcgtgatggtgtttagaacaactaatgcgcttggagatatttatgacccgagtggcgcagctattacacgctccaactttcaaggcattcccgcttctaaagccaagcagcagccgtctcagattgaaagggcagatagagttatgggtcaagatcgagcctacacacgtcaaggccttagttatgaagccacgccaactagcgcagatgatcaggccgcgtctgacgagccagttaacacggcggaagatcctaaatctgtcgctttggctagattatccagtaatttcagcggctatgatgccgcctatattccgcctaggctcagtcagcccaaaacgaatcgtcgtcccgcttatctcgtcatagctattctcgctgccgctttcatgtctgccatcagcctcaatagatatttcattcgaaaaactcatcgcaccatagaggattaaagttacccagcgcttactgcgtttttattgacaaaaatcacacttggttctaaaatagttctaaatagaacaattataaggagtaaagttttgtttccgcttgatcgacataagaccattattcattgctacgagctactatctcaaaggatatgcgccaagtatcatttagcgcatatggagtataagattttaatgttactatacaatcaccctagttgcactactgcgtccgacatcgtgcgttattgcaaagccaccaaatctcatgtttccagctcgcttaaacatctcgggcagcgcggcctcatccaaagggtgtatactgccgataataagaaatctctaaaagtcgttctgcttgcgccagcagatcagattattcaagagggaaggctggtacagaggcagtttatggatcaaattttaactggcttaagtcctaatgaaaagcgttttggcatgcgcgcctttcataaaatttgcgataatgcggagcattattttaagacagctatggagcaggctcatgaaaaataaattatctattaagccacgaaaacttttgcttattgcgggtagcgtatggctaatcgcaggttttaatgtggcgcgtctcggtctactctcctcccttactattgagaggcagtggtatttatgcctattgtctattctagtatttatgatctttgcgaccatgttctctaatatgagcaaaaaacataccacgcgcattgttcaatataaaaacaagcagccattttggcagttttttgaccgtaaatcttatatcttgatggccattatgatgagcggtggcatcgctctaagggcagctgggattttcccggccactttcgtggcctttttctacccaggggtcggcaccgctttagccttcactggattacgctttcttataaactacctccgctaccaccagctcgccaggcaggcactactcaaataagagcttagccatccccatctttcgtagcttctttaaaatgatccttgtattattaagccattttgtatatattagattcataaacctttgagtagggtttataccattatctaaattgcgtaggtctctataataagtaaaactattattaggttttacgcacagtaaaagcgccctttgggcgctatatctgttttatggtataattttcttagtttttgctatttaatttaaaggagctatatgaattattcgctaggcctcgatatcggtaccgctagtgtaggttgggcggttattaacgaagataaaaagcgtatagaggatctaggggttcgcattttcgaacgcccagagcaaccaaagaatggcgatccgctagcactagaacgtcgtacggcgcgatctgctcgtcgtaggctcaagcgtcgtcgcgagcgtcttaactttcttaaacagttcttcataaaaaaagagctgcttagctctgacgaaattaatgatatttttaaaaaactgcagaccaaaaagaatcgagacgttaaaatttactacgacccctatcgtataagggtcaaagctattaaagaaaaagtaccaaacgatcaactttttgttgcgctttaccatatcgcaaagcgccgaggctataaaagcaatcgtaaaaaagttgaagaggccgacaaggttaatgatggtcaaaaagttttaggcgccattaaggccaacgaggctatcttagctaaatacgattcagttggggaagccctattaaaggacaaaaaatatagcgcgcataaaaggaataagctcgactcctataccaactccttcatacgtgaagattttgaggcggaaattcgtaagattcttgaaaagcaaaaatggtcagatgacgacatagaagaattattgatgcagaaaaatagaggtttattttatcaacgaccctttatggacgcagatttagtcgataaaatgcgtggatcttgccagctcgaaaagggcgagaagagagcctggaaagctagttatagttttgaattatttaatttggcgcagaacctttctcatctacattacaatcagggcaataaattaacgcaggagcaaattgcggcttgcgttgataaggcgaaaaatactagaacagtaaaatataaagctatcagggaatgcattggatataaagacgaccctaatttttattttgattatattcgtggcaaacgtgaagctacttatgaggctggagaggcacatactttctgtgaattaaagtttttccacgatattaaaaaggcaaccacaaaaaacccgtctgattgggatcggattttaaacgatattgatctttttgataagattggctacatattaactttttataaggaagatgcaaaagttgaacaggcgctaaaagacctaaaactatctagcgactccattagcggattaatgaagctttcttattctggtttttcgcacctttccgtcaaggccttacgcaaacttaccccacatcttcttggcggcgatacttatgataaggcggttgaacaagaataccccaaccaattttccgaaaaactctcaggcgatgcgaataccctgcccccattagatgagttccaatccaatcaaattactaatccagttgttaaaagggctatcaaccaaactcgcaaagttgtcaatgctgttattaaaaaatatggtgctccagcacaaattaaaattgagtgtgctaatgaacttgccaaaaattttcgagaccgcaaggcaatcaaaaaagctcaagatgaaaatgctgccaataatcagagaatctatgagttgttaaaaaatgatttcaaaattaccgccccaaacggcctgcaaatcaccaaatataaattgcgcgaagaacaatactgtaaatgcgcctattgcggtaaggcgctagggccagaagtttttctgaaacagcacgccgccgaaattgaccacattatcccttattcaagatgcggaaacgacagtcttaataataaagtcttagtttgttcgccctgtaatcaagaaaaaactaggcagactccttatgaaaaatggggttcggataaggggcgttggcagctcattactgctctcacacaagcttctaaaatgccctttaataagaagaaacgcattttagccagtaagccgccaaaagaggattggaacgtgagggcgcttaatgatactagatatattacccgcttcataagtaactatattaaaaataatcttaaattcagcgattcgtcgcacggtaagcggaaagttcttttgcctaatggcaatattacgaatcaattacgtaagatatataaaattggccacaaagatcgcgacttaaataatacgcatcatgctgttgatgcctgcattatagctactattagtgataagcaaattaaaaaatttgccgaatggaataaatataaagagcttggcgccaaccgccatactgttttttacaatgacgataacggtaacccgattcaggtgagcgaagctgattttcaaattttacgagatgaattgttgccgtgggaaaattttgacaaagaagtacgaattcgtagcagcatgaattacgatagcgataaaattgaaaaactcgcagactttagagataaatttagggacttcgctaattatgacaaggatttcctatctaaaattcatccaatctttgtttcgcgtatgcctaagaggtcggctaaaggtaaagcgcatcaggaaactctgcgtagccccaaggatgatggtagcgaaaaagtcatgcgtctcacgcgtaagcggctcatcgactgttcgctgaaagatattgaaaactcggttctgccagaatctgatcgcgtgctctacgaacagttgaagcaactttatcaagaaaaaggcaaaaaagcttttcaagagccggtctacaaaaataataaaaaagtcgaccagaatggcaatcaaatttcccctgtcactaccattaaagtctattccagccaaccgaacggcatactaattaacaacaagactcagttcgtcaataatggcaaaacagtctgtctcaatgtttatcgtcgcaataataaatattattgtgctccaatttttcttcattctctaaatgaggcgaatcccaaaattctaccaactccaaaaggtaaaaataaagccgaaaaagcagacttacaaagtatccgtgaaaaagacggctccattttagcgaatccagaaaatggctttgaattttgtttctctatttttccaaacgactatgtgcgtattacttttgccgataaaatcgtcgaaggctattatgtcaaatatcatataacggcaggcacattttatttaatgaggcataatcagacatctaaagaaaattcgagcctaatccagtgctcagcccaatcggcgctagatattaaaaaattaaatatttcggtgcttggcgataattacctgccagcggaataggtgcacgatggcttggcgtactgttttaattgagaatcccgcaaaactttctctttctaaaaatcaattaattattaaacaagaacacttaatatcgctatccattgaagatattgacaccttaattattgatagctacggcactaatctaactagcaacttaatagattctttaagcgccaataaagttaatgttattatatgcgacgctaagcatcacccctcttcaatcgttttatcttatgcgcaggcgtctcgtggcgccaaaattgctcgtgcgcaaattgcaatgtcggaacctttgcgaaaacaattatggcaaattaacataaaacaaaaaattaccaatcaagccaatgtgctagaaaaattttttggcgacgatagcggtttaagagggctcgctcgcgtcgtgcgctctgacgatgcaggtaatcatgaggctcttgctgctaggatttatttttcaaaactgctagaagatgctactcgccgtcagcccactcggtataatagcgcccttaattattcctatgcgatagttcgaggttcccttgctcgctctgttgcatcgcacggccttattgcgtctgttggcattaatcatcattctgaattaaatcaatttaatttagtagatgatctaattgaatgttttcgccccatcgtcgatgatttcgttttatcaaactttccccttgtgcaaataaatgaagcgccaagacacttgagatcagaagatcggcacactcttattgacataaacaatcaatatggtattatacttgacaagaggtataagataaaagatatgacaaatgtaactgtcgaaagttttatcaaggcgattctcaataaggatgccacctagttagtattacctcagccactattataaatatggattataaatatatgcgcataatggtaatttttgatctgcccgttttgactaaaaacgaacgccatcttgccacgagctttcgcaattgtctccttaaagatggttttactatgctgcagtattctgtctatattagactttgctcaaatcgcgataacgcagtaagccacctaaatcgcatcagaaagtgtgcccccaagactggctcaatccgcatgattatgcttacggagtatcaatacgaaagcatgtatattgtctcgggcgaaaaaactccgcaagaagccaaaaataatatccaacaattagcatttttttaaagataagcaaaaagccaaaacaccccttataaggggtgtttttaagcttgagtattttgagtattataccattatctaaattgttaggggactataactccttattagtacatatcgcaaagccagtcattataccattatctaaattgttagggggctataactcgtatggtaaagcccgaaatcttcttcgaaattataccattatctaaattgttaggggactataacaaataacggctcttgcataaataacgtttaattataccattatctaaattgttaggggactataacgcagtaccgtttggatttgattgccctaatattataccattatctaaattgttaggggactataacataagggttggatttttcgccacgcccgtaattataccattatctaaattgttagggggctataaccgcttgcggctttaaatgcggctaataacaattataccattatctaaattgttaggggactataacttactggtagcatttcagctatttttggcgctaatttaataatcatcgtaacgataccatttaaggcgcgctcagcaattggtaataaattgtcggtaaaggaagtaaaactttccaataacttatcgattaagtttccgatatcagcgtccggattagccatgcctgtcaataaattttcccacgccgactccatcgaggctgccgaaccttgaagtgtgctactcgcttcttttgcggtcgtcccagtgatacccaattcgccccgtataacgtgaatagcattataaatgtcgctcaagttgctgatgtcataatgaacgccactaagtttttcagcatcagtcaaaagtctcagcatctcttctttagtgcctccatagccgagttttaagttatcgagcatggtgtaattttacttagcgaatccctgataggcgttccggattgattccataccggtacccattatttatttaccccgtttataaatggtttcatgcctcgacgtaatgtttcttcaggatgtttactaaaagcactaccagtgccgacgcagacaattctagcgtagtccatatagtcgctatgctcgactttatgccctgcgtcaactagcactgctaactcctccattgatagtggtatttttcgttttttgccagtatgctcatcgaagacttcgatatagccacgcttagccgacactatagcttcccagccgtaaagcataccgagttcagccaataaaaatgccactctagatactttttctttgcgaaaagtattatcgccagacattcgtttttcgtcaacaattttttgataaatttcaagcacaccctctataggaacctttgctagcaccttgcgcgcctcatctggcttatcgaaaacactgaataatatctcgtcaagtttggcgatagcttctttaattttgcccgaatcacggtctgtttgagcttctcggagttcatcgcataggtcgatataagacaagctttgagcggtagacataggcgtaactttaaactccaccccatcaatttcggcggtaatttgttttgtatatactgatgttgatatagatactgacatttgtaataatcctttctttttttatagcctcattatgtttacgtatagggtggcaaggcgagtagattgaaaaaattatgctttttgtgatatatataaggtatgaatacgtcagtgcttgttggagctttggcggctatcaaaaacaaccagaataaaacaaagccatcaaaaccaaaaacttatccaatcagtcactcaattatcctatggcttctgttcggtggcatttttgcctatattccagtcatatacttcactttttctaaaaaacataaatggcgttttccataaaaataagtccaattatgggcttatttttattatattggacaaattttaggcgccaccactgatagcgacagctgcttgcgtcgttacatcccatctagacggtttagacaaatcgccaataccaagacgaacatagccattatttgttggttgcatttgaattgttgcctcgatcactaccgcatcactggtcgacaaggctagaataagcgctatatttgctaaacctgcaaaattatatcattatctaaattatcaggggactataacccgttgttggcgactaagcagccgtctacactaaaggtttcgagtgtaccgtcatcttttggatggttcttaaaggttatttttgttgctttcatcttccttctcgattatttttgcgttttgcttcctactaccaaagtgaagtgtaattttattatcaatcatcatgtctataatccacctcacactctctggctcaggcttttttaatactctatttgcataaaaccacctccatggcagcatcatatggtatccctgttccgtagtagttctaagggccattgcgccgagcgcttcatcaaaaagactgataagttggtcgtattgctcctgagtaatttctatcattctatatctttattatagatccattatacatcgtctacgtttcttaagcttttaaccaaaataaaaatatctaggtgacgctcctccgtcttccacgcattatttcagcgaaacagagggtctgcctatattcaaaaacgccccctaagggcgcttactattgaacaagctggcattattaagcgtggctatgacaaacgtggggcaaagcgtatagtgtttaaaaaagaaattgggcgcaatcgcaaaaccgttacggaagtcattaaaaaaaggtaacacacttagagtggttacctattttaacgatacgtcatctggccgcactgatgttgcgcataatgcgtcgaactccaatgatacgtccgaaacggggcaattacagtccacgtatctaagtaaaaatatatcacagaacgataacggcatcaaaacatcaaaaaacgtctcctcagaggcagaccctcctaatgcggggagacgcttatgaccatattctatcacaagacggcgatagcgtcaagataaaattaagtaaaaatataatatgattacgccattacctaaactattgtggggctataactaaaaactcattctatgtctttattatagatccattacacatcgtctatgtttcttaagcttttaaccaaaataaaaatatctaggtgacgctcccccgtcttccacgcattatttcagcgaaacagagggtctgcctaggcattacttttatcatagcaaaaataattgataactccaactccttattaagaataatgaataaaaaaacgaggaaacgaatactgcttcctctaaacaaaccggggataggatgtactagcctccagtcacacgtccgaaacggccgatttgcctaattccagtatatcccgcctacccaaagactgcaaccaaaaacattactgatgggattaagatatctagtaggcacctatgaacagtctgcgtaaatgcctaaattcaaaaaacgccccatagggcgcgctatttcgtgttatggtgcgggtgaagagactctaactctcgacctcttccttggcaaggaagcgctctaaacaactgagctacacccgcaagtgcaaaatcattatatcacgccacatgacaactttccatatcatttgctacttatggtcttaatggccgatttgatcgcctactcttataacacctcataatacttattttcacaaatgttgttgtcgatgagcatcaaaagaaatatagctaggcagcctaccaaaagaaaaatatggaacataaaaatactggacgacggcatatatatttcaaaaagttggaagtgatcttaaaatagcgtataataaacataaatattaccacatattatttaaaataaaaaggatgaaatatggcagagaagataccagatcgtcccgctggtggccgtgagagcgatttcggtgaactcaacgactggactataacagatatagctacagcaccaaaaacagccccagaggacagaagaaatgccgaggcagaaattgcaaggcgcgaagaagcgggtgcctataacccagatggagctccacgggaagtgcgcagggacttattgagtcacgggtatggcatagaaaatggcaaagtattatatccaaagccggagtataaatcttggctcgtatcggatcgtagcgagccaattccgcacggagtagtgcgagaatcgatagaggatagattggaggctaaaagacgagaggtcgctgaggcctacgaagctataaatgccgaacatcatcaagacttctaccatgcagccggcgaagctgcaattatagctttcgaagatgctcctaacagagagaagattagtcacccacctaaattaaccactgaaaaagatgaactagcaagagaacgtgaagctgagaagaaggctaccgatatagaaatagcctcgcgtcgcagcataaaagagtcaaataaatataataataatttttcggatccagaaaagatggccgccgcgaaagtcagagcaaatatgccattagctaatcaaccagccgagcgcgttcataatgaagaatccgcaaaagtcagagccgaaaaactttataatttctatgaggaaaatttctcgaaaaacgcaccaagatgggtttcatttggcgtatctaatctattagaaaaaggcgtggtagacccaccaacagattctttattgagaagtggcttcttggcgcgcgaagaagaccgaattcacgagcgtatcgatccagacgatactctttccgtagatactataggcgcagaagcctatttaaaaatacgtgtatcgcgagacttgatcggagaaagagttgatacaatccatgaaggcgacctgagtagcgctagacgagatggattattatatgctatttatgttggcgcctatacagacaatcgtagtggtaagataacttattctattccatctgaatatggtaaagaagttatagattttatgcaaaagaacgggcttaatccaggctctgaaaagctacaacttatgtctcaaaatggattcatcggcgtaatggatgctataaaagatgataaaaaagccactgaaaagggtttcgagacgctagattggtatttcgatacctttgattatgcaaaacatatggaagagttcatggaaactatgaacgaatacggcgaagaatccagccaggcttttagagataaattcgacgaatacctagcttatcgcaaggagcttatagagtggaaagagcaacggccgcaaaaagaagacgaagctattgccactctagcagattccaaaaaagttacttatgatgatttgatgtcgtatctccaagaaaatacatccggcaatggcgaagtagatgtctttccgcttccagacataaatgatcgtaaaggaaaccatataactaaaataaaaggaggtcacccttctagtaccgaaaaatgtactaaggctaagttagaaattgaaagaattcgagatattgatccgggcgcagattttcttataggcactgtttttgaagaaaatactgagggtaagaaaattgaaaagcgagactatgcattaattcgttttgaaaataacaattttaataatataatcgcaatccatattggtaacgattcgcgtgcggtgtttgcgtggcgtgggaaagccggtgaagacactgatgcgtggcgagatatctggagaagtagtatacgcgggagaaaccctgatataagacgttttacttgtaagggatataacaaaagggggactttagcgcttgatgatcaatggagtagaatttgggactatctaaatagcccagagcgagaagcagcataaaaaataccgccccatcaagggcggtttctgtttagccaaaaaggcttgtgccccgtacgaaattcatacattgcctcgtttgttttatccggcaatgtgccattttcagcaagaatccccatcttaataagtaggtctttgacgcactcatcgatcttatttcgtctatttaggcaataatcttcaagctgaaataatgcatccatatcatcccatagtaaatcttctaatttaccgattaagcgatgacgttgttcatcttccgtataatctgctcttacagttgaaagatttataacttctttaaccatagctatcaccccccttcatataaaaatatcttaaaccataaagactttaagagattcgctagacaacgcttccataagccagtttaagtgcttatcagggagcgtttcgaacattccgattcgctttttgatgcactgaaccgcaccaggacctctaagccatgctacttagctaggtcggcccggctgagtccaaaatcaatcagattgctattaaagcctacatacatattcccactccttatatgagagtttaataaatgtactatttacccccgaatatgcttctattatagaatatttttccatattagtcaatattttgtatgcgtccataacatattggacttttccgagttcaaatttagtatatttacttaaggtcttaatggtcaatttgatcgactactcttacagcgtctcataatacttatttttacaaatgtaaaattgataagaaaagatataataaacgacaaaataagaagcccataacagtcagagactgtttagtggggcttcttatggctctaagatatcacagagcggcaataatgtcaaggcataaaaacatccccccagaggactaattacctcttaagtggaggggatgcttatagctttaatatagtacatgacgtcagtagtgtcaagatggaactaaataacaaaaatggataaagagcctagagagcaaataggagaagataaagaaaatctagacaatcaagatttcgccatgctgcgcgtaaattatccacactagttttttccaagcgctacacaaagtcacataaaaaagctataatgtttaaaacattaatggaggaaaatatgtacctaactttaataattttagccatcctagttctgctatctgtcttggtgttagtctgctataacagtttagtcagggtagaggagcgcgttaaagaggcttggtctgatatcacggttcagctaaaataccgcgccgacttagtgccgaatattgttgagactgttaaggcctatgcgaaacacgaaaaaactgtcttctcagatattactaaggcgcgttccgccactatgagcgcacaggctggcgatatcgagcagattgcgaaagcggacgatgccatgaccaaagctctaagtcgcattatggcagtagctgaggcctatccagacctcaaagccaacgacaactttgctatgttgcaacagcaactgcaggatgtcgaagacaagcttcaggcttcacgccgcttttataacactactgccaaggatttaaatactaagatccgccttttcccgaccaaccttatcaataatgcctttttgcattttcagccgcacagctatttcgagcttgataaaggcgagacacagcgcattagtcaggcgcccgaggtgaagttttaggcatgtataatcaagttgccgctaataagcgcaatacggttttcctcatgctcggctttatcgtttttgtcggtcttattagcgctctttttgcctggtattactctaattggtttatatcgttatggaccattggctgtgccgctatttacgctatttttcaatattatgccgccagttctttggcggttttagccacgggcgctaaagcgattgaaaaaaggcaaaaccccaaactctacaataccgtggagaacatcgctatcactacgggtctacctatgcccaaagtttatattatcgacgatcccgcgccgaacgcttttgctagtggacgtaatcccgattgcgctatcgttgccgctacgactgggcttttagagattatggataaagaagagcttacagccgtgatggcacacgagatgtcgcacgttaaaaattatgatatccgcgtctccatgattgcctttggccttagctgtgtgattagttttttagcagatatggcgctacgtctcttatattttagtgatagccgcgatcgcgactctgggccatttacactactcgctatgcttgtcgccgctattttcgcacccatcgcggcctccgtagcgacgatggccgtttcgcgtcaaagggagtttctcgccgatgctggctccgtgcaaatcacgcgtaaccctgacgccatgattaacgccttattaaaactcgaagcgcatgctcgtccgcttaagcgtcaaaacccttccgtggcgcctatgtttatctccaatccgtttgcgaagggctccatcgtaaacttgttttccactcatcccagcatcgagcaacgcgtaaagaggattcaaaatgcttttaaataagattaaaaaaccatcacatctatcgttatttaaaaagaggcctaagtcctctaagaataattttaaaaaagctttcttaaagcagaaaaactcggtacgtaataagatctggctgaaaaaaagtgctaaattacgcctacactcctcattccgtcgctcctataaggaagaatataggcgcgatcttgtagtcccaggctatttacaccatgccttgtcgaccttgcgtttgtttctgaaacagtggcgcctcttcttgccttttatctttttgatcgttttcatgaacttgattttagtcggcc

SEQ ID NO: 864 - DNA, 23225 bp, synthetic construct
  source 1..23225: mol_type = other DNA
  misc_feature 1..23225: note = Synthetic
cctcatcgctcgggaaaaatggattcgccttccaggaggagttcgaaaaagtgcttgcatttttgagacgacgacgcagaagacagagaatcctcctttttaagttttaacttaaaaagataaaaagactctgtagagtctttttcgattccgacatttatggcggaagcgagaggattcgaacctccgagacctttcggcccacacgatttcgagtcgtgcgccttcaaccactcggccacgcttccacatcctatcttatcacaaaaaccagtttcaacataatttttgcgaaaacccctatttatatgttatatttaaagtaacaaagtgaggagaaaaacatgccagtagaaaaatctgatatcgccaacatttatgatcatcaagctatttctgaaagcccaaaaaagacgaaaaagactactaacgccccaaagcgaaaactcactaaaaatcgcttaaaggctaagattttaggcgcttactatgggcaccctgctcacgacatgaaacttatcgtagtcaccggcaccactggcaaaactactgtcgcaaacttcatttatcacatcctcactgaatctggtgaacatgctgccgtacttgcctccgaaggcgctattaaaaccggtatgctccacaaattcctcgctgatgcttggaaggctggcgtcaactacgttgtcactactgctcctgccgagtcgcttgaagacgaccttttcgccgaattagatatttttgccgctgttctgaccgattacattccttctcgcattaacgaccagtccgctactgattatgaagctgctgatgacacgctctttgatctaaaaccaagctatgtcgtcctaaatcgtgacgacattcactatcctgattttgaaaaatctttcaccggcgccactgccactttcacttacggggaagatcgcgattcaaccgttcgcatcgagacttcaagactctacaaacttggctccgaagccagtctgcgttttgatggtcgtctctttaccgtagccagcttcctcccagaaaaaccaaccatttcttatatggcctgcgctgctgcactagcctccgctctcggtctcgattcaaaagccatcgaaaatggtatcgctgcctacgacccgaaccaccttctcgctacacctgaatccgaagctaaaaatagttaaggttcgccacacaaagaataaatcatcatagacctaaaagacagagcgctaaagatctaaaaacctaaaaacaagaccagctaagattattttttaattttaatgctagccaactgctactttccgagtattcgcttaatcgcgcgctcagtttctttcagatcctcaaatggatccgccccatttttacgtaaaatcgttttttcatgccccttgcctaaaatcaacacaatgtcaccttttttcgccatcgcgcaagccttttcaatcgcctttctgcgatcaagttcaaataacacttccttatctagcgttttaccatgcctttcacagcccaccaaaaacatttttgcaatcgccatcgggtcttcgtctcgcgaatcatcctctgtaataatacaaatatctgcatattttgccgcaatctcacctcgttcatcccgcgttgtttcatctcgacgacccgcaccgccaaataccgcgataattcggccacgctcatttggcgctaccgattcaaataccttcaaaaaggcatccggcgtatgtgcatagtccacaatcgcagtaaaattctgacccaggtcaattctattcattctgccttccaccgattttaatgcataaataccatctcgaatctgcgtttcatttagccctaatcttagcccaattcctgccgcaagcagcgtattataaaccgtaaacgctccaggaatttgcgtttgaattgcaaaatccgacaccttgtatttggtgtcatctgttacacctaccgctttttccgctcgttcaatttctatacctttaacttcgtatgacaccccctctgcgcttagttcaatattgcgtgcccgtagactccctttcttcactccataagttaagccttttttcacttcatgcataaagaatactgcactcgcatcgtctgcgttcgcaattccaaattttgcttttttaaacaatttacattttgccgcgcggtatttctcaaaagttttatggtaatctaaatgttcgtgcgttaaatttgtcatccccgctacttcaattgggatacctaaagttctaaattgcgtcattgcatgcgaagtcacttctagcaccaaaaattccgcccccgcctcataaattgttttcattcggcgattcaaagtcatcgaatccactgttgtcatatgctttgtttgctgatgcaggccatcttcaccagccttcagggaaccatcatcgccttcggctcccaccatttcaggcaacccgccccaagccactgtcgtcatcagtccggtcttatatcccgcccggctcaacatcttccataccaaaaacgccgtcgaagtttttccgttcgtccccgtaattccaatcactgtcattttcttgccagggaagccatatcttactccagctaaccccgccttcaaaaaatgatacggcaatactattttgttataaaacggcactcggtccatcaactcagtctttaaattcatatttaaattatatcatgttcgtcgttcgctccatcaaatgccatccttacttcagttaattagcactcaagccttgcaagtgctaatttttgtgctacaattactttagcggccgccatttttaccggccatccgtcagttaaaaggaggaaactaagatgaaattaaaaccactcaaaagtcacgttgttgctaaaaaagaacaagccaaaagccaaactgcttccgggctactattacccgataccagtaaagaatcgaccgcctacgccatcgttgaaagtattggtcaagacgtgaaagacatcaaagttggcgacaaaattatctataaagagtattcaaccactaacgttaaacttgaaaacgaagactatattattgttgaagaaaaagacattctagctacactttaagaaaggaaattatgaaagaaatctattacgaacaagatgctcgcgctaaagtcctaagcggcgctaaaaaactttacgatgccgtcaaagtcacttacggtccaaaagggaaaaatgttatcatcgaaaaagaatatggtgctcccgtcattactcatgatggcgtcactgtcgctgaagccgtcgatcttggctcatctaaagagactcttggtgaaaaagtcggtgctaaccttattaagactgctgctcaaaaactcaataaagttgccggtgatggcaccactacggtcacagtccttacctataacatcttagctgaagccaataaactaatcgctgccggtgttaatccaatggagcttcgcaaagagatcgaaaaagccggagccgatatcgtcaaaaaaattgatcaactttccgaaaaaattgatggcgacgatcaaaaagtcgctgaagtcgctaccatttccgctggcgatgccacaattggtaaactaatcgctaacgtaattagtaaaattggcaaagatggcgtcgtcaccgttgaggctggacaaggcctcgatatggaacaggaaattgtcgaaggttttaattatgataaaggttatgcttctgccttcttcgtcaccgatgtaaatcgccaagaagccatcatggataaaccactcattcttttaactgacaaaaaaattacctccagtggcgatattctaccactcctcgaaaaagttgccacttccggcaaaaaagatcttgtcattattgcggaagaggttagtggcgaagccctcagtttactcgtattaaataaactaaagggtgtttttaacaccattgttctaaaggctcctgcatttggcgacaaacgcaaagctatcatggaagacttagccgttctcaccgacgccactgtcgtttctgaagaaaaaggtatgaaacttgaagaagccggacttgaagtgctcggctccgccaaaaaagtcatcgccactaaagacgactccactatcattaagggtgccggtagctccgccgccatcaaagatcgcatcgaactaatcgaagcccaggccgcacgttccaactccgactacgagaggggcgaatttgaaaaacgcaaagctgctctttctggcaaagtcgccgttattaaagttggtggcgctactgaacctgaaattgacgagaaaaaatatcgcgtcgatgatgccgtatccgctacccgcgctgctctctccgagggtatcgttgctggtggtggcgtcactttagtcaatcttgccaaaactctcaaaggctccgataatggcaccgtcattgttaaaaatgctttgaaggcaccactcattcatattctcgaaaatgctggcctgaacagccaagctctgcttgctgaaatcgaaaaggcagaggctggctttggcgtcgacgttatgcatccagaacagggaattactaatctcaaacaagctggcgtgattgaccctgctcgtgtcacccgtgaggccgtccaaaacgctatcagcatcgctgctaccgccatcactatgggcgcgctcatcgtcaatgtacctgagccaaagacttcaacaccagctgaagatatgatgtactaatttcaggagtgctggttcatccagcacttttctcttcagtcttcatccattcaatactcattcattcagtgctcattcatccgttactcgcttatccgacatttatccataaaaaatagctcaagtaaacttgtgctattttttctttgccttattccgcttcgttaattaagtatagcagtgcttctgcttttttcacatcatccgtgatttctttcgctaccgcatatgcttcagctaccatcttttgatcatgtgtttcatctataatttctttatagaaatcaaattttttatcagcttctagcgccaccttatccatcaacggaatcaagtcatgaatcatattctttttcatgtttgatagctcagtttttggcgttgccgccctaagccatgttggttctgctgaaattgactctggccttactttcgctggcgacaaagacgccatcgtttggtcttcaatcgcttccggctccgcattcattagtccagctgctggatctagcgcaggcgctggcggcatccctaaatctggcatagccgtctcttcacccactattccgttgattgcattctgcaaatcgtcgttattatcgttcattttcccacctttttaaattagtatgacctataatcccatcaatcataacataaacacgttaaaactacaattaaattcttaacttgcgtacaattttatctaacacatccaattttacttcttccattggcaaccttgccccaaacacgtccacgatttcctcgccctgtgctttcgggaaatacaccgttaccgccggtgagaatctcttgcgtggcatcagcacaattgcaaaattagtatcatcctgtaaaacaccaaacgctcgataattctcaaacaaatattgtttttcgccctcaaccaaccccttcgagttaaccgaatagcgaatttttctcggcggacgcagcacgtaaatcagcagggaaatcacacagagtataattactgccgtaaaagtccaccatttcaaccagaccgataatgctactaacgctaaccctgcagtcgctagcccgatataccatcctgcatttttatcatgcgtgatatattcttccgcttcccacttaatcgtatttttcttcggctctaccatttttactcccttatattgttggactcttaaaatcatggaattgctgatagatattttccagattttcggttatttttttcgcaaattgttgcacttttacattttttgtgcgctccaccacccctgaattatatgccctcaggtatgcaatctgtaacgtaatttcccttagaaacactcggtccagcgttccactcaatctaccatcttctagttttgcgtttaatttttcattatttgttttttcggccgccgcaatacccgtcttctctgaaccacttagttttactttgtactcactttccagcaatttttttccactacctaaaatttcattcaacgtacttttcagtgatgccgtcaaatttcttaaatccgaattcttcacctcattcgcatacttctgaaaggtctgcttagaaagatattctgcctgccaataactttgctccatcaagtcacggtctctcgtatcaaccttattaaattcttttgtcagtgcagagaccccaattattagcaaaatcgccacccccacaatcgccaatgtcaccacattaaaaatttttgagagaacattattaccaccccccgtcttgtggtttgcattattgccatctccggcaatttgttgaagataagccattttatccataagctcattttaccatatttcacagttttttcccataaaatcaacagatacactatgctataatatccattagatatgcaagatgctaaggaggaaattaaagctcgtctgtccatcgaagatgtcgttggccaatatattgagttgaagcgtgccggacgcacttttaagggacgttcaccttggggagttgataaaacccctagctttatggtttctccagataagggaatctggcatgatttttccgcgaacaaaggcggcgacatcttcacattcatcatggaagttgaaggcatttcttttcgtgaagcacttgaaaaactcgccagccaagccggcgttgaattaaaacagtttagtgcagacgacggcaaacttgctgctaaaaaacgtcgcctaaaatccgctctcgaactcgccacaaaatactatcaaatttgtctcgctaaaaattcttctgtctgtgaatatgttttctataagcgtaatctcaataaaaaaaccgttgttgattttcgcattggctacgcccctaacggcaaagatcatctcgttcgcgtcctcaaatctaaaggctacaccacttccgaactccgcgatgccggcctcctcaatcaattcgatggcgacctcttccgtagtcgcatgatggtaccattttttgataacaccggcgacattatcggcttcaccggacgcattattggtgacggcgagcctaaataccttaatactccagaaaccctcctctttaataaaagtcgctttatcttcggtctcacccaagccaaagaattcattcgccaatccggttttgtcgtcatcgttgagggaaacatggatgtcatctcctctcaccaagccggtgttcgtgaagccgtcgcaacctctggcaccgctatgaccgagcaacatttgaaaattctcagtcgtctcaccaatgacattcgtctagcttatgacggtgacgctgctggtgttgccgcagctgaacgtgccatcggcctcgccaacaaacttgggataaatctaaaaattatttctggctacaacggcgcaaaagaccccgacgaactcattcaaaaagatcctgtcctttggcaggaatgtgttgaatcttgcgaaccggccatcgactggcttctgaaaaaatatgaagagcgcatcgatatcttttctggaccagggaagaaagcctattccgatattgctatgcctctcattaactctattcctgaccccgtcgaacaaaagcactacctaaataccgttgctgaaaaacttaaagtttcagttgaagatttaacgagtaaaaaaattgctgaaaaagtgctcaacttaaaagaagttaaagttaaaaaacctaaactcactaactctgaaaagcaagccctcatcgattcacttgaagccgtcttggtttttggcggcgccgctggaggtgaaattaagtttgactttcctgaagatgaaaccagaattagcgaacttgaactcatcttcgagaatcagtattcaagcttatctgaagatgagctgaaaaaaacggcccgctcattactccgccgctacgaagatgaggttgttaaagccgaaatcgctaatttaaccgaaaccctaaaaacgctcgaaaacgacgatgaaaaaaccagtaaaattcttaaacaaattcaatctctccaatcaaagcttcactaattcgctaatttattttatcgcaattatcattatatttcaccaaaagtcattcgcactatattaagtactctgcattagttacttgtgcaaataaacttatcgccttcaactattgcaaacatcgatagccgtcgcttcctcgtactcgaaacaatcacatcgtcccgcgtatcacccttgcattcagcattataaactacaaaaatttgatgctgattttccatccagtttaacttcttaatatcaaagcaatctcccccgaatttacacaccccacccactgcgtacggcgtatcatctactccgtcccgcactccagccgggatgtaccgcttaatcaatgttcgccattcttccaatataattcccggtaattgaccatccatgttcggttcattttggtattttctcaccgcctccgccaaccccaacaaatctgtttggcgatatttattgcgtgcttccactcctgaatcagcttccgtttctttagccggcaaagactgtatatttgagtccggtttttgcgtttgctttggtgccaatgtcatcactaacactgccgctccaccaatcattaagctgccgccgaccaaaaaccccaacactatcttgttcggtacctttttcttctgattttttatatccggattatgcaaagcatccattctattcagaaaatcactctgcgggttttccagttgcgactgcccatccatagcctcattatatcatataaccataaactttattttaagattttccattattctatctgttatatgctataataactctatgaaaaaagttgagaatgtagtttcagattacaacggttacgattataaaaaaatcttttgggaagatgccgatcgcgaatatgaagatttagccgatcgccttgctatccgccgccttttaccaaccaacttagacgaattcgttgatatcgctggtggctatggtcgcctcgccaaagagtatctcgatcgcgctaaaaaagtttggatttttgattattccgccaccgaactcgctgatgccgaaaaagaatttggcaaaaaaattagcactaagcaaggtgatatctacaacattcctttctccgacaacacttttgatggcatgattatgattcgcgccactcatcattttaaacacatggataaggtgatgaaagagttgcaccgcattctaaaaccagggggcgtcctcgtgattgaagtggccaataagaaaactttgccaaaaatgttccgctactggtttaaaaaatctaccgttaacccgttcgatcaaaaaccgtccaatctcaccgatgttgataaagatggctttttcaactaccatccaaaatggatcgaatctctcttcattaaaactggctttgaaattaaagagattctttctgtctcaaacttccgttccgctaaactaaaaaagctttttggcgccaaaactctcattaaattcgagaagctcgcccaaaaacctctcgcaaaaattcgcttcgctcctagcatttactacaagctcgtcaaaaaatagcatatcatctaccacaaactcgtcaaaaaatagcaggtcttgcactatttcaaaaactgtcttataatgacctcgtagttccttaagtaagaattacatcactatctaagttgtgtaggtctctataataagtaaactttttataaagtctacgcacagtaaaaggcgcccttgtggcgcctatatctgttttatggtataatatctccaataaggagatttttatgcgctattctttaggtttagatattggcaccactagtgttggctgggcagttatcaatgaagacaggaataggatcgaagatttaggggtgcgaattttcgaacgaccagaaaatcccaagaatggagaatcattagcaaaacctcgtcgagattctcgctctactcgtcgcagattaaagcgtcgtcgccagcgactaaataaccttaaacatttcttcattaatcaacaacttttaactaatgaagaaattcaagacctattaaatcccagcaaaaccgctgagcaaaaagctcaatttgacccatatcaattacgagaaaaggccatcaacagtcaagtttcccctaccgagctcttcgttgctttgtatcacattgccaaacgtcgtggctataaaagcaatcgcaaaaaagtcgaagaaaactcaaaagaagaatctggccgagtccttatggctattaagcaaaataaagctcttctcgacaactatcgctctgttgctatcgccctactaagggacgacaaatttaaacttcataaacgcaacaagctcgacagttacacaaattccttcattcgcgaagatttcgaaaaagaaatgcttgccattctaaacgctcaacaatggccagattcctggattgaggaacttctatattcaaaaccaaatggtctatttttccagcgccccttcatgacctctgaattgatcgaaaaaatgcgcggtaaatgtccgctcgaaggcacccctcgcgcccaaaaagccagcttcagcttcgaactcttccgcctagcccaagatttagcacatctcacctataatgatggcaataaactatctgaagatcaaattaatcgagttatcgaaaaagctaagactaccgcaaaagttacatataaagccgtaaaagaggctattggttttaaaagtgatccaaatttccgtttcgattacattcgtggcaaacagaccgaatacactgaaatggaaaaacgtgagttttgcaatcttagattttatcatgccattaaaaaagcttgcactgagatagactgggatagaatatcacaagatcttgacacctatgatcaaattggctacatccttactgcatacaaagacgatgaatccgttgaagctgagctcctaaaactcaatcttcaaccagaaactatcaaccaactcgaaagcctttctttctcaggcttctgtggacactctctagcagcacttcgaaaactaacgcctcatctactctccggcaaaacctacaatcaagccgtcgagcttgaatatccaggtcaattcaacgaaaaactatctggcgaaaacaatgagctaccgccattaaccgaagcacaactctgtcaattgactaatccagtggtcaagcgcgccattagccaaaccagaaaggtcattaacgctgtcattcgtaaatacggcgccccaactcaaattaaaatcgagtgcgccaatgatttagctaaaaattttaaagagcgtcacgacattaaaaaggctcaggatgaaaatgccaactttaatgaaaaaattattgaaaaactcaaggaactcggcatcaccacccctactggcactcaaatcactaagtacaaactacgtgaacaacaacttgctaaatgcgcctattgtggagccaacctcaccgaagatactcttttagacgaccgcttaaccgaaatcgatcatattattccttttagtcgctccggtaatgacagcaataataataaagttttagtttgcccaacctgcaaccaagaaaagctcaatcgtacgccttttgaaaaatggggcaacgacaccgagcgttggctgaaaattcaagcgctagctgaatcgtttaacattcctttcgctaagaaaaaacgtttacttaccgaaaaactgccaaaagaagaatggggaagtcatgctcttaacgacactagatacgccatgcgttttatcagccagtacattaaaagtaacttaaaattctcaaatgagagtagcggtaagcaaaaagttttacttccaactggattcattactagctatctccgcaaaatgtatcacttaggcgagaaagatcgtgatctaaataactgtcatcatgccgttgatgcctgcattatcgccacagtcagccaagcccagatcaaaaaatttgctgaatataataaatggaaggagcttggcgcaagttatcaaaccgtcatttggtatgacgaggacggagagtctcaccaaaaaaccaaggttgaatatgcagaaatgaaagcagaactacttccttggccgcgattcgacgaagaagtcaaaaaacgctcaggctctacctatgattccagtaagattgaaaaattatccgattttcgcgataaatttagagatttcgatacctacgatgaaacttttctagaaaaaattcatccacttttcgtatccagaatgccaaaacgcagcactaagggccaagctcataaagaaactattcgcagccctaaagcagaggctggcggccgtcgcctaactagaaaacgcctatccgattgcgacctagaagacattaaaaattccatcttaccagaaagcgaccaggcgctttatcagcaactctgcaacctttattcagaaaatggcaaagatgccttcaaggaacccatttacaaaaataatcagcgcatcgacaaaaacggcaaagccatctctccagtaaaaagcattaaagtttactcaactgagccatctggcatcctcattaaccatggcactcagttcgtcaacaatggcgacacggtctgtctcaacatttaccaacgccaagataagttcttcgcagctccagtttacgtgcacaccctaaatcgcgcagctgagattctccctaccccaaacggtaaaagtaaacttgaaaaggctgattttaatcaacttcgcacaaaagatggtaagatttttgccacaaaagaaaacggctttgaattagtcatgtcagtctttccgaatgactatattcgactagttcatgaaaataagactgttgaagggtattatgtgaaatatggcattagtgccggaaccttaagcttaattagtcacaatagcacttcaaagaatgatttggatatgattcattgctcggttggccaagccgtagctatctataaactcaacatttccgtacttggcgacaactatattgagagataattatgggctggcgcactattgtaattgaaaattcggccaaactcagtctaaaaaataatagtttagttatccaacaagccgaatccgtcacaattccgcttgaagacatcgatagtttagtgctcgacggagagggaattgttttatcaaaaaatctactagttgaacttagtaaatttaaaatcaacactatcatctgcgatgataaacatctgcctagcacaactattctcgcctattcccaggcctctcgtggcaccaaaactgccagaactcaactagatctacccgcctccaccaggaaacaactttggcgcaaaatcatcatgcaaaaaattcaaaatcaggccgatgttctcgcttgttttaaccttcaaaattccgatttactcgaactttcaaaaaccgtccgctctggcgatgtcagcaataacgaagcgcttgccgctagattatattttagccgtctttttgaagatgccactagaagaaaaccaacctggtataataccgctctcaattacggttatgctatcgtccgcagcaatatcgctcgcagcgttgccgcccgagggctcatctcgatgattggtctaaatcaccactcagaactaaatcaatataaccttgttgacgacttaattgaaccatttcgagccatagttgatcaacacattttagccgatatcgctattttacaccccattgacaccgacgattttctcacacgcactgacagacatgctattattgacatattaaataaaaatgttataatcaaaaataagaagtttagcgttaaggcggcggtcgacattgtagtcgatagtttcgtcacagccatcttagaagataacgtagaggcgctagaacttccagaaattatacattagttaatttatgcaatcttttcgttttatgagaagcatcgtggtttttgatttaccagtaggaaccaaatatcaacgtcgccaagcaacccgttttcgcaaagctctgctcgacgatggcttcgagatgcttcaattttctgtctatactagaatttgtccaaaccgagacagtgccgaaaagcacctttctcgcattaagcgtgtagcgccgaactctggttcaattcgcatttttacgattacagaaaaccaatattccaacatggccatcatatctggcgtcaaaactgcacaagaaactaaaattaccgcaaagcaattgacctttttctaaaaataagcaatatataaaaatacccctttacaggggtatttttataagtatttgatatatctattatatcactatctaaattgttaggggactataacaatgttgagttttacgatccaaaaacaaaaattatatcactatctaaattgttaggggactataacggcacttatgtcctgtatggagtgaattacattatatcactatctaaattgttaggggactataacccccctctacttttccaacgacaaagtcgcattatatcactatctaaattgttaggggactataacgcacaaccgcttactaaaacgatattttagattatatcactatctaaattgttaggggactataacctggttgtaccagttaagatcttgttcaagattatatcactatctaaattgttaggggactataacctccaccttcacaggaaccgcaatctctttattatatcactatctaaattgttaggggactataactaacctcgattaaataatttctgtgtgggattatatcactatctaaattgttaggggactataacatatctctaatgcgtttgctaattcgtcggattatatcactatctaaattgttaggggactataactcctttttcgatagtgtcttatgtggtttctattatatcactatctaaattgttaggggactataactcatccgtgccgtgcttgtcaatcacttttattatatcactatctaaattgttaggggactataaccttagaaaggtagaacaatgactttagataattatatcactatctaaattgttaggggactataaccacattacgagacagacgttcaaaaaaatactgttttcgaatgacctgcatttcgatattaaagagaaaatttttggaacggacgacttaaacctaccattctccgttattaacaacaaaaaagagccaaattctgactctaattctcgtatggtgacccgggcgggagttgaacccacaaccttctccttaggacggagctgctctatccaattgagctaccgagccaaatctacattcgcctaaacggtgcatttttaaagaacgcaccgcaaaagggaattacctctgtattataccccaactccactattttgcgcaaatcagctactcagacaactcgtcttcgcaaaacacacaacattctttatcgcccacaaacaccacctcactatcaagaatcggccgcccgcaattcaagcaaaacaccatgcaattactgcaccccatttcgtcgcaacacgcatcgttatcccattcgtctagctgtcgcccgcaattcaagcatatttttcccattaccatcattatactctagtaaagaaaaacattcaaaaccgccatcaaaaaaggcccaaggccacttaataatttttggtagagccggctggaatcgaaccagcattgtatccttagaggggataagtcctatccgttgaacgacggctccgtacctttcattatatcacaataattatcaaacagctcactagtatcctgatatgttattatagaagcataaacattttagtaaaggattttatggaacaaaacatacctcccgcaatgcctgtaatgaacagtggcaagcaaagcaatgaaaaaggtttaaaaattaccgtcatactaacttctcttgcagccgtttggggtattggacttggtatttatggcatgattcaaagtgcgcaaaaagatagccagatttccaatttgaatgtccagaaaaaagactctagtggcaaaatcactgcattggagacagaaaaaatagaaactaccgataaaaacggtacgaccgttaccatttccgatacagcatcaaccataagtggtttgcatacggtaggcgacacctccacaaagcgaaagtattatatcggcgtcacggatctagacccaggaaaagatactagagaaaaagatacctacatcatagatattacacagcttggttccaaagatggtgttaagaagtatgatctaaagacagtattagataaagcagtctctaccaaagtcgccagtctaccaaatacgctagcagccggaactgtaaatgcaacccctaaatcaagctgccagtcctacaaggtaaacgttggcgacccagcctatattccaggtgcccgtactgactggacggtagcaacagactggagcaatcttgtgcctcttacaattcacatgtcttgcattgccaataacggaaataaggagctttcacttgggactggcctttattctttaaatccaagcacaaacgagttggttaaattaatcgatatagtttattaagcatacaaaaatgagcccgaaggctctaaaaatactactgtggtgatctcggcgggagtcgaacccgcgttgtcgggatgaaaacccgatgtactaaccgttatactacgagaccagttaattcttttttcattataccaaattcctaagatatttcaaccccaattatctatttttagttgcattttttagaaaatatgttaaaattatattcataggtggtcccgtaactcgggcaaagtagcacattgaacatacacaggagggaaaaatatgaaaaaatttgaaaaaactttcgtagattttgtactaaagaacggacttttaaagattgacaatcctgaaagtttttactttcagctaagcaacctaagttcgacaggaaagaacttgattagcatcgggaacgcctacgccgaaacaatcaaccaaagattcggtagtgatttcaatttaatcatcggcatcaaagactccgatctatcaatcgccggagctactgccatgcagctcgatgttctgtttaatcacgatgtccgctttgtcgagcaccaagctaggacttcgctggttaccggcgagatgcctaagcatcacgacagagcggtggttgttgccgacagtactgtcaccgatgacgatatcgctcaagcaatcaatcagctcagagtcatcaatctttttaaagtgctgggggtagtaaaatgtttcaatttatctccctcaacggctattccaattgtcacaaacagtgacattctcggccgcctgaaagagatccagagcagagccgtcaaaaaataaccacctatttagcccgcacccgcgggctttttcaatcatcccttattttcagggtggcaatctccgctgaattatgataaaataactttactggagggatacccaagtggctgaaggggacggtttgctaaatcgttagtctggggaaacctggagcgggagttcgaatctccctccctccgccattgttgacaaaccgcctcatttgaggcattttttctctgtataggctcatatttggacatcaataatgtaattatgctactatcatcagagctattagggctcggcgctccaaccctcacaagagttgcatacagaaaacctttttatggtaaaatagtatttatcagtggaggaaatatgacagcatacgaagagtttatcacaaggttttcaaaacttacagaaaagaataaaaaaatagttttaaacactttgtctaacatttttactatgcgtctaatcggcaataagacacatggagaccttgccgaggtcggcattgcagagtttgtatctcaatttatgtatgactatagtggcaagcacgtgggtaaagacctttatcgagcaaagcaacatgaggaagatatcgttgtcactaatgaaattacgcacgaagaaataccaattagtttaaaagcttatggggatggaccacttcaactatctactgataaaaactcatcgatgtttagtctactggaaaccaagaaaagcccaattactagtcatgaagaaattgaggcaatctttaattcaaaagcttttaccgaagtaatgtctataaatgtgatgcctctgatatatagggagatgaacaaacagtgtaacatcatgatttttaactatgataaagttcgcaaaaatacagcgagaatagaatacgttagtggcaacgaaaacgtaagcgggcaaggtcgtggtagaacacatccaatttatgctttctatgacggagaaggtaattatatatgtgaagttaggtatggtagtgcgaccgccaatgctttgcaacgtggtttctggaccaacacaaaaagagccgctgactattttaggagcgcgacaaatggctgggttgactatgaacataatcaagagattataaagctaataaggttggctttaaactcaactaaggctggacataaaaaagcgaatgatatattgcaagaagacatagacagtctaaaagtagggggagtcaatgagtagtagtattgacatatcaacccaaggaataaaatatacgggctcaaaattaaagttattgccatacatcttgggggtcatagatgaattgaaggtggagactattctagacggctttagtggcacaacaagagtttcccaagccttagcacaaagagggtatgaggtaacttgtgcagatatttccgtatggtctgaaacgtttggcaaatgttatttgatggctaaaaaagagaaaaagttttatcaaaagatcatcgacgaattgaatgcattagatggcagggtcggttggtttacggaaaattattctatcgataaaggcgatataaacaaagctccatttcaaacaaaaaatttaatgaaacttgatgctatacgagagcgaatagacgaattaaatttagaagaggtggataaggcggtcttattaactagtctgattttagctcttgataaagtagataacacattggggcacttttcttcatatctagcaaagtggtctccaaggtcatataataatatctttcttacggtacctgactataagatttacaaacagcaaaatcgtgtcataaaagatgatatcttcaacatagttggcagtaatgaatttgatttagcatattttgacccgccttatggctcaaacaatgaaaaaatgccaccaagtcgcgtacgatacgcttcttattatcatttttggacatctgtaattttaaatgataagcctaaattgtttggaaaagtacatagaagagaagacacgcgtgacttggttgcaagctctgtgtttgaagaatataaaaaggacaaaaatggcaagtatattgcaacggaagcaattcgcaaactggcaaacgagacaaatgcaaaatacattattttttcatacagcaatggtgggcgggcgacaaaagatgaattaaatgagatatttaattcatgtggtaagttgcttaaagtaattgaaatagattataaggcgaacgtaatgagcacgatgaaatggacaaatgaatggctaaacggagaccgccagaatgtagagtatttgtttgtgcttgagaaaagtccagttgtcagaccagctgtatcacccatattaacgtcacagtatagtctatttgatttgccacaacaaaaacttagcgtcgttgaagcataagtgtgctaaatagtgttttaattatttttaaatgcacacctctataactatagacccccatttagtatgggtagatactttgcggcagacattcctctccactcaactctatttcaccccgaatccttgcataaaacacctaatatagtataatagactcataatctaaacacgagatccaatacttttatgaagaaaattactaaaaatatctctcaaattatcaccggtgccagtgcagctctctgtctttggaccggcaaggctatgtcagtttacgctgcagaaactccaaaaactcctgtcgaacaaggtgctgaagctgctcgcgctaaaggtatgcctgcagaacttattggcgacaatggcgtcttcggccgcatcactaacgtcgtcctcttagccgtcggcatcatctctgttgttatgcttatctacggtggcctccgctacattctctccggtggcgatgctaaaaaagttaccgatgcaaaaaacaccattctttatgcgattattggtctcattatctctcttctcgcttacgccatcgttaactttgtcctcaactcagttattggcgtcaattacatccaaggcgcctagccagccccctattacctctaattctatttaaattcatatccgtcatttttcgcaatcacaatggcggatatttttatattacttttttcgtttcccgtgtctttttcgccacccatagctctcacacgcctttctttcttcacacactcttctttcttcatagcccttctatttcccataacctccgtttttctcctcatctcttccactagaaccgccctagcagaccgcatcgacgctcctgtcgtccaaacatcatcaactagcaagtaatggctcttttcgtccaaatggacccctgaagcgatcctataagctcttctcgcttgctctaaccgctgttccgccgaactaccgacctgcaccgcactatttgctcgttcgagtagcctctcgaccttaaaaccgtatttcgccgccattttatcgcataaaaacccaatatggtcaaacccccgctccctgatatgcctcgaaattgttggcaggggaactattacatactcctccgttccagcctcactcaactccattatcacctctgtcatcaatctcgcaaacaccccagcataatatcttctcgaataaaatttatactccataaccatctctgacagtagcccctccctcattccacaagcaaaaatctgtttaaattcctcatctacattacttgcaaacgccgaattcttctttctgttgtaaaaataacaacgctcacacagccccgcaccaatttttccgcaccccctacaataacagggaaaaagtaaatctaaaaaccactcaactgttgtattttttacatattttttcatggaaacctcttgtgttttattcaaaactcttttataataaacttaataataatttacgtggaggaaagcaaatggctcgttcaaatgacgacgacatgcttatggaagatgaattagctgctgcctttttagatgatgcacccgaggaagtgcactctaaaagtgttgctgtcgaagatctcccagtagaagaagagtgggaagaacctgaagattttccaggtcaattagccgtagacgtttatgaaaccgcagacaagctcgttgttaaagctcgtactgccggtatctccaaaaacgatctcgacgttactattaacgataacatccttaccatctctggtatcttgagtggtggcgaagatgagcaaacaacccgttggcacatccaagagtgttactggggcgaattctctcgcaccatcgctctacctgtccaagttcgcgaagaaggcgttaaagctgaacttaaagacggtgttcttaccatctcattcgagaaagaaaaagtcgaaactccaaagaaaattgatattctttagtaaaatcgatattctctgattccgcctagaaagcaaatctctcccttcggggagttttttgtgtatacgtcttcattatacgcccattctctcaatcgccaagcacaagctttttctattcacaacactaagcttatttttaaaatatcttcataattcaacccctaaaaaataaccccctaagcagtggggttatttttgctataaataattattttttaatctttgcgcttatttcatttttgagctttttgcttttttgctaactcaagctctttttttattagcttaatcttttgatttctttccgattccgaattattatattctttttgagcatagcccttaagctcctgcttcttttcgtttgtgacgttagtaagtttatcaatttccttcaatttttccgccaataatgccagatctttctttctttgtatatttatttcttctagctgactattcaatctcgtctcggtttcttctatctgtttaatagcctcatccgtctccgtattctcctcagtaacctctttattctcaccgtcaatcactttcgcttcaccgtcaatcactttcgcttttcccccatcatctttattcttcacattggttgcactattattactattaccgcccgttgttggttttttcgttaaagatgatagcacgaagttcacaatcgcaaaggccaaaattgcaatcactaaaccgataataccgtatagaattgagtctttcgcctttttcaccttgccagtatcgcccgccgaagtagtgtattgcacaccagcaaagatgatcacaatcaccgccactaatgctagcaccccaatcgtcacttgaattatattcaaaatagttgggattagggaattatcattctcaatattacactccgctagcgtgcttgccgagctaccttgtcggttcgtaccggccggacaagtcaccgccgagactggcaaagtcaacatcagcacactcgccagcgtcaacactcctgccatcatccagtttctaattttcatgttttctccttaattttctacgctcattgtatcatatttctcccctaaataaaataaaaggacccctgggatccttttactctacactctaatctttctaactttgtttagtcaaagatgaaagcacaaagttcacaattgcgaaagctaagattgcaaccactaaaccaacaatgccatacataattgtatctttagctttcttcaccttaccaggatcgccggctgaagttgtatattg

SEQ ID NO: 865 - DNA, 9652 bp, synthetic construct
  misc_feature 1..9652: note = Synthetic
  source 1..9652: mol_type = other DNA
aagaattgaaagataccgataaagtagtaattagttttgaaactacgaactttgagcttggcgacatctattcagttgtaacgccgaagctgcttgatagcgcagatttaaagatctttgacgagctagaaggactttatgccgacgctgagagaatgtcgcaaggtagccaggatctagtcgctggtgctcgggctttgcgcgcaggaattcttgaattacgtacagccgtaactagcgtgatcaggtacagggcgtaggtgggttactcgacgaagccactattgatggaattaaaattcaagctagcaccgcggcgcaggaaagcgtaaaaacgcaggctcctacgatcaatgcgatgctggagcaacaacttgcgaataacgaggttttgctcgatgcgttaaaacttgaagcggagcaaatgtgtaaggcgcagtacggtacgtgttcggcggagatgactgcaaaattccaagagcagcttctcgctaaggtaaaaacaaccctcgcacagagttcgatggagctggcgacacaggtagccatgacgactgccgccgctgcggccgaaagtgttgcgacacagttggctggagttgttggcgaaaaaactggggctctactcctagctccgtttgatgcgattgtgggcggaattgaccaagttttgaatggagcggatgagctctgcgtaggaatggaaaaatttgataaagaaggcgtccagaccctaaatagtttcgtcaatgggcagctacgtggcactgccgacaaagccaagcgcctaactcagcttgctgaccaatacgataatttttctggcaaggccgacggcgttaaaagtgaaacaaaattcgttctcatgatcgaggggaggaaagctaagtagctaagatagccagaaggaactgcccgtagcgatgcgggcagttttgcctaacagggggacctgtggtataatgcattcatgcactcgtagctcagctggatagagcgttggtttccggtaccaaaggtcgcacgttcgaatcgtgtcgagtgtaccaagtttttgaagttatatttttgtatcatggaagagctcactgctaaaattatcgagtttaataacgctagagattgggatcagtttcattccccggagaatcttgcgaagtctatagctatcgaatctggtgagctgcttgagtgttttcagtggaatagtgacccggatataaatgaagtaaagatggaacttgccgacatctttaattactgtcttctcttggcggacaaaataggcgtgaagcctgaggatattgtaagagaaaagttgtacattagtgaacaaaaatatccagttagtaaggcaaaaggtaactcgcgcaaatatactaagcttggataggaattgcgatgataaaaatttctggcgaaatagcttttgataaaaacgttactggtctacttgctgttaacgttaaggacatcgttagtaatattgatgattggccagttgtatatatcatctctaatgatactgaagcttacgtcggcgaaaccactagtattagtaccaggctcgaacaacatttatccaaccaggccagacgaggactgaaagaggttagaattatctctgatgaaactttcaataaatccgttattttggatttggaatcgtttttgatttcacatataagtgctgatgacaggtttcagattttgcagaacggcaacgccggacaacagcatcacaattattatcagaaagagttttacgagtcgcagtttgatgaagtttggtcgcaacttaggaagctccatctggccagtcgtagtgttaacgaaatcgaaaacagtaatctgtttaagtattcaccttataagtcacttactaccgatcagtatcaagcctgcatagagattgtgaagtcattggtagaaaatataaatctagagaacagcagtgcttatatcgtggaaggtgatcccgggactggcaaaactatactggcggtatatttgatgaagcttttatccgcttctatccaggacgatgtagagttggatgatagttccttggtcgaaagtttacttaagatacatagtcaatgccctgagctaaaactcggcatagttatacctatggagaatctgcgcagtataattaaagaagtctttagtaaaacttatgggcttagcaagaaaatggtcctgagtccaagtgaagttgctcgtagtgatgaggaattcgatatcttaattgtagatgaagctcaccgtttgaaatctgtgcgaaatatgtctggtttcgagatggataatatgcgcaaaaataacctacgacttggtttgagagaggataatggtacgcagctagactggattatgaagaagagtcgctttcaggttcttctctacgatgcgcaacaaacgatcaaacgtacggatgtcgatcaatcaaaatttgaagtaatgcgaaagaattgtaactttttatcgctaagcacgcaaatgcgctgtggtaaagagggtaaagaatatgtcgagcaaataaaaacaatctttagccccaaacaacctgctgcgcctcggcattttgcgcaatatgatgtcaagatttttgatgacgtgaaactcatgactgaggcaatacgtgaaaaagatgaggcgccaggcattgggttatctcgtaatgtggctggttttgcttggccatggctcacgaaaggtcagaagccctatccgaacaatgctatcgaaactaaaaaatacattactgatggtcactatgatatagagatagacggacataagtacatctggaatacgaaggcgaatggatgggttacttccgccaatgcagtaaatgagatcggatgcatccatacgatacagggcttcgatcttaactatgccggcgtaattatcggcaatgagctgaaatataatacggaaaccgggcatttttacgttgatcgtgatcaatatttcgatatcatgggtaaaaactcaaccgatgatgacgatttactgcaatacgtttttaatatttacaaaattctttgcactcgtggtatgcgcgggacttatatttatgcttgtgatgaagggctgagagagtatttgaagcacgcccttcggagttgaaaataatagtattgactttcataaactcgtgttgtaaaatatactcaaggtgtaagtccttaagtaagatttatactacgattcaatttgctaggtctctataataaggaatcttactatgagagattctgcacagtaaaggcacttcgtaaggagtgctataactgttttaaggtgttacggagtgtacttaatgcttgcaaaaataaatacaaagtagtataatatataacatgaaatattctctaggccttgatatggggacaaccagcgttggctgggctgtcattaatgaagataaacaaagaatcgaagatttaggtgtacgaatttttgagcgcccagaaaatcctaaaaatggagaatcactaactaaaccgcgtcgcgatgcgcgctctactcgtcgtcgactaaaacgccgtcgggagcgtcttaactatctcaaagaattcttcgttggacataatctacttagtagtgttcaagttgataatctttttaaatacgacaaagctcatgagcataaagacccatatataattcggagtatagctattaaagaaaaagtatccaatgaagacctttttatcgctttgtaccatattgcaaaacggcgtggctataaaagtaaccgaaaaactgtggaagaaaaagacaaagagagcggtagggctcttagcgcgatcaaggctaaccagccgctactggccaaatacgacggctcggtagctgcggcactgctaaacgacgcaaaatttacgagacataagcgaaacaaggatagcggctacgaaaactcatttattcgcgcagattttgagaatgaaatcctagcaattttatacgctcaaaaatggaatgacggtatgattagtgagcttttgtatgcaaatcccaacaagccggagacgaaaggtaaatcagggctattttaccagcgcccttttatgaataatgttttaattaatagaatgcgcggaaaatgtcagtttgaaaataaacctcgtgcgccaaaatctagctattcatttgatatttttcgtctggcacaagacctcgctcatctcgaatacaataatgagacaaaactaaccccagagcaaatcaagctctgtgtagaagaattcaagaaaacgaaagaaccgagctatggtaccattagaaaaattcttggatatgcaaaagacgaaaagttccattttgacaacatccgtggcaaatgtggtgcagaccagaaagaaaacgagaaaattaaatttggtggcttaaaattttaccacatggtaaaatccgcacttaaaaatctccccgatgactggcgcaaaatagaaaacggcgaagatcttttcgacagaatcggggagattctgacgcttaataaagatgacgaatctctagaaaaagctcttgcggagattgggataagtcgcgaagctaaagaacaacttatgacaatcaatgtttctggtttttgccacttatcattcgcagctatacgtaaaatcacgccctacatcctggatggaaatacatacgataaggccatcgaacaggcttatcctggccaattttcggaaaaactgtctggcgacaagaatgagctacctcctctttccgaagatcaactctatcaacttactaaccctgtagtaaaacgtgccgtatctcagactcgtaaagttattaatgcggttatcaagaaatatggtgccccatatcaaatcaaaattgagtgcgctaccgaattagcaaaaagctttcacgatcgtcgcaagatggaagaacagcaaaaagaaaatgctaaatataatgaggctatcaaagtaaagctcgaagaattcggagttaccaacccgagcgggcaacaaattataaagtataagctatacgagcagcaaaatggtaaatgtctgtattgcggggcctcactcaacgtaaatgacgttttctcgaacaataagaacgtggagatagaccatattatcccttttagtatctgtggcaatgatggtatcaataataaagccttagtttgtacaagatgcaaccaagaaaagaaggatcatattccattcgatgtgtggggcggcaatacagaacgctggcgaaatattatgacattagtaaatgaccaaaagataccactgcaaaaacaaaaccggttactttgcgaaaaaccaccgaaagaaggctggaacaaacgagcgcttaacgatgcacgctatatgtctagatttatgtcacagtacataaagaagaatctcaagtttgctgagctaggaaggggtaagcaaaaagtcttcacgcctaatggaactattacatcatacctccgtaagatatatggtataggaagtaaggaccgtgagctaaataattgtcatcatgccgtggacgcatgcattattgctaccgtatcatcgggtcaaattgaacgggcctcagattggaacaaatatagagaacttggcgccgaatatcagacaattctcattgaaaacgataacggagagatgtttcaaatgtcgccaggagattatgatgaatggcgtaaaactcttccgccatgggaaaatttcgccaaggaagtttgcattcgtagcggaatgtcgcacgatgctggccggattgagtcgctttcagattttcgcgataaattccgtcaattccagacatacgacgaggattttctccagaaaattcacccgctctttgtctcgcgtatgccgaaacgtagcatgaaggggcaagcgcacgaagaaacgcttcgaagccctaaagccaaggatggcgatttaagactcactcgcatgaagctagataaaaaagccgccgaaaattatttgaaatataaaaacaacaagaataaaaactggttagagaattcagtattagtggagagtgataaaactttatatgagcagctgaaacgtttactcgaagaaaaaggtaaagaagcgttcgatgaaccggtctacaaaaacaacaaacaggaagataaaaatggccgttcactttcaccggttcgtacgatcaaagtttatgaaaagaagccaagcacttctggtacctatctcaatgataaaacgcagtttgctgataatggaaaaacgatttgcttgaatatctatcggcgcaaagataaagccggggattataaattttttgccgccccactttacgctcatagtatcaataagtcttcaatcccgatcctacccaccccaatcggtcgcagtaaggaagaaaaggttgaatttaccgcaatgcagaattccgaagggttaataatggcctcaccagaaaatggctttgagcttgtagcgaaagtatttcccaatgattatgtaaaaataaaatacaatgaccggaccgtcgagggttactatgtaaagtacgggattacaaaaggccaaattacactgctaccacacaatagcactagtaaagatatggcaagcacatgctacgttgggcaagctatcgaggttgtcatattgtctatatccgtccttggcgacaattatgattttgagtaaaattccatggcgtggcgcgtagttgtaattgaaaacccagcaaaactaagcctgaaagataacaaaatcgtcatcaagcaagatgatgaagtcctacttcctcttgaggatatcgatagccttgtagttgataaccaacaaataatcctgacggctagaattttatctgctatgtcagagtttggcatcaatgtgcttatttgtgataataagcacttgccgtcaaccataattttaccacatgggcgtgcttcgcgtggatcaaaaaatgcccgtcagcagctaagcatgggcgaagcattacgtaagcagctttggcgaaaaaatattatttggaagatcaagaatcaggccattgttctgcgtaaaaacaacttcgccatagaatcggataaattagaaaaattggccgcaactgttcgctctggcgacgttgggaataatgaagcaacagcagcgcgcttatattccgatacactgctcggggatactacacgtcgtaccccgatgtggtataattccgctttgaattatggatacgctattgtgcgaggatcgcttgcaagggctattgcggcgcgaggtctaatcaccgaaatcggcattaattcggagcttaatcaatataatctggtagatgacttactcgaaagcttccgcccattagttgatgactatatcgtagaaaaagtagccccattccatattggagacgaatacgactctagtctaaaagtagaagataggcacaacattattgacgtgatgaaccagtatggtataataattgacagaagatatacaataaaacatctgacggacatagtggtggaaagttttattgaggctattatgagtgatgatgctgagattctaactttgccgtcgatagagaaatagggaatgattccatatcgttttatgcgtgccatggtgatttttgaccttccggttattaccaaaaaagagcgaaaaatagccacaaagtttcgcaaatttttgttagatgatggtttcgaaatgcttcaatactctgtctacacgcgtttatgtccagatcgtgataacgcgtacactcatctcgatcggattaaaaaggtcgcacccagcaacggttcaattcgcatgttgatgctgacggagcatcaatttactgatatgcatgtagttgcaggagaaaaaagtgttcaagaaaccaaaaaccttccccaacagctggcatttttctaaaaataagcattaaacaaaaacgcccctttacaggggcgtttttgtaagtatagtggtgtgatattataccacgattcaaattgctaggggactataactgaaatacttttggtagttgtccttgaggcattataccacgattcaaattgctaggggactataaccggcaaagtgtgaagaccgatcgtgtcatcattataccacgattcaaattgctaggggattataacaatcatttccgacttagcgctatctgataataatataaaaatactggacttatgtaaagaaatcctagcctcaatcgtttttgtgctataatataaccataataattttacacggggctcagcagttgtagtcccaccattcaccaaatgaacgaagaggaagtccaacgcaaacgtcgcgagaatgaagaacaggccacgcgtaaccgtgcgcggattcttggtttgccttatctcgacacgcgtgagttcgagagtgttatcccactggttcaggacgtgcttagtgttgacgaaatgcgcaaaaactatgtcctcccgctccaggccggtaccgattctctaccttaccgtttcatggtaacgagccagaccccgaacagtatcattcccgagctccgcaagaagtatactgagcttggtgcacacgtagcgttcttcttgatttctaaggcagcctatcaagtcttcatgctacgctacgatcccccgaaagaagttcattacgacgacatccggatcgggactgaaggtgactcggagacgattgccgaagttagccaaactctaaactcagtttcgaccgaaaaagtttttaacttcttgattgatcaggctgataagcttggcgcttctgatatccatatcgagaatatgcgcaatgagattcgtattcgtatgcgcgttgatggtattttgcatccagttgctaatattgataaggaccgctaccgtatcttcatgggtgagctttcggcgcgcgctgatatctcgactgcctcgatgaagccacagtccggtcacatgcagcaagaaatccatcgcgacggcgcttcgcacttacttaatatacgtgttgagatggtgccaacgatgtatggtcaggacgccgtgctgcgtctcttcaactttgatgaaagcttattgaacctcgacttgcttggtctgtccgacgtcgagatggcaacgatccgtgaaattatttcgcacccacgcggtctcgtgcttatggttggtccgaccggttccggtaagtcgaccacgctctactcgattttgaatgcgctgaatactactgaccgcaagattattactttggaagatccgatcgaatatggtatcacggggatttcgcagatcccaatccataccaacgacggtggctcctttgccgagggcttacgttcggtgctccgtctcgatccggacgttgtgatggttggtgagattcgtgatgctgatactgcgcgcaccgcgatccaagcttcgattacgggccacctcgtgctttcgtccttccatgccaattctacttcagctgctttttcacgtatgattgatttgatcggtacgaacccaatttttgcgagctcgattcgtctcttgattgcacagcgcctagtgcgcaaactctctccaagcaaagagccgtataagcccgatgatggtactgccgattatattcgccgcgtaatggccgaagtcgagggcgttggtcttagcgatattactttg

SEQ ID NO: 866 - DNA, 23480 bp, synthetic construct
  misc_feature 1..23480: note = Synthetic
  source 1..23480: mol_type = other DNA
cgcctgcgacctgcacggacacattgtcgatgtcttctgtatttttcgcagccaaagaaatctggcctttcgcatccagttttgcctgctgatccgcataggcggcggtgtctttcttgatgttcgataccgcgacggccacaccggctccgccgccggaaatgccaatcgccgcgccgccattcccgccgtgcatatcggtggtatcggacgccgtgatcgcgatgccttcaccgtcttccatcgccgagagcgccgcgccttttccagcataggctttcgtttctgtagtaaggacattcactccgacgctgccggagacacccacggtgccgcccacaccgcccgcgatggtcaggtaggtcagatccgaggtatgatctgccgcgatcttaagtttcttgccgccggaaatcgatgcatcgtcatccgcgtaggctttcgtcatagcgttcatagaaaccgtcgcattggaaatccctacgccgaccgttcccgcaccaccgacgctgcccgcggctgcgccctgcgtaaatttcgaatctgcaagaatttccgcgccattcgctgcgctgacctgcgcacccttgcccacatgggcatcggtcgtgtgcgtgacgaaggtctcggatgccgcgcccgcgaggccgacggtaccgcctgcgccgaggcccaccgcttccgtcacgctctcgctggtattttccgcctgcacggtgagggcatcgcccttgacggtcgcgccgtcacccacgctggcttctaccttcttatccaccacttcgaccgccgccgtgaggccgacgccggtattgccgctggcggcaccgctgccagccgccgtggtgagttttgtttcatcgttggcggtgacagagacagcccctgcgtccgtcacttcactctgctgcccgatatatgctttcgtatcggtcgtgatcgagtgcgcgcctgctgcgcctgcccctgcgaaggagccggcaccgcctgcaagggtcgccgcgatggacgtcatgtgttccgccgactctgcattcacatggacggcagaagccttcgtgagagagacgccgtctgcgagacccgcgtaggtgtgacccttgtaagtctgtacgtcgactgccgcgccgaggccgctccctgcagagagggacacgccgcccgcgaggccgaagagcttcgcagcgctcttcgcctctactgtgacattcttcttgcctgcgtcatacttgcctttgccgatggtcgcatcggtcttctggtcgatgacattcaccgtgacagagccggatcccgcaaactgcgaagtcccgcccgcaaaaccgacggcgacggtcttcgccttgctgtcatctttgtccgacgacgcatcaccgttgtaggcattgtccgccttgacggtgatgccgtccgcggcgatggtctttttcttcttcgcatcgcccgcaaggctggctttgacttccgactggttcaccatgacggcgatggatgcgcccgcggagttgccgccgacggcagcactaccgacgccgagtgtcgcattgcttccattcttcgcaagaacagagagcgccccggtcttcatgtcgttcgcattggaaatatgggcatccgtctttgtatgaatccagtttccgctcgccgagaaggccgccgcgagtttgcccgagccggcccctgccgcaacgatggactggatctcgctcgtctcgtcagccgtgacggagagcgcgccggtgctcgtaacttttgtattttccagagaggacgtggtctccccttcgataaggttcgccgcgatggaagcgcccaccgccgcgccgttattgcccgctgaaatcgccaccgcgcccgtgtaggagtcgatggtgccgcggtctttggcctcgatggtcgccgctttacctgcctggaggctgccgcccttgacgtgcgcatcagtttcattatccaaccagttcaaactgatctggcccgcgatggcactgcccttcgccgcgccgctgccgctcgctgcgatgtttgtgattttcgccgcgttgtccgcttcgacggtgagagaggcatccttcgtttcacttcctgtgagtttcagatccgcctcttctgcgtaggcttcattctggtcggtgatggcattgtacatgaagctccccgcgatggcgctgctgttctgcgagaggccgagggcaatcgcgccagcgcccgtcgtgatctggctgtcattcccggaatggatggcaagcgcgtccgcgttgatggtgctgccctgcgtgtaagctttcgctgtatccgtgatgcggttcacggcgacattcgctgccgcggcaaagccgcccttcgccgcgccgacattctcgcccatggacgcatcctggcccgcgacattcgtcagcgcggagtcaccgctgtcgatctgtttcttatctttttccgatttccctgcattgaggagcgtccctgccagatccccgatggaggatgtgccagagcccgaagcgccttcctgcgcgtggagaccggagctgcccgcaccattcgtggggctcgactccatcgtgacaccgcccgccgcggacatcgcatagagtgcgccggtgttcttcgcggtgacgttgacatccttgtcggaagaaaccgtccccagaagcgccgcttcggtcgtgcggtcgatgtggttgtaagcgatggtcgcaccgatgcccgcctgttccgagacagcgatcgcgccgccgatattgatgtctttcgtattgtcttctgccttgaccgctacgtcaccggcagaggaaatcgccgccttgccgatggtcgctttcgtggtgttctcgaaacggttcacattcaccgtcccgtcgatggctacggtctgccctttgccgcccgcagccgcgatggagagattccagccgtcgttttccgccgtgacactgacattctccgctttcgtcacagtcacgccatcttccacgttggcttcagcggtattcttctgatgcacggtgagcgctgcgccgcccaatgcggctttcccgccgccggagaaaggacttcctccgatgtcttcccagaaatccaggctccccggctggtcgccgatcggcgctttgatgtcgccgctgaaattcacggtatgaatgtcattcttcgcgctgacatcgagattgccattttcgatttcgactttcgtaccttccttcaccgttgccttcgcggtgtggttgtattccatgatgttcagtgccgccgcgccggagactttctcacccgcgccgcccgtctgcgtccaggagtcggtgaggtaagagagttcaaagccattgttcggatcgaaaatggttttgagatcattggccagattctcgccgaagtcttcgagtctcgactgccaggggcgcttcgtttccgcgctgaccttcacatcgcccttggacttgatgtcgcccgccagctcggcctcggccttgtcattctggtcgatatagttcaccgccgccgcgatgccggcgctcttgtccgccccctggctgacacctgccttcaccttcgtccgcgacaaggtctccgcgtgtacatcgactgcgcccgcgccgcgcactttccccgcaagggacgccttcgcactattgtcgctgaagaggaaagccgtcgcggcattgaggccgaggccgccgcccgcgcttgtcgaagcggtctgctcagccgcactcgtttccgcgtccgccgctttcttctcggtcgacttattgccccagagcttcttgatgcccgccatgagctggttgcccttgcccttggtcgtcgctacgtccacgatgtcgtggatgggatccgagccagtgccgtcatcgctctcactttcgcttgtgatatggagcgtgtcggggtcatattttccattttcgtccgacaccgtattctccgcgctgacgctgaccttgccatccgcgtagaccttcccttggacatcggccgttgcatgcgtctcggactgaatcacgccgaccgcgagccccagcgtgccatcgccgctgctgttctcgacctcgacagagagatttcgctccgccttcgccgatacatctacatttcctttcgccttcaacgtcgctacgttcgctacgttgacagatgcatcggtcttcgcttccgcccagccaaggtcgatcgcgatcggaagatcttccgcgttgccctgacgctggaggtcgatggcgttgctaccctcggcggaaagcgacatatccttccctgccgtgagcgcacttgtcccctgaatgtctactttcgaggaaacgtctgcgatgccgacattgattccgacaccgaggctgccgcccgtttcgctgccgatctccgactctgctttggaagaaatcgcaagattctcctctgcggtgactttcgaatctgtaatcttcacgcgagagtctgcatccgtcttcacgacagatgccagactccccacctgttcatcaaaggtcgcatggagcaggccgaggatgccgccctcttctgcgcttgtcttgtacgcatctgccgagcccaccttgccgctgactttcgtctccgcggaaatcgctacattctgccctttgatggtggcattcgaaatctcgacagaagcatccgccttgctgcctatgagatttccgccattccgttccgcgctggcgatgaccgacgtgtcaccgcctgccgcgtcaatgtatgcctggttgatgacgatcgcgcccttcgtctcgaaaggcttttccagagtggatgcacccactgcagcgagcgcgatgtcgccatttccgagagccgtcgccaccgtcgccgacggcgaaactttcatcagctgatttctatactcctccgctgccttcttgtcagcgtaagtgtccgcgttattccaatgcgttcggatttcgccgccagtgacattcacactgtccgccgtgacattcacgctgcccgcaccgagaacgacatcgctcgcggcgtagactttccccttgagcgtgatgtcactgccgccggagaccgccttcgcctgcgccgccgcagactgtgccagatgcttctccatcccgccgttgtacagtgcttcgccatacgccgcattcgtccccagcgtcagccgtcccacattgaatacaccggtcttgccgaccgcgatgcctgcattcgagaagaaatacacgtccccgccgatcttgttatccttgatcgcattcacgacgccgtcgatattgatcctgtccttcacaagattgatctggtgcgccgcgtctcccatgtgcaggttcgccacatcgtgctgcgcaatgccgaatttgtcaaacttgttcagcgcgttgccgttattcacctgctgatttttgatatcatactgcgtaccgccattcgcgatctgctgcgtggtcacagtgcccgccttagcgggatccgtgaccgtcacgtccgcatagatgaaattgcaagctgcgccccagcccgcaatggcaaggagcagcgccgttcctgcgcgagagaggacactcccgccgcggcgcacgctcttcttgccctgatgggttttgatcagctcggagccgaccacatagcagccgcgcgtggcattccatacgactttgtatattttattcataagacggtcctcctttgggtgagaagatcatggaaataggttgatgggttcagggttcggggttcagggttagcccgtgggacgtgctgcccctttgattgcgtgcgaaagaggttcagcgggttctataggttctacgggttcagcggggaaggtgcggcgcataaaaatttggaagcgccgcggaggtttgaaactagcggtgttctcgtatcgtcattccgaccgaagtggaggaatctttttcgtttgcggcataccaccgtatgagcggagaaacgcaaatgggaagcctgctttcaaaggcagggagtacggtgtttcatgcaagagaaacaacgcacaatgtgcggatttccgctgcaacaaagatccctcggcttcgctcggaatgacgaaacggggagatggctccccgacaactgctttcaaacttcaaggttcggggttgtggtagcggctccgccgcgaatatatatgaggcgatgcccgctttagactttagactttagacgtctgatatctgatgtctgatgtctcccaatctcctagtcaccagccactcctaatccctagctactaatccccagtccctcaaaatcacacattcctctgcagatagaagtgcactctcggcgatgcatctccgatatttccggaatccttgagcgggatgccgaggacggccttgccataccagccacccttgctgcattcgaggccgaagcccgcactcgtgaggtagtccttcgttgtttttacgctgaaattgttatatgcgacaccatggtcgaggaagacgaagcctcgccaggtctgatggtcactgctgatggggaagccgtactccataccggcgaaccagcctttatcgcccgacaggatactttccttgtatccgcggacgctccccatgccgcccagcgtgaactgctccgtcgagggcagcgactcgaaggcggtgtactggccatagagacgatagagcatgtactggtcattcttgagattctgccgccgcatgaggtaggcgctgtagtacgagccattgttatccttatggttcgcgcggtcatcactctcgtagcccgtgacgctggtcatgaagaaccagagcccattctcatcgaagctccgcgccgacagtccggccttcaccgtgcgcgtcgcgctattcgaaagctccatgcccgagtacgtggtgtccgaccatttccgatggccttccaggaagacatccacacgggaaagcggcgtgatattcacggggtgcgtgatggagatcgccgcgtcattcgaattggccttcatgtcatagtccttgaaggcgccgtcgatgatatccaccagatttctgctgtaggaaatctgcgcccgcgtcccgtgatgcccccatggcgtatcgtacatcaccgagccgccccagatgccttccgtccacaccgggctcaccgcgaggctcgcatcatgcccgccgatcccgcggtactctgtgtacgcgccgatgcggtagcggccactctctttctgtcccgcattgtccgtgaaaatgaaggatgtcagcggattctccttctcctcgagcaccagatggaggtcggacgttccttcctcttcacccggtaccagctctgcctgcacctggtaggtattcgtcgaattgtacacgcggagctcatcttcgagccggtccacgtccaccagctcgcccgtccgtccatggatacgcgagaggagcgccttctcggaaatccgctgatttcctgtgacgaccgtctttccgaattttccttcaatgagccggatgtagaccacaccgtcctgtaccttctgcggcggcagcacggcctgcgccgtcacgatatgcttctcctgatacagcgcattcaggcgggccaccatgtccgtcagctccttcaccgtggcaggtcctgcgcctttgaaatggatggccctccggatctcctctgcggaaagaaatttcgacggcgtcacacggatctccttcacttcaaagaccagcccgccctcttcggctttcgcctccgaagaatgcacggcgtccagcgtgcggtagcggctcttctgataatacgacgtcacctgctggttcgtctcgctcatgcgcgacgcctgatccgtcaccttctgcaccgccggatccgtcggatcgagctgcggaagcgccggtgcagcactcacgctgcctgaaaaaagaagggctgtcaaaagactgagagatagcgattgtatagtacgtttcatggcaagatcctccatcgaaaaaaggcaacaggcacagaaatccatctgctttttctaaaaaaggatacacgatccctattctgtatctattatacaggagattcttccttctgaccctgtcacaagtgacagggtcaaaaaattttgagaaaagttttttgggaggatgagggactagggactggggactggggactgggggctaagagacatgcggacatcgcccgatggatgctccgcagcgtttctgctctatgcgccatgccgccatgcctcatgttcccttgctctccgtgatataatatgatgtaaatattctcaccgcacccttggtgcttccatgtttcaaagaaaggacccactcatgaacaccccgttgggggctgactacagaagccccactttctggcagcggctgtttttcatcctggccatcaccgtggtcgggacatttctctactccgtcggcatcaatgccttctatgtcccccatcactttctcgcaggcgggctcaccggcatcgcgatgatcctgaactacctgacgggctttcccatcggtatcgcaaacctcatcctgaacatcccgatccttcttcttgccctgaagttcatggggaaattctataccctgatcaccatcataggcaccgtgctctgctccgtcttcatcgacctcaccgcaccgcttgccgccatgtcctccgtgaaacagccgctcgtctctgccatcgcaggcggcgtcatccttggccttggcatggggctcctctaccgctacaacagtaacaccggcggtctcgatgtcatcggcgcgatcctgaagaaatacttcaatctggagatcggctacgtcgtctttgcgctgaacttcctgatcgtcatggccagtgcctggatctttgccctggagctcgccatctgcaccctgatcgcgatgtacatcaatgcgaatctctcgagccgcctcgtcatcggcttcgcccagcggaaagccgccttcatcgtttctgacaaacctcttgagatcgcagacgccatcctccgcaacattcaccacggtgcgaccctcctctacgggcagggcgccttctccggcatggataagcgcatcatctttgccatcgtcgatctgacacagatcacgaaactccgtcactacatcgaagaaatcgacccgcatgcctttctcttcatcatgaataccacagacgtcatcggccgcggcttcacaagcccgctctccaccgtaaagaccatgccgaagtccatgcgttacaccagcagccccgagggcgaaatggtccccacgcgcatgtggcagtatgaaatggacgaagaagcccacccgaatcagggcgaggccgaacgtgaagctgagaagatcgcaagaaagcgcatgagctatcggaaataaaaaaggggctgtgaagaaatgaggattcatttcttcacagcctctttttgctttcattcggttcagagttcaaggttcaaggttcaaggttcaggtggcggcttcgccgcctttctttagaggatggtatcctcgtatcgcagccttcccctctaggggaaggtgccccgcaggggcggatagggtgactatggcatgaaagacagttgggatcaggtttccctgttactcctaggataagaaggcgcggaaaatgcaagagggattcttgcgaaacatgagcgatcgggctctcttagggcgtttttgtcataacacctgtgctatactaaagaaaagcagtttggcagtgtgaaagagagcggatccatagaggggctgtcagatattttttaaaatggtataatgaaattataaaagattatctaaaacaacaaaaaaggctgtataaagaagatcttcatacagcctttcaggagcagattgcttgtcggttactgctataccccacggcatagtgccttatcttagaacatgttggatataggtaaactgatacattcagcttggtttcaatgttggacataggtaagctgacaccaaccatctaaggttgatttcattatagcaatgaatcttataaaacgcaagtttttaacaataccccaataggaggaactatggaaaagagacagtatcgttttgcttttgatatcggcatcggatcttgtggatgggccgtggtttctgaaaatgagacgggaaataggagaatcgaggatgcgggttcccgaatttttgattctggtgaaatgaaagaaggcaaagataggaaaagccaaaagcgcagaggctttcgcggcgtaaggcgagtgctgcgccgtcgatcgcatagaaaatatcggttgagaaactatttgcgatatgttcattttatgaccgatatggaaattcgatgtgcttcggaagcgtcgatgaatcaaatccttccagtaaaagtcaggggaatcgatgaaaaactgacgaaagcagaattacttcaagtgctcatccatgcctgcaatcatcgtggatataaagatttttatgaagtgacggagaccgatgaggcccaaagccaggaagaagaggatgaaaagatcaatcaggcggcagccgatcggctggatcgatcgttcgaggaaagccattgccgcaccatttctgaatacatctgccggtactgcaccatccccgggacagaccggatcgattatcgcaatcgattctacaaaaatgagaatcgcatgatcatccgaagaaaacatgtggaaaacgaggtcagcacgatcctgaagaagcagagggaatggtatcctgagctgacagaccaaaagatcaaggaaatcatggaggtgatcttctcgcagagagattttgaagatgggccggggtatgcttcggacaaggccgagtatcgtagatatacgggatttttagaaagtattgggtattgccgcttttatccagaggagcggagaggtttcagaaacactgtgctgggcgatgtatatgctgccatcaatgcactgtcgcagtatcgctatgtgcatgcagataccggagaggcgaagctgacccaagaagcggcagcgaagatggtttcttacattttgaaacaaggcagtctgacgcgcacgcaggcgtccaaactgttaaagcctttgggaatagcgatgtatggaagcaaggatgtcgacaaaacattggtgaaatcattccgcttcctgaaagaaatgaagaaaatagcagaaaaatgtcaggtgtcatgggagtcacttttgtcagagaccgatctgaccgagtatgaagaaggcaagacgtcgctgctgaaccagctcgggacggtatgctcgatgtaccagacaccgcatagaaaggaagaggagctgaagaagctctatgcaaaatgggaacacgtacatctcccgcctgctttttggaatgcgctgaaaaggcacaagtttaacgggacttccagcgtttcttatcatcatatggcagatgccatcgaagcgtttctgaaaggagatatttacggcaatttccagtggaacaagcagaaacagctggacgaaaagcaagaatcacagagagaaagactactttccgccaaagtactgatgcaagatgaggatgtgaaagataaccctgtcgttcttcgctcgatcaatgagacgagaaaggtgctgaattgtctgatccggctctatggctctcctgctgaaatccatgtggaagtggctgatgatgtggctcgcagctatttggaacgaaaacgcattcagaagatgcagcgggatcatgaaaaaacaagagatgccatcaaaaagaagatcgcagagatcttgcattgcaaagaatcggaagtcaaagggagccagatcgaacgatacaagctgtacatggagcaggaagggaagtgcttgtacagcgggcgtgagctggatctcgaaatggtgctggacacgcagagccatgcgtatgaagtggatcacatcattccctattctttgatcctggacaatacgcttgcgaataaagcccttgtctgcggaaatgaaaatcaggcgaaaggacagcagacaccgctcatgtatctgaaaggagaaaagaaagaggcgtttatcgaacgtgtcaaagcagaaaagaaaagagcaagtcaccctatcagcaacaaaaaatatgattacctgatgcttgcgacattgtacggaaaggaagcaaaggaaatccttacggggtggaagtccagaaacatcaatgacacccgatatatcacaaagtatgtggtggggctcatcaagaaccatctgcagtttgccggggaaaaggccagagtatttggtatccgaggacacattaccagccgtttcagaaaagaatggctggggaagaatacctggggctcggatgagaagtgccgtgccaattacctgaaccatgctgccgatgccatcgtgctggcgaatctgtccaagatggacgtggaagtcgcaatggactatgaaaaactgcggcagatccggcgccattatggagaaacgagcatccagtatgaccattttctgaaaaatgctgcgcaacgcattgcagccttttacccaatcacagaagaagcgatcagaaagcagctggtagaaagcaaacgtacaccgtcttatgtgccgaatctggaaaaagaagttgacttgcgtctgggaaatccggaaggagaaacacggagcgaagaagagtatagagcaaagacggagatgtactatgaaggcgctgcgtttgtggtgaaacctcatcttccttatgtatcgatgaaagtggaaaggaaattccggggggaaatcgctaaatcgaatccaatccgactcgtggagggaaacgggatcttctatcaagtgagtcgtaagccggtagaagaattggaatcgaaggatttatcggagttgtatacatcagacgggtatctgattgaagcactggaaaaagcatttaccgaaggagaaaagtatttaaataatgaagatgacaaagaaaacaagaaggactcccaaaaaaagccgataaaaaaatacatggaaaaagaacatatagatgtattccggacaacgaatggacagccggtgcggaaagtatcgctcaaagggacgccggtatccaattactacaaaaaaagtatcaatgagacgaattacagcatactcggagtgccgaagtattattgtgtcgaagtgtatacaaacagcaaaggacagacccaaatatgggggctgcgatttgtcgatatgatctcttatgaggggaagctctatctgaaggatggtgtacgtccggcggactatgcaaggcatgtgatgtacctgttcccaggtgaatatatcgaagtagaaaagaaggggaagatagtttatgaagggacttatcaaaatgtattcaacatcaatcaaggaaaattgcgtataaaggtcaagaataccaatgccttaaaaacgatcagtatagggaataaagccggagtcttcaaatatgccatcagcttaaatgggcgcaagtccggagtggtcaaggaaggggaggcgggatacccatgtttcgcacactgcttatcgaagaaggagaacgactgagcgtcgcacatcaggtactgcagatcgagaaacaggggcgaaggatccccgtccccatcgatgacatctactgcatagttttagataatctgaaggctgtggtcacaacggcagccatcaatgctttatgtacggcaggcgctcatatcgtgatctgcaacgaaaagcatttgccgtccgccgtgatctatccggagctgatccattatgcgccgtatcgcgtggtgacaaaacagatggggatgacgcaaggatggaaggatgctctctgggataccatcgtgaaaggaaaactgatcaatcaggcagaagcgctccgcctttgtacaggggacatggatgcgtatcatcgcctgatggaattggctgacgaagtggaagagggggatgcggggaatcgagagggcatcggcgccaagctctatttccggcacttcttcggggatggctttgtgcgaatggaagacgatggcatcaatcatgcgatgaactacgggtataccatcctgcggacggccatgatcaagacgctgtacaccttcgggtactatccactcatcgggatccaccatattggctatggcaatgccttcaatctgggcgatgacctgatggagcctttccgccctgtggtggatatgtgggtcgacctgcatcatgaagagcttttagacgatctcaccggccagcagcggagaagtctggtgaatctgctgaatcaggagatggactatgacgggtgccggatgaagatcagaaatgtgatggctcgctatgtgaagcagtatacctcggcgatcgaaaaggaatcggtggagctgtttcagataccgaccattaccgcgacactttttgaggcgatgaaagcagaatgtcacgaatcatgagagtcatcatcttttttgacctgcctacgggcacacctgtcgaacggaaggcatatatgcagtttcggaaatatctgctcaatgccggttatgatatgctccagtattccgtctatgtccgtatcgccggtagccgagatgatgcccagcatatgttgggcatcgtgaaacggcatctgcccggcaagggacaggtacgcgctctcatggtgacggaaaagcagtatgctgccatgcagatccttctcggaaagccgaccatcgcagagaaagagaccggctgtcaggaaatgctggtcttatagagaaaaatgaggtagaatgagtttaaggttttagctcaatgttggatataggtaaactgatacagcttccttcgagcggtctaataagtttttgttttagctcaatgttggatataggtaaactgatacatgcgtttcttgcaccattagcaaccgtacgttttagctcaatgttggatataggtaaactgatacagagcggctttttttagtattttattccccgttttagctcaatgttggatataggtaaactgatactttcggaagagttagtggtttgcactggagttttagctcaatgttggatataggtaaactgataccgagaatgatatgggattcaagattcagcagttttagctcaatgttggatataggtaaactgatactgcgagccatgtgtttattcgcttcgtagagttttagctcaatgttggatataggtaaactgatacaaaaatgacttttgaaaagaatactttctcgttttagctcaatgttggatataggtaaactgatactatcctgacaatttaggaaatggcggcactgttttagctcaatgttggatataggtaaactgataccataaatcatgagcttatcccacactcgcagttttagctcaatgttggatataggtaaactgatactaatacttgttcggatcatatgcgcgatcagttttagctcaatgttggatataggtaaactgatacaaaacgccagtggtgaaatgtgtaaggcgtgttttagctcaatgttggatataggtaaactgataccatcaaaggaaacaaactcagccaggatatgttttagctcaatgttggatataggtaaactgataccggaaagaagatgaagctgacgggcaatatgttttagctcaatgttggatataggtcaacggataccccaaaagggagaacaacaatgagaatggagagtgtatcggtaaagggaaaagaatcgcagctggtaagggaactgcggcaggaggagctaagaagcctgtgatccccgaaaacgtatgcatttcaaaaaagcccctttggcaggggctttttttgatggcttgttttcctctttggtgtgatccctttggtcggggctttatgggcggtgaggtttaccggcggtgggtactcacagggcgaggcggtagatctcttcgaggtctttggcggagaggctgacgaagccgtggaggaggccgtctttggcgcccttccatgcgatggttttctgagccatttcggcaaagcgggtgtcgtcgatgccgatctctgtgagggtggtcgggaggcggagctgttttttgaagtatttccgcaggcgtttgatgcctttctgtgcgatcttgatggtgtccttgcctttgggggagacgcccatgacgtttgcggcgaagcgggcgatgcggggggcggtggtttcgtccaggacgtaggtgaggaaggcgggggtgaggatggcaaggccgaggccgtgggtgatgtcgtagtgggcggagagttcgtgctcgatgccgtggcaggtccaggagacggcgtggccgctgtcgatgaagtcgttgatggcccaggaggcggtccagaggagatttgcacgggcgtcttcattggcagggtctgccatggcgatgggggcgtctttcatgacggagcgcatcatggcttccatgtaggcttctgtggcggggaaggtttcttctttctggaagtagacttccatgatgtgggagaggatgtcggcggagccgcaggcggtctggtaggcggggacggtgtaggtgttttcggggcagaggaaggagacggaggggcggaaggcctgggcggtccagccgtatttttcttcggtctcggggttggtgatgacggcgctggcattcatttcggagccggtcgcggcgatggtggggatggtgatgagggggagggcggtatcgatctgggcgcggcactggatgaggtcccatgggtcggcgtcgtagggggcgctgcctgcgatgactttggcggtgtcgaggacggagcctccgccgagggcgaggatgaggtccaggtgtttttcgcatgcgaggcggacgccttcgcggacgaggtcgatctcgggattcggcttgacgccggagaggccgtagcagtcgacattggctttgctgatttcggcgaggactttgtcgaagaggccgctctttctggcggagctgccgccggtgacgaggagcacgcggctgccgaggcggctgatttcttcggagaggtgggtgagcatgccgtttccgaagtagactttggtggggttatggtagatgaaatcgtggatcatggagggctcctttcgggaaatggatggtttttctctattgtagcatagatgaggggggtagcccatgggcggggcagcccttgataacaaatgaaagctttgttcgcatgagaaatgagaaatggtggtgcggcgcaaaaataatgaagcgccgcagaattttgatagcgcttcgcgccgtcgtcatcgaaagcgttgccgagggtctttctttgcactgcggtcagtatcccataagaactggcagggaaacgatgccttggtgttacgtatttctgctttcacacatgcatcgtttatcggtctgcaagaaagatttctcgcttcgctcgaaatgacgatatgggagtctgatgtctcccagtctcctagtctcctagtctcccagtctaatccctagctactaatccctagtcaccagtccccagtcactagttcccctgaatcccgcctatcaaaaagacgcccccgcaaaagcggaggcgtctttttagctgtcgcggagggcgcgtttcaggatcttgccggtggcatttttcggaagggcgtccatggggatgaagcgtttcgggatcttgtagctggcgatgtttttcatcatgtatttgcggattttgttttcgtcgaaggtgtagccttctttcatgacgacgtaggcccagacgacttggccgcggagggcatcgggctggccgacgacggcgcattcgccgacgccttcgacttcgtagatgcagtcttcgacttcgccggggtagatgttttcgccgttcacgatgatgaggtctttcaggcggtcgacgatgtagatgtagcggtcttcgtccatgtaggcgaggtcgccggtgtggagccagccgtcttcggtgaggactttcttggtttcttcgggcttgttccagtagcctttcatgacgttgtcgccgcggacgaggagctcgccgacggtgccggggacgtaggggccgttcatttcgacggagatcatggcttcgacgccggggatggtggggccgctggtcaggtacttgggcttggcggtcgggaggacgcagacgacgggggaggcttcggtgaggccgtagccttcctgcacggggtgtttgtagcgcatgaagaaggcctgcgcgacgggctgcgggatggaggcgccgccggagatgaaggtgtggacggtcttcataagggaggggtcgcctttgcgtgcgaggaggttgtacatcggggggaccatgatggcgatggtgacgtcgtatttcacgatggtattgatgatttccgagggcgtgcgcgagcgcaggatgacgatggtcgagtgggcgtagaggctgccgtggacgatggtggtcatgccgtagcagtggaacatcggcaggacgcagaggactttgtcttccggtttgaagatgatgcgtgcggtgaattgttctacgtttctgacgaggtttttgtgtgtcagcatggcgcccttggggctgccggtggtgccggaggtgtagatcagggcgcatacgtcgtcttcggtgagggctttcgggaaatcaggggcttcggggagcggttcgtgcgatttctcatccagttctttgatggaaatcgaagggacggagacgtccatgggggtgtctgtgatgaggaggctgcttccggagtctttcaggatgtagtcgacttcgcggtctacgagggagttgttcacggggacgatgatcgcgccgaggcttacgacggccatgaaggcgtagacaaattcggcgcggttcgcggagtagaggctgacgcgctcgccttcgcggacgcccagtgcgtaaatagcattccggtagcggtggatggcgtcttcgagtgcgccataggtgacgtcgacttcgccggtgaaggccagatgggatggatcggcgcctttcatgatttcatgtaggaacataggggggacctttctgtgtgtgaaatgtgactggtggctagtggctggtgactagtcacggggaatggtggctatggttagcccttgggccgtgcagctctttgatggcgaatgaaagctctgtccgaaggagaaatggtggtacggcgcataaatcgagggcgcatgccccatttgttctggcaaacacagcctgacaagcgacgttttccgtgggtgcaaggcgtgatgcgcataggcgtttttcaaaacgtcaaaccggagggagccttcttcggcaacatttttattatgaatttatcttatctattgtaacagataacgcatgatgggttcaaggtgggatgcggcacgcccgtggggcgtgcttcttgatggcggatgaaggctcggctcggctcgaatgaggaattagaaatgagaaatgcgaaatggtggtgcggcgcataaaaatatagaagcgccgcggaggtttgaaattagcggttttctcgtatcgccccctaatccctagctactagtcatcagtcactagccaccagctacccatttcctgaaacgctccccgtcttcttgcatctgtatataaaaattctattctattatacagagaaattcctcacttttccacataaatctatatttgcgtgcaaaacaggagcagatcaaatcattttatgcgatccttatctccttgagatcatcgattgtcctttggcacttttctcgaacgctttccagtcctgcgctgtcagttcttcgtagttcaccaccggctttcgcacagtataggcatctctggaaaagacttcgttcgccctagacttccgtgggtctatcatgtccttatccccgatcagcatgatctccccaaagtctccgaatgggatatctctcttcgtgatggcgagggaaggcatcgggaggccgcccagcttaatggcttctctcaatttgccagcagaaacattgtgatagacgacgaggtctttgtctgcagccgtctggtaataggtgggattttcgcttttcagcttgacaaggtcttcttcatttgctacattaggagcagataaaaggttatcgactttttctttaggtatgagccaatcgggctgctctggagaatctcgttgatagccttttttctattgacataaagcaaatttccttcatttaattgaccgataaaccactcataggatgggatcttcgacttctttttcgtcttgccatatgcgcttgcaatccggttgatttcgtaatttcttctcgtagtcacttttagttcaaacgggacgacaatggttgccccgttgttatctttgaggtctaccaccactacgcggcgcttctctccgttcggtcctgcatatgacttaaagatcatgattggatttgtaagcgcccgcggcagctgcttcatgatctccggtgttatgtctcctgcatgctttccgttcaggattttctcaagatctgtcttggcgatttccacaggaaggacttcagctccggttagtttcagcacgagaggcgttgtcattacgcgaaccatggacggctcttctttacctgccatgaaacggtctacgctatctacgaaggatttctcatctgcgtccagctgcttctcgaccgtgctcttctttgtcgacttttccgatagaacgttatgggcatattctccagccatttggtgataggtgctgctctcttcgaagtcgtttacgacgctcgctaggacttctccgtttcccccgattttatcggtagtttctttgacttttgccagccattcctgtatactatgggtaaagagagacttacctaaattctgcccggttttggtatccggatacaggtatttaggtaggtctttttttatttgttcattacttgtaatgtcaccatcatagaagtataaattgccgtcaagattttttacccgtcccggttctctgtacccctttaataattctttacctgggtccagacttttgaaaatggtcttaatctcttttcgtatggaatcggcatctgcggctatatttaatccgttatctcgtgctgccttctctaatttttctttaagtcctccttctgtcataacaattggatttccatagtatagctttgtgaccttttcgacggtttcccaatctccaaaccattccctgaaggtatcgctatgggcgatcagccactggcgctcggtcagctttgtcggtgtaccgtccggggctttcatccattcatcagtattccagtatttctctttcacaagctgcagttcgttctcgatggcggactggttcagctgatgcgcggtctccggactgacttcaccagcggcaatcatggccagtttcaaaggcacgccgtagttcttatggaagttctctgcgagcttagccaagactaaggcagagtctctcgcggctttgatttcttcaagaagcggcttgtaggcctcttcgtaggtctctggatctaagagtgtctgcgcgatgagatcttctttgttttaaggatttcagcgtctcactcactctctcaatggactcgcctctctttttcgcttcttcaatctctgcaatggcaactttcgatgcgtcatcaccttttagaaagacatatcatatgcagcaaagccgcgtcctcttagacttccccatccccaaaacaaaaacggttctcctttcgaagaaccgtttgcacgatttctgctatctcacgctcttcactttcatgcggcgctcgaggacgcgcaggcacatggagacgaagaaggtcatgatgaagtagtagatcgctacgatgacgagcggggggaatggctggaagctgatgccctggatggtggtcgcggtgtacatcagatcggccataccgatgacagagacctgagaggactctttgatgagggtgacgaattcattcccgatgacgggcaggatgttgcggatcgcctgcgggatgatgatgcgcaccatcgactcccacttcgagaagccgagggacatcgcgccttcgagctgccccttcgggatggactggatgccggagcggacgatttcacactcatacgcgccggaattcaggatcagtgcaaggacaccggcagaaagtctctcaaagtccacgcccatgatctggaagctggggaaatggataccgaggaacggcagcccgaagaatacgagggaaatctgtaccagaaccggcgtaccgcggatgacttctacataggcggtcgagatccactggaggaccttgatgccggaaatcttcatgaatgcgagaatgatcccgagcagaagaccaaagaagcaggacagaagagaaataatgatggtgattttcacacctgacatgaaaatgtcattatatttgacagctgtatctaataccatatccataatcgcatcatctccttaaatatcagcatggatcagacgcttcaggaatgtctgcgtccgttcttcctgtggatgggtgaagatatcttcaggatttccttcttccacgatatagcccttatccatgaaaatgacgtgattggaaacgcttctggcgaactgcatctcgtgcgtgacgacggccatggtcatgccgcccaaggcgacttctttcatgacggtaagtacatcaccgacgagctcgggatcgagcgcagacgtcggttcatcgaagagcagcatcttcggcttcatcgcaagcgctctggcgatagcgacacgctgctgctgcccgccggaaagctcgcccggataataatccgcacgctcggcaagaccgacgcgggagagaagctccatcgcttcctctttcgcctgctctttcggcagcttcttgatgtggatcggcgcgtacatgacattctctaccgcagagaacatcgggaacaggttgaacgactggaaaaccatgccgacatcgcggcgcagcatcttcacatcggtcttttcattgaccttctttccatcgaaccacagctcgcccccagtcggcgtttcgagaagattcaggcagcgcaggaaggtactcttcccgctcccggacggaccgataatggtacacacttctccgttctcgatcttcatattgatatctctcagtacttcgaccttaccgaatgatttctgcaaatgtttgacttcataaatgacttttttatctgacatagtcctcacacccttcttaattattcaagatagtagcataaatatacaggtatgtcaataaaatttcgtatacgaaaggaaatggaattcaaggtttaaggttcagggttagcccgtggggcgtgctgctccttgattacgtgcgaaagaggttcagcgggttcaacaggttcggagggttcaacgggggtggtgcggcgcataaaaatatagaagcgccgcggaggtttgaatatatggtattcacaaaagatgggaaccctgtgaaccttttgaacctgtttaacctatgagacttcgtaaacggggaataagaatagtctgctttcaaacttagcccctcggggcgtgctg

SEQ ID NO: 867 - DNA, 23447 bp, synthetic construct
  source 1..23447: mol_type = other DNA
  misc_feature 1..23447: note = Synthetic
cggtgtgttcgcattacttcttccggtagttgtaacaaacggacctaaagtattgttgccgttgctttccgtaattttgtgtatggcaataggaagtataactcaagcggcgctggtatacggaggacttgttgcgacattcggtaaaatgaatccgataaaattcttcaaaggaatgtctgaagcgatggcaattgcattcacaacatgttcatctgcaggtacacttccgataaatatgaaaaacaccgaagaaaaactcggtgtacgtcgtgatatagcaagcttcgtacttccgctcggtgcaacgataaacatggatggtacagcactttacatgggtatttgttcgatatttatcgcaaacgcattcaatgtaccgcttacatttgatcagatgattatgatagtatttacgggaacactcgcatcaatcggtactgcaggtgtacccggagcaggacttataatgcttgcaatggtacttcaatcagtacaacttccaatcgaaggtttggcactggtagccggcgtggaacgtattatggatatgttcagaacatgtatgaacattacaggtgatgcaatggttgcggtagttgtaaaccaatctgaaggaaaagaaatagtaaaaagcaatatagaaatatttacggacgaaaaataaaacatagaaataaaaaaagccctccgtcgggtgtattcgcaaaacggatacaacatcaagcggagggtttttaaatgtaaaaaccgaaaaaggttgacataatctcgaagactgtctatattaattatgcaagtaataaaagacagatcggagaacgtgacatgctcaaagcgtataaacacgatgaaaatcatatactctgcgaaatacaaccggaaaaagcggaaaaaggctcttggataaactgttcaaatcccgatatggacgaacttttgacattaaacagattgacatccattccgattgaaacgctcaaaatggcacttgaccgtgaagaacgtgcgcacgttcaattggaagaaggatacatatttgtagttgtaaatactccagtagtactggaaaaagacgcatacgatgcacttccgctcggtatatttatcacaccgaaatttttcgtgacggtatgccttgaagaaaacggagtgatagaaagatttttaaatgaaagttttttgtcattttacacttacaaaaaaacacgctttctatttcagatacttttgaaatcggcatcgacattcctttacttcttgaaacacatttacaaacagaccgaagaagtggaagatgaaataaagaaatctttgcaaaacaaagaactttacagattactcgaatttcaaaaatcactcacatacttcaacttcgcacttcattcaaatcaaaatgtaatggaaagattgatgcgacttcgcagaggacatacaccttcattacttaaaatgtatgaagaggacgaagagcttttggaagatataatcatagaaaacaaacaggcattggaaatggtaagtatatacaccaacatacttatatctacaatggaatcgttctcttcgattatctcgaacagattgtctcaaataatgaaatttttgacatcggtgacaattcttcttgcagtaccgacagttatttacagtctgtggggagtaaacgtgccgttacccttacaaaattcatcattgggatttatggtaatggtggtatcgggaattgtaataaccggactttttgcacttgtcctatggtggaaagatatgttataaacaactcgaaagagttgttttttatttacaaaacaatacgcaaaaaaataaacggttgaaaaataaatgcgaataatattataataaaaatccgatgcacaaggaggagaaacatgatagaagcaattgaaaaaagacgaagcatacgaagatttataaaaaaaccgatagcaaaaaaagatattatggaaataattgaagcgggaactcttgcaccgtccgaaaaacatgcacaaccttggaaatttatagtaatctcgggaagcgggaaaaaagaacttgcacgcagaatgaaagcaggcatagaaagaaacagaaacgatttgcatgcgacattcggaaaaagctacgaagcattgataccgtcggcaatttacacgatgagaattttacaacaagccgacacgataatattcgtaatgaatacaaaaggtaaaccctacaatgaaccgctcacaatggcggaacatcttcttgaacttactgacgtacaatctgtatccgccgcaatagagaatatgtgccttgaagcgacacaaagaggtataggaagtctttggacatgcaatatttatcttgcatacgaagaaattaaggaatggcttcaaacggacggtgaagcggtagcggcaatagcgttcggatacaccgacagagaagcgagaaaaccggaaagaaaacccttggaagaggtaatagactggacaatgtatgaagaagcggaagaaacaagtgaataaaaactgagagaaggtaaaaacgattaccttctttttttatttaaaatacagataaataaaaataaaattatgataaaataaaaatataaagggaggtggagattttcgttttttaaaataaaaacacacaaattaaaagacacaaagtcttgcgtgatatggaaaatattcaccatatcatcaattaaaaagaaaggaaacatgatggcatatgtaaacgaacccttttcgggcgaagacaataatttcgccatagtaaagcaagcacagggaaaagtgctgggaagattgaggtatgaagtaaaaagttccataccgtcggccggagtaaaagactaccgatttttcgcagatccgttatctcccgtaccgagcgagtatgaaaatgccgtaaaattcggatttacaggatttatgagcagactcgactgtgaattcgacaaaattaaaaatgaagaagaagcagtgcaatttttaaaagaaaactacaaggactgtctggtgacatttacaccggcattgagaaacaacaaatttttcgtattggacgatttgcaaaaagaaggcaaaacattatttatggatacggataaagactacatacccgtacctgtattcggtacggtagagcatccggtattcggtggaaatataaataaattttgctttcacatgaaagaaggaaagcctttacccgggctttcaaaaaaatattgggataatgaaatggaaccggaatttgtcattgcgacaatgaaaacttatgaaggaaaaataggaccctacataatatttgcaccgttgtacaatgacgtgttcaacagcgaagtaataggagaaggcggagcgtacttcaaatcaaaaagaaattccgcacttggatatgcactatacgacatgcaaaatacggaacttaaaaatcacgtattgcgctgtgcaaaatctcccttatggttcatacctcgtgaatacctgcccgaattcagaaaaaatttaaaacccgtacctcaagacggcgacatattaaaagacttgggaatagaaataatacacgatccgatatttttaccggcaaaagaaaatgttttaaaaatagaggaaactttggcggatatggtaaaaaacaatcataaagaaaatgaaatcaaaactgaagacaagaaatacgacgaaaaagatttcatcaaacatttaataaaatcatccaaagacatgggctttttatacagtgaaaaagatctcataaacttccatatatccatgaaatcttcacgacttgtaatattgtcgggaatgagtggaatagggaaatccggacttgtaagaacatacggaaaagcactcggacttcccaaggaaagaaccgtactcataccggtaagaccctcatggatggatgacggagatttactcggatatgtagatatgaaaaatatgatttacagaccggcggacaccggactttcggaacttttgatagatgcggaaaaaaatcccgaaaaactgtacatcatatgttttgacgaaatgaatttggcaagagccgaacactactttgctcaattcatatccgtacttgaaaatgaagaagaaatgaaaatacgtctgtacaacccctcgttggcgacacgtatttacaacagcaatcaatatcctccggaaataacaatcggaaacaacataatgtttgtcggaacggtaaacgtagacgaatcgacatataaattcagcgataaaatactcgaccgttcaaatgtaataacactcaaacaaggaaaatttgtgaatctttcgaatgtacgaaactcaaaagacataaattcaagagaaataagtgcaacggaattcaatacattcagaaaaaccggagatatagaacttacagaagaagaactcaaattcttggacgaattgaacgactccttctacgaaagcggcataatgtgcggcataggattcagagtggcaaaacaacttgacaactatttgaaaaacataccggacaaaataaatttcacacgcaaagaaggtatagacgtgcaaacggtacagcgtatattgaccaaaatacacggatcgtcacaacaactcaaaacgcttatagaccatgacgaagaaggaaacctcaccggaaaaatcgcacaagtactggataaatacaaacacatatccatgtttgaagaaacacgccgagtactgaaagaaaaatccggagagttgaaattctatgactacacactctaaagaattcggacttacattctataccggaaacgggcaaataatcgaatatccgaaaaaagcgtggaaaaaagatgtaaaagattttatgaaagacaaagtcgaagcaggtataacgatagcggaaaatcaggatatactcgtgaaatttctggcaaacgaaaaagactgcatgacaatggacggccttgacgttgccgaaagcgaaaaactcgaaaaaaaagacggagaaatatatataaaaccgcaacgaaagaaagaagcgccattacttatattctccggaaaagattttcccttggtaccgggatactatgtaataactgtataccatgaaaacgaaacatactacggacttttggaaataacaccgaaattcatggaaaaacagagttggcaaaatatgagagaagaacttatatccgaaataaaaacactctcattcgacttcatgaaaagaaacatacaaatcacaaaagccatggaaagtgcattgggacttaatgtggatatgcttttgagattttacataatacatgaagaatgcgactacgtaatatcggtacttgacgaattggcgaaaaccgccaacacaagacttgtaataaacaaaaaaagagtatacgaccaaaacaaacaaaaaagcgacgtacatataaaacctcagcacataagattcagagaaggttcatactcgcaaacgatagtatacatggaaaacacgcttgacgtggaagaaaacagatttgtaaaaagaataataaaaaaacttcacgttatactgaaaacatttatagaagaactcgacaaaaatgcgacaagacttgaacttaggcaagaggaactcagagagttttccgaaaatcgtgaatataaaatgggtaaaaaagcattgatacactttgacgactttcgtaaaagagcgatgcaacttttaaacattataaaagaagtcgaaaaaacgaattggtttatacaaacaagcgacacaaacgaaaaaaatataccgatgacggtatttcttgatccgcgctactccatactttacaaattgcataaaaatttgaacaaaccggaagaaagtctgtcggtatcgtcattttacagataccaatggaaacgaacggacaaactttatgaactgtggtgctttttgcaattcataaaagcacttacaaaaaacggatgggaagtaaaaaaaggcccctcggtcgaaaagaaagacggtaaatatcgactgtcaagccttgaatccggaacggtaatatgtctgaaaaaagaaaagaaagaagtatatgcggtatatgacggactcataccggaaacatcgaaggaaacaagcagaaaaagaaatcccatatacacaaacaatccgcacagacaaccggatttgagactggacttctacagcgaagaaaaatactgcggctcactcatcgccgacttcaaatacagagatatttactacctctggaaaaacgaagaaaaaagcagattgctcagaagacaattcaacgcatatcgagatgtaaatacgaaatattacaaaaactatgaagaaaaaagatcgctgcaagacataagaccgataaaagaagtttgggcaatatttccgaaagaaataccgacaacaaaagacgaagactacaatttgagatttatatcgctggcaccgtcactggcatcaaatgcgacactctcaaaaatgcttgaagaatatacaaaaaatatttataaaagataaatggaaaaaatatttctcacatacatactcttcataaaccttgtgacattcgctcaattcggtatagacaaaagaaaagcgataaaaaacaaaagaagaataaaagaaaaaaccctccttcttacggcaatggcgttcggaggaataggggcatacctcggaatgcaggtattcaaccataaaaagaactattggaaattcagtgtcggacttacaactatcggagtaattcaaacagtcgcaatatacttcgttatcgtgaacatgtaaaagcacaatcgaaaaaggttgtgctttttcaacggaaaaatatttcataaataaagaaatatgaaaatacaatatgtaaaatttgaaaaatgaaaagaaaaatataaattaatttaaaacggacttgattttatagaaataaaattgtataatcacaaggataaaattttataaaacgaaacgaaaggaggagtcgcatcatgcgattccttttttcaaaaatcgggagtcttgagaaagactctcttgttacgaaaagagcgaggaggactttatggaaaaaagaattattcacgtagaagaacgattacctttattacaaactgtaccgctcagcttgcaacacttgtttgcaatgttcggttcgacggtattggtaccgtttcttttgaacgtggatccggcaacctgtctttttatgaacggaataggtacgctcatataccttgcaatctgcaaatggaaacttccggcatacttgggatcgagctttgcatttatctcacccgtacttgcagtatgcgctacaaacggaatgagctatgcggatgcacagggaggatttatagcattcggactttcatttatgatactggcacttatagtcgatagagtaggaacgaaatggatagacatactgtttccgccggcggctatgggtgccattgttgcgataatcggacttgaacttgcaccccttgcgatgtcgatgtcgggatacatgggtcaagctcaaggaatgacaaacgaaaccgcaatgataatctccacatttacactcatagttacaatacttgcaacggtcttgggaagaggatttatagcaataataccgatactcatcggggtagtgtccggatatattctctctgtattcatgggagttgtagacttcacacacgtagcacaaatgccgtggttctcatttccgacattctacagaccacacttcaatgccagtgcaataatgatgataatgccggcactcttcgtagtatttgcagaacacttgggtcatcttttcgtaacaagcgacatagtaggaagaaacctcataaaagaaccgggacttcaccgttcgctctttgcggacggattgtcaaacgtactctcaggacttctgggatccacaccgaacaccacctacggagaaaacatgggcgtaatggcgatgacgggcgtatacagtacatgggtaatagcaggagcggcggtatttgcgataatattctccttcgtagggaaaatagccgcactcgtacacggaatacccacaccggtaatgggaggcgtatgtatacttcttttcggatttatagccgcaagcggaataagaatgcttatagagaaaaaagtagactacacaaactccagaaacctcatactgacagcggtagtaatgataacgggactctccggggcgacagtagtaatcggccccgtacaactcaaaggaatgggacttgcgacagtggtagcaattatattatcacttgtatttatactcttcgacaaactcaaaatatcaaacggtcaataattaaaaaaactctccgaatacgaaaacggagagttttcaatttctgaaaattcggacaatttgaaaagagacatatatggtgatatattaataaaggtgactcggaaaaaagtaaagtcaaaaaggcataaacaaggagagatacaaatgatacagtttaaaacaatacaatcattgaccggtgacgaaataaaaatcagaaccgaagtatttatgcacgaacaaggatttaaaaacgaatacgatgaaatagacaaaattgcataccacacggtactctacaaagaccacaaaccggcaggatgctgtcgtatgtactggaatgaagaagaaaactcatacgtaataggaagacttgcagtatataaagaatacagaaaacagggactcggagctgcactcataaaagaaaaagaaagaattataaaatggagactccacggaaaaaccgcaaaacttctcgcacaagttgagaaaaaaggtttttatgaaaaattaggatacaaagcatacggaaaagaagtagatgacgaaggatgcccgcacatctggatggaaaaaaccttataagcgaaaacgaggcgataaaatgacacctaaagcaaaaagaacaaaagctaaactgcttgaaaccgcaaagcaattgttcaaagaaaaaggatacgaaaacgtatccgtagaaaaaataacaaaagcctcacaagtagcaaaaggaacattctaccactactttacaaaaaaagaagatatagtattggaactcatattcaagtcgataaaaaacaagcaggaagaagtacttgcaagtgaaaactccatcgacatgaaaatatgtgaatacatgaaaacagtgtttgaagaaattgattatatgcctaaagaacttttgcgtaattgggtatgcgattccatacagggaaccgaaaaatatccgcaagccactatatttccgaaaagtataaaaaaatttatatacgaactttttacaaaagaagtaaaagcaaaacgattaaaagaaacaatacccgaagaaaaaatatccgatatactcgtaacacgaatatatggatttataactacatggtgcatattgggcaaaactgaaagtctgtcggaatatgcactgcccgtagtaaattgggagatcaaaaaaatactcgactcatatgaaaataaagtatgaatcggtaaatgaaataaaaatacgcattctcgagatgcgtatttttttatgcggaaaaattgaaaataaaataaaaataaaattgttgacaaacccgaaacggccggacaaaatcagcttagaaaatcaaagacacttaacggtgtctttttttgtgaaaaaaatgtaaatataaaaatgtaacgataaattttaaataaaaatactttcaaagattaaattttgcaaataaaaaaaggaatacaatgtatcccttagcggatttgatgtcggttaccgctgtaccccacggcgtaaaagccttatcttagatatctgtcggatataggtaaactgacacatttaccatcaagattactgaggtttctgttggatataagtaagctaatatccttatctaagtcttgtaaataattgtatcataaacattaaaattagacaagagttattgtataataaataatataacttgcataattatttgttatcgaaaaggtgaaattatggaaaaaagtaaaagaatttacagattaggtcttgatataggtataggttcggtaggttgggcagttgtttcagaaaaagacggaataggaagaatagaaaatttcggtacacgaatttttgactccggagaactaaatgacggtaaagacagaacaagtcaggaacgtagaggttttagaggtgtacgcagagtacaaagacgtagaaaattcagaaagcaaagtatcaagttgtttttaacggaaataggatttttgacaaatgatgaaataaaaaaagcggaagaaaatttcacggcagatataattccgcttaaagtgcgagcaataaaggaaaaaataagtaaaagcgaattgttgaattgccttatacacacttgcaatcatagagggtataaagatttttatgaaattgatgaagatgaaatcgaagatgaagatgaagctgaagctgaagaacagggaaatatagctgcggcaaacagttttgataaaaatttcagaaaaagcggatgtacaatcgtgtcagaatacttaatgaaaaactacaaagtatcggacggaaaaataaatttcagaaataaagatcataaagaagacgaacgtattattatcagacgtaagcatatggaaaaagaaatagaaacaattttggaaaagcaaagtaaattttataatgagcttacggaagaaaacagaaaaaatatttttgaaataattttcagacaaagagcatttgaagacggtcccggacaagccggaaattcttatagaagatacaagggatttatagattcaatcggacgttgcagattttatccggaagaaaatcgtggattcagaaataccgttatcggagatttgtttgccggaataaatgcactttcccaatacagatacgtaaataaagaaaccggagaagtgggattgacacctgaaattgcaaaaattttaatagatgaaatattaaaaaaaggcaatttgaacaagactgaagcaaagaaacttctgaaaaaagaaaatatagaaatttacggaagtaaagatgtggataaaactttgacatcctcatttaaatatatcaaaggcatcaaaaagattaccgatgaagcaaaaataaattggaatattttaatatttgaaaatcaatttgaatatgaagagaataaaatgtccttgttaaacaaattgggatgtattttgtcatgctggcaaacaccgtcaaaacgcagcgataaactggaagaatttatcaaaaatcatcctaaaggaaatttatttaatgatgaagtattggaaaaactgatgaaaaagaaaataagcggaacatcaaatgcttcttatcattacatgtcggaagccgttcaagcatttcttgaaggtaaaatctatggagatttccaatgggaacgggaagaaaaattattgaacaaacaaattgagaacaacaatataaaagttccggtatccgcattgaaaaacaacgtagatattgcagacaatcctgtcgtttatcgaggtataaatgaaacaagaaaaattgtaaatgcgattatagatgtatatggtatgccggaatacataaatgtagaatttgccaaagatgtggcaaagagttttgatgccagaaaaaaagaagaaaaaagacaaaaagagaatagagaaaaaaatgaaaaaacagtaaaagaaattgcaaaaatacttggaatagaagaaacggacgtaagaggtacacagatagaacgctacaaattatacaaagaacaagaatgtaaatgcatgtacagcggagaatctttagatttaaaaaaagttttaagtgataaagacagaagctatgaagtggatcatataattccatactcccttattctggacgatacattagcaaataaagcacttgtactcggaaatgaaaatcaaataaagaaacaacgtgtaccgttgatgtatcttaccggaaagaaaaaagaagattttttaaaaaatgtcgaagcgttttcaacaagaaaagtaaatcctataagtgcaaaaaaacgtgaatacctgctcatgccgacaatttacggaaaagaaattcaagaaaaacttaaagattggaaaagcagaaatataaatgatacaagatatattacaaaatttatgattgcacttttgaaaagcacattgataaaagaaaatgaaaacggagaaaaattgccgcatgtatatggaatacgtggacacattacaagcagattcagaaaaaaatggcttggtaaaaattggggaaatgaagaaaaaccgcgtgaaagttatttaaatcacgcggtagatgccgttgttatcgcatgccttacacaagatgatgtacgtataacaatggaatatgaaaaattacgtcaaatgtacagacataaagaatggatgaataatgataactatagagaagcacttttcagagtagccggacgactgaaaatgttctcaaaaaaaagtaaagaagaaatagtggacatacttttggacagaaacttttctacatcaattataccgagtttatataaagaagtggatgtacgtttcggtccggttgaaggagataagagaactgaagaagaattcagaatagatataaataattactactccggaacggaagattttatagtaaaaccgcatttatcccatgtatcgaaaaaacagacaaaacgttttagaggtgccgttgcagattcaaatcctatacgtcttattgacgaagaaggagaaaaaataaaaatttcaagaaaatcgataaaagatctaaaacgcaaagacttgaagaatttacatacaaacgatacttctcttatagaagctctcaataaagtttttgaagggaaagaagataaatatactgtagaaaaatatatgaaagaaaataatttgaaggaattttgtacagccggcggtcaaaaagtgtataaagtatcggtaagatgccccaaagtaagcaattattataaaaaacaaatagacggtaaaaatttctctattttaggtgttccgaaatattattgtgtggaagtttatgaagacaataaaggtaaaacacgcacttggggacttcgttatgtagacatggtcaaacatgaaggtaaattataccttaaagacaatgtgcttccgaaagattatgcaaaacatgtaacctatttgtttaaaggtgattacatagttgtatataaaaaagataaaaagatatttgaaggaaattatcagtctgttgataacataaataaaaatagatttaaagggtttggaggaaatgcaagtaaattaattgagttaggtataagttcaaattgtagagttgaaaaataccatatagatttattgggaaggaaatgcggaaagattgatgaaagtcggggtgattatccatgtttcgtaccgttgtcatcgaaaaagaaaaagagctgagagtcagtaacgggatacttcatataacggatgaaaatgaagatgtaccgattcctttaaaagatatttattgtatcgttttggacaatcttatgtctgtgtgctcggttgcatccttggtggaacttaccgccgagggtgcacacttggtactctgtgacagaagacatatgccgacagcagtactgtatccggaggtaattcactacaggccgtaccatgtagtaaaaatgcaattggaaacatctataggacttaggaatgctttgtgggattccatagtaaagtcaaaattgattaatcaggcggaagttttgtcattttgtacggggaataatgatgtatccgaacgtatccgtgaacttgcagatgaagtggaagaaggtgacggcggaaatcgtgaaggtataggagcaaaaatgttttttagaaatatgtacggctcggaatttgtacgtatgaaagatgacggtataaacagtgctttgaattacggatatgcgatacttcgttcatgtatcgtaaaaactttgtacacattcggttattatccgccgatgggtattcaccacataggagtaggaaatccctttaacttgggagatgatctcatagaaccttttcgtcctcttgtagatgcatgggtatctatacataatgacgatcttttgacggaacttaccggagaacaaagattatcacttataagtttggtaaatatgaatattgaatatgaaggaaagaatatgaaacttcgtaatgtaataaatttgtatataaaaagttttaccaccgcactgcaagaaaaagatttatcaaaatttactccgcccgtgtttaataaaaagttgtatgattcgttatgtcacgctatatgagagtaatagtaatgtttgatcttccgacaactaccgcggaagaaagaaaagaatatatgtgcttccgtaagtaccttataagaaagggatatgatatgttgcaatactccgtgtattcgagaattgtcaagcatagagatgaggcggacagctgcttgttcggtttgcaattgaatataccatcaagcggaaatgtgagagtacttaccgttacggaaaaacaatatgcacaaatgaaaataattttgggaaagccgaccgtcgccgaagagaaggtttgcgcaaaagaattaattatactataataattttaaggttttagacatctgttggatataggtaaactgataccaagatttaattacgttaactagcggcatgttttagacatctgttggatataggtaaactgatacctcttccgcgtagatttcaataaattcaccgttttagacatctgttggatataggtaaactgatacgaatatctaagcaatactcaccgttaatcaagttttagacatctgttggatataggtaaactgatactgaagaagttgtcgataaagctgaagtgtagttttagacatctgttggatataggtaaactgatacttaacattaatgttaattaacgcaatatccgttttagacatctgttggatataggtaaactgatactgatactcgaagaattaaaaaactatttgcgttttagacatctgttggatataggtaaactgatactgaaatcttgcatgtagtgttctttaaaatgttttagacatctgttggatataggtaaactgatacgccggtacattttgaaattgttctgcattaagttttagacatctgttggatataggtaaactgataccggttaaaagcggaagatgttattttcttagttttagacatctgttggatataggtaaactgatactgcttggtttgcacaaccaactcgtattggttttagacatctgttggatataggtaaactgatacaacaacagaacgaacgaaacagaacggacagttttagacatctgttggatataggcaaactgatacgacagacttgttacttgcagtacaagaagcgttttagacatctgttggatataggtaaactgatatgataatttgatttttgtttaattgaataggttatgagatttttgacggtcatatgtatgactgttttttattttctttcgggttataattttactttctttttgcatttatgttgtagagttatagaaaggagagttattgtgaaggaatttatagctgttttgtcgtttatgactactattgttgccgttattgccggttatatcgttcgtccttatatacaaaatgatcgtgaaaagacgaagattactttggagcgcatggcttttttgagtagcgatgttgacagtttgcgtgtggagcttcgtaatttgacggagtcggtttctcgtttgcatgctcttctttgcagggagtttacttgtttttctcatgacggtaagtttatttatagtgaaaaggggtgtgtttcatgacggatttcagattggcttctttgattgcggacgggcttgtttctaccggtatcgagggtgatttcggcagcgtgtgttgttctaccggaggcgattatccttctatcgggtgttcttcttgggagggggagcgtgcggatgatttgcttttgcgtatagagggcggtgagcggtttgctcatcgcagttacagtgatttattgatgtgcggcgatttgccggttttgagtgatattttaagaaaaaattcgacagttcagattgagaagctttcggaggattgtatttcttatgtagatgttatttcttccgttgaaacgctttttgagccgaggtgtattatttatgccggtatgtggtgtcctacttcggtgtcggtggtgctttcgtttttgagaaggtatgaaggtttgattgatttgaatgatattgctttgcttaatgatatgtttatcaaggggtatgcacgatatgcggattgcagcgagtatgctgcagggtatgaaaatcgtgcaaacagtacgtatcgttatgcgctttcagttgaggtgtgatttgtttttgtaaataatatttcatttatgaaacgttgtgctaaaaattctttagaattgagcttgttttacattaagttataaaaagattataatgaatacaggtgttttacaaagggaggcacagaatgaatcttatcggtagcatggtagcgcataaagttttcgggataggatctattactgattttgacggcacgtattttaatgtcaagtttgatgacagagtgataatgttttcatatccggatgcgtttgagagttttttgtcgttttgtaatgagaatgaactgacggaagtagccgaagatgtcagacgccacaaggtagagcagaaggaacgcaaggataaaataataaggaagagaaagaaagaggccgatacacgtaagcgtcttttggcggaggcgagaaagccgagacgcggcaggagaagggtaaggaaggcaaagaagaaaaaggttgaggccgagttgaattagaaaaaagttcaaagaaaataaatatttttattgacatttattatatatatttgtatgattaaaagggacataaaagcattcccccacaatcgtgggggttttttgatgcccggaaaagggggattttcttgtctggaatttatgatgtaattattatcggagccggtccggcgggtatttttaccgcattggaattggcgaaaagtaatttttccgttttgattgtggaaaaaggtcatgatatacgggaacgcgtaaaaattaacaaagatagaaatgcgcctccttctgagaaaaggaaaaatatcgtatgcggttggggcggagcaggtgcgttttctgacggaaaattgacacttactaccgaatacggcggtaatcttgacgattacatgaataagggtgaactttcaaagcttatttcttatgtagattcgatttattgcaagttcggtggggctaatcgtaaggtttacggtgacgagttccaagatgatttgcatgagcttaaacgtaaagccgcttcagcagatttggcgcttattccggcacgtatcagacatttgggtactgatgtgaatgcggatattttggcaaatatgcgtgatgcacttccgagtaatgtggaagttctttgtgataccgaggttgaggatgtattgcatcctaaggaagacggtacattgggaattattgcaggcggtaagacttatttgtccaagtatcttgttgccgctccgggacgtgaaggtgcggagtggttcaataattccgtacacaagatgggtatacatacacgtgccaatgcggtggatatcggtgtgcgtgtagaaatgccggcggaaacgtttgaaccgataacaaagatttgctatgaatccaagcttgtttatttctcgaagtcttttgatgacagagtacgtactttctgtatgaatccttacggatttgtcgttacggaaaacaacggcggacttcagacggtaaacggacattcatttgcatataagaagagtcaaaacaccaattttgcaatattggtttcaaagaagtttacaaagccgttcaatgaacctattgcatacggtaaatatatagcaacattggcaaatatgctcggcggcggcccgattgtacaaagattgggagatttgcgtgacggcagaagatctaccgaagagcgtatcaagaggggacttgtaaatcccacaatgccgtcagctacaccgggagatttatcgcttgtacttccatatcgtttccttaaagatatcgaggaaatgtttgaagcattggatgtggttgcaccgggtgcaaactccagacatacattgctttacggtgtagaagttaaattctattcatcaaggccggaactcagtgataaacttgagacggcaatacctaatttctttgcaatcggtgacggtgccggtataacaagaggacttgtacaggcaagtgctgccggcgtggtagttgcaaaagaaatattaaaacgtgaaggggtcgacagcattaatgattgaaagatatacaaaagaagaaatgggcgccgtatggagcgaaaagaatgaatggcaaatgatgctcgatgtggaaatcgccgcatgcgaagcgaatgcaaagctcggacgcattccgaaagaagcagttgaagtaataaagaaaaaagcgaaattcgatgtggaacgtatacatgaaatagatcgtgaagtaaatcacgatattatagcttttcttacctgtgtaggtgaaaacgtaggcgatgaagccaagtacattcatatgggacttacatctaccgacgtaaaagatacgggaataaatcttcaagtgaaaaaagcatccgaaatacttttgaaagaccttgaagaattgaaagaagtcctgaaaagaagagcgatagaattcaagtacacaccttcaatcggaagaacacacggtgtacatgccgaaccgacaacgttcggattgaaaatacttctttggtacagtcagacactcagaaatatagaaagaatgaaatgtgcagccgaagatatgcgtgtaggaaaattatccggcgcagtaggtacatatgcagatatagatccgtttgtagaaaaatatgtatgtgaaaagttgggacttaaagtggaaccggtatccacacaagtcgtacaacgtgatcatcatgcacaatacgtaactacattggccattattgcatcaagccttgcacaaattgcacttgaaataagaaatcttcaacgtaccgaagtacgtgaagtggaagaatatttcagcaagaaacaaaaaggctcatcggcaatgccgcacaaacgcaatcccgtaagaagtgaacgtatttgcggaatggcaagacttatacaaggatacgttgtaccggcgttggaagatgtacctctttggcacgaaagagatatatctcactcatcggtagaaagagtaatacttcccgatgcaacaacggcactcgactacatattgaaagaaacgacaaagcttgtcgacaaacttctggtatatccggaaaaaatgaaagaagacttaaatctcaccggcggacttatatacagtccacgcatacttcttgcactcgtggaaaaaggtgcatacagagatactgcataccgttgggtacagagaaatgcgatgaagagatggatagacggggaagatttctatgaaaatctttgcaaagacgaagacataaagaaatatttgacaaacgaagaaataaaagcatgctttgatgaaaaaccgatgcttaaacatgtcgacacaatttttgcgagatacggtttataacgaaagaggaaaaaatatggcaacagctatggtaatcggcgcacaatggggcgacgaaggaaaaggtaaaatagtcgactacttggcggcaaaagccgatgtagtagtaagatcacaaggcggaaacaacgcaggacacacagtagtgacaggcggaaaagtatatcccctaagactcatgccgagcggaattatgtacgaaaacacaatttgcgtagtaggtacgggcgtagtaatagacccgaaaagccttatcgaagaaatgagaggcttggaagaaaaaggtgtaaaaacacaccacctccaaatatctacacgtgcacaagtagtatttccgtaccatataagacaagatgaagctgaagaagctatgaaaggcagccgtaaaatcggaacgacaaaaaacggaatcggaccttgctatgcagacaaaatcaaccgtataggtataagaatatgcgaccttatggacaaagaagtatttgctgaaaaactcaaatacaatcttgaatacaaaaatagagtacttgaaaaactctatggagtagaaggattcgactacgaaaaaatgctcaaagactacctcgaatatgcggaaattttgagaccgttcgtaaaagacacaaactacaacgtagacaaattcataaaagaaggcaaaaacgtactctttgaaggtgcacaagcatcaatgctcgactgcgacaacggaacatatccgtacgtaacgtcatcacacccgacagcaggaggagcgtgcatcggcgcaggaatcggaccgcacaatatgaaaaacatattcggagtagtaaaagcatacagcaccagagtaggcgaaggcccgttcccgaccgaacttcatgacgaaacaggcgactacataagaaacctcgcacacgaattcggcaccgtaacgggaagacccagaagaataggctggcttgacgcaagagcggtaagatatgcggcacaactcaatacattcgactaccttgcaattacaagacttgacatattcgaccaaatggacgaaataaaaatttgcgtaggatacgaatacgaaggaaaagaaataaaagaatatcccgcagatctgaacttcctttccaaactcaaaccgatatacaaaacatttgaaggctggaaagaaaaaatttccgacataagagaatatgacaaacttccgcaaaaagcaaaagaatacgtagaagcaatagcggaaataaccggagtgaaaataggaatagtatccgtaggcccgaaaagagaagaaacaatagtagtaaaagatgtatttaaaaaataatatttgaatatatttaaaaagaaatatccgtaacaattcaatcggaaaatgttacggatattttttatgtggaaaatttgaaatatgcaataaaaaagtcccttgaagggactgagtttgaaactacctcatgacgaaaaacaaacccacgaagcaaagaattgcaccgaaagccttcgtcaaagtgaaagtttcatggaaaaacaaagatccggaaatcatcagaataattgaaacgatagtactataaaccattgcggctatattaatttgccaaccggccttgtacatataataagcaccggcttccaaaccgatcagacaaaaacccaaaatgaaagcaatccaattaatttttgtatactgccccaaaaactcacctgaaggagaagtataccaacacagagccaaagctgcaacagatgcaaacaagtaagtaacggtcaaagacgcaaaaagatttactgaagcgggaatcaacttaaaacaaaaatgataagtcaaattagccaaaaccaaagcgccgataggccaccaaaacgcaaaattcatagtaccaacctctcaaaatttactatgataaagaaatacagaataaaaagttaaaagcgctctgaatatttatacagaacgctatcagtctaatccttcaagaaccgatttataccatactaccatacttgaaagtgcggtttattcttgagattgtaaccgtactgcactcggtatttcataaatcaatataaatttgtcaaaattattcaatgcaaataaataatttggaaaatgcaaaaatttacaaaataaaaagacaaacataaaaatttgcaaattcaacaaaataaacatttatcctaaagcattataacataacaaagaaccaaataaaataaagtatgattaaaagattgtttaaactcatttatatttaaacttcataatgctataattataaataacaaaagggggaataccaatgaagcgaattagaggaacgcaagatattttgccggaaaatatttacaagtggcaatatttggaacaaaaaatcagacaaatatgcagcctttacaattttgaagaaatacgaactccgacatttgaagcgacagaattgtttcttagaggtataggagatacaacggacgtagtaacaaaagaaatgtacacctttaacgacagaggcggaagatccataacgttaagaccggaaaataccgcagctgtagtaagatcgtaccttgaaaataaaatgtatgcggacaatacaacgcacaaacttttttacataggttcgatgttcagatacgaccgtccgcaagccggaagatacagagaatttcaccaattcggactggaagtattaggctcacaagatccgtatgtagatgcggaagtaatagatttggcagtacaatttttcaaagatttgggacttaaagaattggaactgcacatcaattccgtaggacacgttgaatgcagaaaagtattccatgaaaaactcatagcatttttggaaccgaaaaaagacgaactttgcgaagactgcaacacaagattatacaaaaatccgctccgtgtattggactgcaaaaacaccacatgcaaacgaataatcgaaggagcgccgaacatagtagattgtctatgtgacgattgcagcgaaaaatttgaaaaactcaaaacctatcttgacgaactcggaatagaatacatcgtagatccgcttctggtaagaggcctcgactactacacaaataccgcctttgaaataatgtatgaacctttaggcgcacaaagtacaatttgcggcggcggaagatatgacggacttgtaaacgaaatcggcggaatacaagtacccggaataggtatggcaataggaatggaacgtctgatacttgcacttgaacagcagaatttattccccgaagtgaaaaacgaaaatcaagtattcattgcaacggtaggcgaaaaagcaagagtaaaaggcgtaggaattgtaaaagcactcagaaaacagcaaatccacgcaggaactgcaatgcaagaaaaaagcttgaaatcactgctcaaacaagccgacaaagaaaaatacccgttcgttgtaatcataggcgaagacgaacttcaaaaaggtaaagcgatacttaaaaacatggaaacaaaagaacaaaaagaaatcggcttcgaaatgcttgtagaatatataaaagaaacagtaaaataaaagcataaaaaacggtataatcgcaaaagtgattatgccgttttttgcaaagcaaaaacatgcataaagttgtaaaataatgacagatatttctttataatttaagtgggttaaattttgaggattgttttatggtgtttttcgttttatttattattattgcgatgtattttt

SEQ ID NO: 868 - DNA, 22073 bp, synthetic construct
  misc_feature 1..22073: note = Synthetic
  source 1..22073: mol_type = other DNA
cacaggaacttctgtaaaagataagccagtagagctacacaaagaaaaaaagctgaccgtcgaagaatgtatccttggaaacaaaatgacatggaaacacagcgtcccttgtcataaagagaaagtatacaacgaaaaataaacatcaaaaaagagaaccaatccacatggttctcttttttgatgcctgaaaacaagaattaccaataaagccgcatcgttttttgaacaacagtcataaaaaagggatacccagaaagacacaaagaaccaagcccttctatcacgcctgccagctcaaaaaaagaaaaagtaaaaaatctatggtcaaagaaagccataaagaaaataaaaatagataatcgaatgccgcactcaatcggtttatcgacccaaagccgatgaaccgacaaaaagccaagcccgatagaaagccacagataatactgcttcataaagattcaccttcgatccagctttcgatcgccgcacggcaggatcttggattttttacatagcgatacgtcagagaaagcccttttttagtaaagaaagtgaggtctccataatggaaaatacttcctaagaacccctgccgaaaggtcacaagtgccaattcttttctttccagctgataccctgttacacgaacggcaccggaagaaaaagataaaacctgatttgagatcatgcatcgatccctgaaaaatttgatacagcgccaaatcggaagaaagaaaagaaataaaatgccaaacaccggcacatataaagcgcccaaaaataaaagagtcagcgcaagccaaagagccaaaccatgctccaaaggttcataaagacaaacaagcataatggccgttacaagaatttccaaaacagaagcaaagcgccccggaccctctgggagaaggctgatccaggtggaaagaaaagaaacgcccaacaaaagaacagggaaaataatcatagccggatgatgagaaagccgcatgacaaaacctcccgcaaaatataaaaaataactttaatcattatatcacacaataatcaaataatgatataattgaattagacaagaaaagtttgtctaattcattgaaaggagaacaacaatgagaaaaaacatgagagaacttagaatggaaaacgtatgggctgaaaacgatcagaaagaaagcccgttaactggattttatgaaatttcctatgggaaagcctacctcgatttggaagccgcaggcgtaatggtcatccatattaaggactgcgccagatggaaagaggggaacgccaatttgtcgcttcgcggacaggactatgcagacctctgtgaaacgtatgcagaagtagatgcttccggcaccggaatcaacatctacattccaaacgaagtagaaaatatgatgaccccgaaagccgggaacatccacagcaaagggcgaattcttcttacaaaccgaaagatcaacaaagaagaaaacatctatgaaagtgacaatcttcgctacttcatctcgcaggaacaaatgaatgaatgcgaaacaaagtatcgaaacccggaagaagacagggtactggacatcaataatccagtagatcagctgaagctgatgtttgcagtctacgacacagtcaaagaattagaagccgcacaggcatagaggagactacatgaactttgaagaatttgctatgccgcttctaaaaggatatataggggcagaagcctattatgccggaagcatgctcaaagctgtatgggacaaagactataaagaagccataactatggagaagaaactgaaagagcatatttcccaaaggaaaagagcctttcagatggtaaacgcacatccaaggaaaacggatttcgaagctgcctttaaaggcgagtcttttgaacaagccgtagcatttcaaaaagaatggcatgatatggaaaaacagccacgaacatggacagccaaagaaaagcagatctaccaaaaggggcttacagaacttctggagacattcgaaaacggtgaacaacaggaaagagcctactacctttgccgtaatgtggcagaacgagtttaccatcaatatccgggcgaaatcgagacagatgaacagcaactgctcaaattcatcgtagaaagccgagcgcagacagaaaggatgggggctatccccgaaatccacggaagcatcctctcactcgaacgtcttaacaccaatcttgcgatcacccaaaaagaaaatgaaatgcacaaagccatggaagaaaggagccagacagaatgaacctgattggaggacttacaagtacagcgacccgagcggccggtgaagagaacattattgaattccagcgagatctggaaaccaaagaaatggaagagctttaccatctcattgaaaaagccagaaaacagctttacgtcgtagaaaaagagaaaggacaaaaccgaaaagaaaacgaactgtttatcaagcgcgttcgtgaactgaaagcctatatgaaagaacatgggctggaaagccaaaccagaaaaaagaaagtagaggaaaagagaatcaaattcagaagcaaaaaagacatggttcgcagcctcacactcaatacggacggcaacaacgacgaccagcaggatgaattcatcgaaatcatgggccccatttccgaatatgaagccatgaagatcagacactttgcagcgcaaatgacagaaatcgatcgcatgatgcaaagcgcagaaaatgaagcagatatgatcaatttaaaaggattggcacttcaatatgaagcctgcaaacaaaatatgatcggttatgccaaacatattggagccggagtcaaaaaagccccggtaaacaaagcagaaaaagagaaagaaaaagaacgaatcaaagaaaaaacagaagaacacgactatagccgcggaagaacactggaactcaagcaggactaaagaaagagaggaaacatatcatgtatagcgaagaacaagcccaactcattcaaaaaggcatggatcatatcaccaaagcatttcaagtacgtcttgatgaaaacggaaaatttcatctgggaatggaagatcatccggatctttttcctgatgtagaagataaaaaagacgggatctataattttgtaggtaaaatggaaaatctgggagaagaacgcccttctgctgccgatctggatgcctaccttgccagtttacctgaaatagaagaattcaatccgcaaaaagcccaaagatataaagcatataccaccaataggttaaatgaagaactaacagaaagagaaagagaaaaacaaggccgctctctgtatgaatcaacggaagatcaagaaaaacgtattttgaataaccgggaagatattcggtacaaagaatcagaacttcaagaaaaccagaacaaagcagttaaaattcaaaatgaacttgatgaagggatattgacactttccccttataaaaaactgcaggaagccagagtcatggatcatcatctgaatgataagatgggtcaattcaataaaaccattgatcttttgatgaaaaaagagaaaacactcgaaaaagcagccgaaaaagctaaaatagctcaaaagatcaaagaaaagaaagctgaacttgcaaagctctatgatgcgtatgacaaaaaccaggacgaaatcaacgaatacgaaaaacgactaggcggcacagaagaaacacaggaaaaggaactgcatcagctggaagaaaaacaaagccagagaaatgccagcctatttgctgtgaatagagaaatcaagcgtttgacagaagaaatcaaagacagccaggaaaaactcgccattgcagaaaacgatctagccaaagaacaaaaaatggaaaaaatgcaagaagaaagaatcgccatcattcaaaaaagactgaatgacgatcaatttgacgcggataaaataaaaatggcaatgttcttcagaatgagccagattcaaaaagccattcaggagaaggattatgacataaaagcaccagaaagggtccgcatccataatccggaaattgccacctctttagctgaagaaatcaaaaagacagcaaacaaccaaatcaaacaagtaacctggatgctgtacaataacgaaaaagtatgggaaaaagaaaatattgaaattgtaaaaggaattgataccaaagaaaccaacaaaaatggctggaaagaagaaaccattctttacgacaaagtgcttttccggaatgctgatgaaaatacaagaaaaatcattacagcaatgcatagcgccttgaactccgcaagaacaattcaaaatggagaaacttttgattcttatatgggaaggatcaaaaaagatacgctgaaccgccttcgtgaattaagcatgaaagcaagacaaaacggggaaaaagatccaagagaactggtagaacaattctttaatgccaaccgggaagatctcgtcgatccgggtaaagctatggcagaaagactggccaaagaaaacaagaaaagaaatgatttagaaaaactgcccagactgaaccgtcttcttgaagaatgtaaaaaagcacagcaagaattgacccttgcggctaaagaagccacaaaagggaaagccgaattgtttggagactcaaaagaagaagagcagttaaaaacagtcaacgaaaaaatagccaaatggcttggaaaagacttggaaggacttcatctcccggaaaaagaagggaacaacaaccaagaagtaaaaaagctggatgaatatcaggtacacaaaaagcttcagcagttagtcgcagaaaaagaagcagaagtccaggatgaaatctacaaaattcatgaaattaaaagagaagccattccacgaatgatgctaaagacacttcaagacgaaagaaaaatcctgagcttacttgcctaccgagcaattcccaaaggaatgatggaaaaagcgcaagaaacagaaatcgaaatcaaaaagaaccaaaaaccaaaagaactttcccgaatcaatgggagatatccgcttgatggatatactcaaatggcaaaagcacaattagatgcctatgcaacagtcatcgaagcataccaaatgtcaatcaccccgcaaaagtattggaaaatcgatgaaaccatcaatgatttcagaaacagagaagatacgattcagctgatggctaaagaattggaaagagtcaaagccagactgggtgaaaaagtgcagtttaacatgaaggatgatgaaaaaatcgaagactacatcaaccgaattcatagatacgtactgcaggaaacccaaaacaatgcaaaagccagagcaagaatcagagaagaagacatcaagagcatcgctgccaaaatgtccacaggaaaatccatcgatccggaaattcgaaccgctgtcgaacatttaatccctaagtgcaggacagatgattttatcagcttagaccaaatcaataactttgatctcaggaaaaaagacccgattcaaaataagatgagaaaaaatagggaagaactgcaaaaaatcatggcctcatcacatccgaaaccatttgcaaaagaaagtaaaatctatacctatgaaaattttgtctacgaaatggcgcagaaagaatttactattcatgaagccagagaacggttaaaagagctttacgcacagaacatcacgatcagccaaaaagatattgagaaaatcaaagaattgaaagacatttttctcttcaatacccaaaaaagaaagctgaaagaatatcataagtcggaatacgaaaagtttatcgaaaagaggaacgaggtactaagtgctgactacaaaatgaaagaatcatttggcaaggcacaggatctgacctccaaagatgcttttaataccggaaacccggatgatgaaatcgatcacagacaggatgggaaagaagggcagtcaaagaatgaaaccggcgaaaagaaccaactggatacccaggccttctggaaggcaaacctgaaatgggcagccatgccattaaacgcagaagaaaccaaagacatgatcaatatcctggcacaaagagatgccatccttcaacgcagccaaaaagcagaagccgcacttcagaacaatatcaaagccggagaaaacaattatgcccgcattgatcagcttatcggccgagtccagatcatgatcagccaaaatggagcaaagagcagagcaatccaattccaggaagaaaacaatgacaaagcagtagctaaagcaaggaccgagctgctcaatgatctcaagaaagtcagagctcaatacaaagacagaccagaagaaattcctaccaaagaagaactgctgcaaatgaaagacctggctggcaaaaaaacagaagagctgacccagggagaaatcgccctcgtaaacaaagtgaaagccttccctatgacagcagaaaaattgaccaaagcactggaaacagaagaacagtatcaaaacagtgtcaaagtagggtatgctgcaagatggataaaaacgatgacggaaatcaacaacatcaaccgcgcggaatataccacgatcaaagaactgctgcaggaaaatacgtctgacagagaagaaaagatcgcaaaacaaagaatcctttttgaaaaagaaagagaaacaatcaaacgagaacgactgacccaatacaaaggtgaatttgtcagcggcaaaaagctcagagcgttagaagcggaccctgaaaaagccatcaaactgaaaagctatccgatggacttgcttctgatgcacgatccaaaatttgtagaaatccagaaaagcatcgaagaaaacaatgaaaagctcataaaaaccggggaaaagctgacagccctgcagaaagaagctgaagcggcccgagaagaaatccgaaccagtccagaaaagacagccattctcgaagaagcaaaggaagcaagaaaccgtttgataaaagcttccattcctaaatgcatagaaaaaatcgaagaaaaattccttgctgataccaacaacaggaatgttgacaatgaagaaattatgcaggaaggattgcgcatgcttacagaagctgcagaaaagaccaaagtcaacacacttgtcaatgccatgagcagacacgggaaagagtacggccttagcgatgccctggcagacaaagtcaacgacagtatggggacctggctcgatcagcaaaggtacaacaacacgccaagcaagaccgaaacaaaagaaatcaagctgatgcgctctattcagaatgaactcggacagacaaacaatccggcaggcttaaccgaatctgaacgaattgccatgcgcatgagtgaagaaaaagcaaaagtgaatcaccggacatttggcagagcattgaataacctggagaaatatgaaacccaaaaaagagatatcataaaccaagcccaaattcatggcgacgaaaaggcggaagaaaagatcgaaaaaatcaatgcataccaaacagaactgcaaaaagagtatcaaagaaaagcgcaaaaattaaatgaggctatagggaatgctgaaaaaaagctgaaaatggatttatcaaaagaaaccgccccaagcctgaaagtcgatattttgctgaatcgcttcaatttagaagaaaagaagaaaaccttatggagaactgccaatcaatcaataccacaagaatataaggaactcaaaaaagcgcaggcagatttcaaggaaaacgaaaaagccatcaaacaaacaatcatcatcaaagaagaaatcgagaaaaatatgccaacccttcctatccctgcctgcattaaagaaagccaaatcctcgatcaggcagacatctggatgcagcggaaaatcaaaaatgccgccaatatcatgtcctcagacgaaaagacagttaaggcagaaaaaatgtcagactggaaagaacatcatgcaaaaagcgacattcaagcaatcacagcagaagccttgatcaataactggaaaaaacgcgacagccgaaacatgcaaggcatcctggaaacaatgactccggatcaaaaggaaaccgttctgaccggctatctcaaatctgcgaaggaggaaaagctcactgccaataccaaagaaactattactcaaatgctcgagaccattcaggaagaaggaattggcaaaagacagaatcgaatgattgataccgtcatcaacatggacaaggaatcgtatctcacagtggttgaaaccgcgaaagaaaacaagcctatagaagatcggaatcaagaaattcgaaacctcaacgaagagatcgtcaaaaagaaccaaaccattgccgacagcctaaagcaatcggatccggaaatcaaaaaagccgtagaaaccatcgaaaaagtagcaaccagaacatccggggggcaaggcatccaaagcacaagagataccagaatgcaaaacgaggcggccaaagaatacaaccaggccattgaaaccatcaatcagcgcttgattgcaaagggcaaagaccttatcaaaaatgatactatccaactggaagaagcccttcaaatcaaaactgtcaaagaaatggcaactccaaagccttatgaaaatgcgaccccggaaaaagcaagacaaatcctgattgacacagaaatcgaaagcaaacgaaatccagaaatgaccccggaaacttactatgaatccatggacaatctgcttttaaaaagcagtaagacaaagaatgggatcgatttggataatctgatggatttaaccgaaagagaagaacaaacaagtgaactctggaaagaaagctatcaagattacaccgctgaaaaagtcgatcaactcaaaatgctagaacaaacaggcaacattcagagtcttgaccaaagcatttccagcatgaactcaaacagtaatgacagggaatcagaagcaggaatgatcaatcagcagtctaagacaggtttcgaagaaagcctgaaagaaaacgacaatgatatcagcgataccgtgatccaagaaggcagaagaaacattaccgaagactttacccaaaatctgcacacctatatcatgggacttgaatcaacacaaagaaaagtcatggtcatcgaactggaaaatatcaatgcaagttctcgaatgaaggcatcggatttttatcaggaacccatggaaaagatcaccgaagaacagattgaggactatgaaaagatccgggaagcagctttttctgacgtaagaagtatgctcgaagtcaacggatatgtaagcaccaaacagtataaagaaagagaagaggaaaaagaaaatgaaaaagccatagatgaacttagcaaaggcaaagaaccagaaaaaatagccaaagaaatgctaaacaaagattcccgctataaagaatgcaaaaaattcagtgaaaaactgcaagtaaagcaagaagaacaaatgagggaggaaaacaaacaaaacggcatggatcgataatgtgaaaaatcagcttgacagcggaaacaattccacatacaatgggattcagagaaatatatgaatggagaatgaatgtttctcgtgttcagggggctcttaagcctcctgctcatggagagtttatggcaataccataaaccctccttctattccattttccctacagcataagaattttgaccttctgcaaaaagcccctgccaaatggtaggggctttttgtaaaaacaaagagatatagtaaaaaaggaatgaaggaattactttaggaaacaaaaaagactgtacaaagagaatcttcatacagtctttcaggagcagattgcttgtcggttactgctataccccacggcataatgccctatcttagaacatgttggatgtaggtaaactgatacattcagcttggttttgatgttggacataagtaagctgacaccaaccatctaagggtttattcaattatagcaacaaattttataaagcgcaaggtgttagaaatacccaataaggaggaattatggaaaaaagacagtatcgctttgcttttgacatcggcatcggatcttgcggatgggccgtggtttctgaaaacgagacaggaaatcggagaatcgaggatgcgggttcccgaatttttgattatggtgaaatgaaagaaggcaaagataggaaaagccaaaagcgcagaggctttcgcggtgtcaggcgagtgctgcgccgacggaaacaccggaaagaacttctgaaaaactatatccgcaatatccaatttatgagtgattatgaaatccgatgcgcttgcgagaaccctgcagacaaagttttacccgtgaaggtcaaaggactcgatgaaaaactaacgaaagcggaattacttcaggtgctcatccacgcctgcaatcaccgcggctataaggatttctatgacgtagttgatacagatgaaaaagcgagtgcagaagaagaggaagagaagaaaaatcaggcagcggctaaccgcctagatcgactttttgcggaaagtcattgccgtaccatttctgaatacctctgccagcactgcacgattccagggacggatcggattgattatcggaatcgattctacaaaaatgagaaccgcatgattattcgaagaaaacatgtggaaaacgaagtccgcatgattttagaaaagcaaaaggaatggtatccggaactgactggcgagaaaatcgaagaaatcatgaataagatttttaaacagcgtgatttcgaagaaggaccaggcaaatccgatgattcttatcgccgatatacaggctttttagagagccttggatattgccgcttttatccagaggagcgaagaggtttcagaaacactgtgctgggcgatgtatatgctgccatcaatgcactgtcgcaatatcgctatgtacagacagatacgggagaggcgaaactcactaaagaggctgcgtgccgtatgatttcttatatactgaaagaaggaagcatcacgcataaacaagcagcaaaactgctgaagcctttagggttggtagtctatggaaacgaggaggtagataaaacattaaagaagtctttccgctttttgaaagagataaagaaaatagcagaaaactgccatgtggagtgggacacgctcttaatggaaacagacatgacagaatatgtagaagaaaaaatgtcacttctgaatcaaattgggatggaatgctctaaaaaccagacaccacatagaaaagaagacgcgctgaaaattcttcagaagaaatgggggaaaaccaatttaccgtccattttttggaatgcgctaaaacagcataaattcagcggcacgtccagcgtttcctatcatcatatgaaggatgcaatcgaagcatttctgggcggggatgtatatggtaatttccagtggagcaggcaaaaacagctggacgaaaagcaagaatcacagagagaaagactactttccgccaaagtgctgatgcaagatgaggatgtgaaagataaccctgtcgttcttcgctcgatcaatgagacgagaaaggtgctgaattgtctgatccggctctatggttctcctgctgaaatccatgtggaagtggctgatgatatggcccgcagctatctggaacgaaaacgcattcagaaaatgcagcgggaaaatgaaaaaactaaagatgcaatcaaaaagaagattgcagaaattttacattgcgaagaatcggaagtcaaagggattcagatcgaacgatacaagctgtacaaggagcaggaaggaaagtgcttgtacagcgggcgcgaactgaatcttgaaatggtgctggacacgaagagtcatgcctatgaagtggatcatatcattccatactctttgattctggataatacgcttgcaaataaagcccttgtctgcggaaacgaaaatcaggcaaaaggacaacagacaccactgatgtatctaacaggagaaaagaaagcagcatttattgaacgtgtcaaagcagaaaagggaagaacgagtcaccctatcagtaacaagaaatatgattatctgatgctttctacattgtacggataggaagcaaagggaatccttgcaggatggaaatccagaaatatcaatgacactcgctatatcaccaagtatgtagtgggactcatcaaaaaccatctgcagtttgccgggggaaagcccagagtgtttggcattcgagggcacattaccagccgcttcagaaaagaatggctgggaaagaatacctggggctcggataagaaatgccgtgaaaactacctgaaccatgccgccgatgccatcgtgctggcgaatctatccaagatggacgttgaaatcgcaatggactatgaaaagttgcggcagatccggcgtcattatggagagacgagcatccagtatgaccattttctgaaaaatgcggcgcaacgcatcgcagccttttacccgatcacagaagaagcgatcagaaagcagctggcagaaagcaaacgtacaccgtcttacgtgccgaatctgggaagagaagttgacttgcgtctgggaaatccggaaggagaaacacgaagcgaagaagaatatagagcagagacggagatgtactatgaaggcgctgcgtttgtagtaagacctcatctcccttatgtatctatgaaagtagaaaagaaattccgcggggaaatcgctgactcgaatccgatccggctcgtggaagaaaatggaatccagtataaaataagtcgttcgaaagtggaaaaactgaaacgagagcagctgccccagctgtatacgtcagatgggtatctaatcgaagcactggaaaaagcatttgagaataaggacgtaaaaaccgtcaaagactacatggaaaaagagcatctggatgtattccggacgacaaacggacagccggtacggaaagtgtcgatcaaagaaaattcggtatccaattactacaagaagagtatcaatgaaacgaattacagcatactcggagtgcctaagtactattgcgtcgaagtctatacaaatgataagggacagacgaagatctggggactgcgatttgtagacatgatttcgtatgaaggaaagctctatctgaaaaatggcgtgcgtcccgcggactacgcaaggcatgtgatgtatctgttccatggagaatatattgaagttgaaaagaagggggaaatcgtttatacagggagctatcaaagtgtaaagaatttgcaacagtcaaaattatgtgtgtctgttaaaaatgcacctacagtaagggttgcaagcatagcggggaatgccatttttaaaaaatacgttattacactaaacggtcagaaagcggcagaagttaaagaaggagaggcgggatacccatgtttcgtacactgcttatcgaagaaggagaacgactgagtgtcgctcatcaggtgctgcagatcgagaaacagagacgaaggattcccgtccccatcgatgacatctactgtattgttttagataatctcaaggctgtgatcacgacggcagccatcaatgcgttatgtacggcaggggctcatatcgtgatctgcaacgaaaagcacttgccgtccgccgtgatctatccggagctgattcattatgcgccgtatcgcgtggtaacaaaacagatggggatgacgcaaggatggaaggatactctctgggatatcatcgtgaaagggaaactgatcaatcaggcagaaacgctccgcctttgtacaggggacatggatgcgtatcatcgcttgatggaattggctgacgaagtggaagagggggatgcggggaatcgagagggcatcggcgccaagctctattttcggcacttcttcggggatggcttcgtgcgaatggaagacgatggcatcaatcatgcgatgaactacgggtataccatcctgcggacggccatgatcaaaacgctgtacacctttgggtactatccactcatcgggattcaccatattggctatggcaatgccttcaatctgggagatgatctgatggagcccttccgccccgtggtagatatatgggtcgagctgcatcatgaagagcttttggatgacctcaccagccagcagcggagaagtctggtgaatctgctgaatcaggaaatggactataatgggtgccggatgaaaatcagaaatgtgatggctcgctatgtgaaacagtacacctcggccattgaaaaagaatcggcagagctgcttcagataccagtcattaccgcgaccctttttgaggcgatgaaagcagaatgtcacgaatcatgagagtcatcatcttttttgatctgcctacgggcacgcctgttgagcggaaggcgtatatgcaatttcggaaatatctgctccatgccggttatgatatgctccagtattctgtctatgtccgtatcgccggtagccgagacgatgcccaacacatgctgggcatcgtaaaacggcacctgcccgataaaggccaagtgcgtgccctcatggtgacagaaaagcagtatgctgcgatgcaaatccttctcggaaagccgacaatcacagagaaagagattggctgtcaagaaatactggtactgtaggaaataaggatgtataatgagtttaaggttttagctcaatgttggatgtaggtaaactgatacctctcttcatgacgcatgccgaagcggcagagttttagctcaatgttggatgtaggtaaactgataccgtacaagcatgaaatacattcacttgtcagttttagctcaatgttggatgtaggtaaactgatactgacaactatatcaagagtgctggaagtaagttttagctcaatgttggatgtaggtaaactgatacctgaacatgtagcattcggtcattgtcgctcgttttagctcaatgttgaatgtaggtaaactgatactgaagttgcgaagcctgtcgagcaccgaaagttttagctcaatgttggatgttttatggtataatatggtaagcgagatagtcgaatatcccttggtcaggaccggctccctctaatacttaacaagtttgaaaaaagccgcctagccctagggggcttttttcaatgcccaattttacttattagatatgattgaatgtaagttttgtggtataatcaaattaggcaaacgtgatgacatgccgcacaaagaagaaccccatgggaatctggaaaaattcctatggggttctttcttgttaaaaactaagagccaaaagtatcggtaaatctgccaaacactggcgttttcactgctgcaattctcttgcgtatgtcagatattctcgcctcatttcttcaaaatttttcccacgaatgatttcctgattcacttatttcgtaaagatgccttctaccacattgctcggtttccgggaaaagcatcagcgaaatgttctactcctttttaccaaaagaaggaacaaaaagaaaaaatgctaaaaggcgaaactccctgaaacaaaacgaaaagcagtaatgatgaaaccaatcaggcaaaaggataacacgcagaaattctcttttgggctccccgtataaaaaagtctgcccattgaaaaagaatcagaaggagagcgtaaaggaatatagcccgtacacaaatcctcaactatatggaaaagacaaccaactaagaaccagaaaatccaattcagcaaaatggccaagataaaatcagataaagaaaaggtcctaaaaaaaacaagatagtcaaaagaatgaggaataaaccagccatggaaaagaaagaacccaactgccaaaagaggaattacatacaaaacgaaccaatgagaagtcttgcgatgctttaatccaagcgtcaaatcgagtgtatcagggaaaacactgccacttaccgcaaacaacgcagcgggaaaattttgactcaataaaaaaactgaaatgcctgtaattatacgatgtgactgccagatcatcatatcctcccaaagacacataaacccttatcatgttataatataattctacatacaatggaattaaaagggaagtaaattctacatacaatggaaggccaaaagtattatctgaccaggagggaaaaatgaatgccacagtagcaggaatagtcattgaggcaccaaagccaaaaatgagccgagatcaaaagctaatgactaaaatggtaatagctgatcagtattataatgggaaagaagttacccaatacgtcatagccatggcttttgataaaaatgccaaatatatcaataactacgtaaaaaagggggatgccgtctatctaacaggactaatgatcaatcaaccctatatgcaggcaaatggacgaaaccgatattattggttctttaaaatcgaaaccataaagatcctacatgcacatacaacacttaaacaaccgcaaaacaatcctttccaaagcaaacaggttccgcagccagcagtaccagtaaccccaaaagaatcggatagcaaaaattctgatgatgatattgaaatgattgaatttgaaggaatggatgaaatgtaaaataaccggatctttccaaaactaaaagcctgcccatagcggacaggcttttttgattaaaataaactggtaggagaaaaacggggacagcacgaaacagaattacaacgattcaagaattcggtaaacgaagcagaattagatacagggaaagcgcccacatgaaccaatcgatcgataccctgaacaaaatcagaatagacagaataggctgggaaagaacgaaaatcaaaaaaaccaataggaagattaagtgcattcgccgtttgaatcgcatgccacgatccaccagaggatttggccgcaaggacaaaaatcccacgagcaataccactttgcaaacgatcacgctcaaccaaacgtgctggcgaagcattcgtccccaaaggatactcactaagtaaacaaccgccagtatcaataatagactgactaagaacacgattttgtgaaggataaactttttccaaagacgtaggcaaaaccccaatcaaaattccatgagcatccagccctccatgatgcaaagccgtatcagcacccaaggccaatccagaaacaacagcccatccgtgagaggctgcaaaagaaccggcatgaatacctactttttccaagataggagaaagaaagcggctcccaatcatagcaaggcattttttctccaaagcagaaatgttacccttataaaaaaagaaaatagaaggcaccgataaatcgagcaaagaaaccgggaaacgtggatccgtaaagaaaagagaatggatatccatgtcttcttgcttttccaaaatcaactgacttgatgaaagaacttcaagaaaggcaccttcatccggcaaagaacgaatccgcccggggaactttttttgcatatccatcaaaagagaaaaagcagcacgaaaagaatcaataccagcaatctgatttcggaaatcaaataaggttttccgaccaataccaggaactgacaaaaaagccagacagcaggcaataggatgtaacataatcgatcaactcctatcttaactcctatcaaaaaggaatcgggaactgctcaaaatactttttttcgcaaaacgaatgaaaagcagcttctgattcaaaaggtctcttttgatgaatggctttatacaaagaaactaaaagcataaatccttgatattcaaatcgaacctttttaattccaggcgaatatttggccaaaatttcaggggtgattcctggcagagaagcaaacaaagattgataaaattcagacttaaaaatattctcctccatagaacgtgctttttccatccataaaggatcatctatttctttataataagcagaacgagagaaatactgacacaaagacagcttatctaatacaatgtcccaaaaggaaaagagaaatccccaaatcgaagtaaaattataatttgctaatgaagcgccttcagtttttgaaagacctaaaaaagcaacggtaaaagggaacctcttcgaagcacgaactccaacagaagaatccgtgactgaaattaagaaaggatcataaatttccataatttgctttgctgcaaggatcccataagagataccatccaaagaaggtttacaagaaataattctatctgaaaataaagagaacaactcgcacagagatttacaggctttttcatctaaagaagaaatgatacgaaaatcaaagccgccatcgttcatttcatgaaacaagcgaaacaaagtaggtgaagaagaagagccgctgccatttagaatctttgtaaaaagattatccaaatgaagaacaactccggcattaaaatgctctacatgcaatgtacgaccgaccacaaaaagagtaacactgcgcgcatatttcattagatgacgtttacatgcctcaaaatgactgccagaagtcaagatatcatcaatcaaaagaacatcttttccttgaatcaattccgggtttaccagttcgatattttgatagacttgctcagggctgcgcaagtgaagagaattatggaactcgtcactgtcattgcagcataccaagcaagatgatgcgtcagttatctctttttggggatccacagaagccataatgcatttaatcaaagtatgaaccgcagttttcccatttttatacactttagaaggaggaacagcaacaagagcacaatgcccaacaagctcatggcataaaatcttagccacataatcaacctccttgggggagttttgcttaaagcccagaacaaaaaattgggatcgataatcaatatagctggatggttctttattagaagtcaagggaatataattacataaataaaataaatctacttgactagaccgacagttatttctaaaaataaaagagtcagaagaatccatcgactcctcatgtaaaagagagataagagaaaatccattattataacgattctcaacaggaacagttgctggatcaaatggattatctaacatctgtaccggaactaaagaagtgggaatggagcaaaataattgtttgcacttcataaagaaaacacctccacaagaaaaaaccgtagcattatcatactacggttcaaagaaaaaatcagaaaaaagaataatcacagaaccaagaacaaactttaaaaatccaaaaagccaaaatgatagcaataaaaaggtaaatatgctataatattacctgcataacaggcatattccctaatcaaaatatcaaagctttaatcaacatagcgtatcaaatacaccaaaagctcaaagagtaaacaagataccaagaaaaatgctaaagaaggcttaactgaatttacaaaggaagtgtatctatgaaaatcacgacagaagaagctcagaagatcgctcttctttcccgtctgtcctttgcggacgaagacctggaaaagatgagagactccatgaatagcatcctcacctacatggaagaactgaaccagtatgatacgactgatgtagcgccgaccgtgcatgccgtcgagcagtacaatgtcatgcgcgaagacgtcccgcatcagtcttttacgaatgaagaagcactcatgaatgcgccggaaaaggaagacggctatttcaaagtgccgaagattatttaaggaggcagccgagtgaaatacacgattcatgatctccatgaacagctggtgaaaaaggaaatctccgctgtcgaactcacaaagaaaatcatcgcgcatcgtgacagcgtagaaggggacatccatgcttacctttctacctctgatgagagtgcgctctctgtcgcagcaaaggtcgatgcgaagatcgccgccggagaagagatctccgatgttgccggtatcccgggtgcgatcaaagataatatgtgcatcaaaggcgagacctgcaccgcggcctcccgcatgcttgcacactgggtatccccgtatgatgcgaccgtcatcgaaaagctgaaaggggaagactatatttctctgggcaagacgaatatggatgaattcgccatgggctcttcgaccgagcgctccgccttcggaccttcccgcaatccgtggaatacggactatgtaccgggcggctcctccggtggctctgcggcagctgtcgccgcgaatgaagccatctggtccctcggctcggacacgggcggatctatccgtcagccggcgtccttcaatggcatcgtcggtctgaaaccgacctatggccttgtttcccgttacggccttctggctttcgcatcctcccttgaccagatcgggccgctcgtcaaagacgtcaccgatgcagccatcgtcctcaatgcgattgcaggccatgatccgcgcgactccacgtccatcccgcaggaaaagaaggactacaagaaagccctcgtccgcgatgtcaagggcatgaagatcggcgtaccgaaggaattcttcggcgaaggcatcaaggaagagaccaaggcagcgatcgatgcggctcttgatttctaccgcaaggaaggcgcggagatcgtccccgtctccatcccgcatatcaatagcggtgtctctgtctactacatcatcgcaccggcagaagccagctcgaacctcgcccgctatgacggcgtcagctacggcttccgtgcaccgggtgaagatatcatcgatatgtatatcaagaccagaagccagggctttggtgaagaagtgaagcgccgcatcatgctcgggaactacgtcctctctgcaggctactatgacgcgtactatctgaaagcgctcaaagtccgcaccctcctgaaacaggaatccgacgaagccttcaagctctgcgacgtcatcgcagcaccgtcggcttccggtacctcgttcaaatttggtgccttctccgatccgctgtccctctacatggaagatatctgcaccgtaccggtgaacctcatcggtgcaccgtccatttccattccggtcggtttcaaggaaggcatgccgctcggcatgcagctcatcggcaagacgctcgccgaagaaaccatcctgcaggcagcctacaccttcgaacaggctcatcctgaattcaccaaaaccgcgccaaaaggagagatcaaggaatgaaatatgaagtagtcatcggccttgaagtccataccgagcttcagaccaccaccaaaatcttctgcagctgcaagacatccttcggcgcagatccgaataccaatgtatgccctgtctgtctcggcctgccgggcgtgctgccggtcctgaataagaaagtcctcgaatacgctgtccgcgctggcctcgcactgaactgcgagatctcccgcttcagcaaattcgaccgcaaaaactattattaccccgatcttccgaagaatttccagacctcgcagttcgacctgccgatatgtgaacacggctacctcgatgtcgaagtcgacggcgaagtgaagcgcctgcgcatcacacgcgcccatatggaagaagatgccgggaaactcgtccatcacggcacctccatcaccgattccgattattcgctggtcgactataaccgtaccggtacgccgcttctggaaatcgtatccgagccggatatgcgttctgccaaagaagctgtcgcttacatggaaaagatgcgcgcgatcctgcagtacgtagggatttccgactgccgcatggaagaagggagcctgcgctgcgatgcgaatgtctctgtccgtcctgtcggtcagaaagagctcggcaccaagacagagatcaagaacatcaactccttcaagggtgtagaacgtgctatcgagtacgaagcgatgcgtcaggctgagctcctcgaagaaggcggcaaagtcgtccaggaaacaagaacatgggacgaaaaagaaggcatcaccaagtccatgcgtaccaaggaagaagcgaatgattaccgttacttcccggaaccggacctcgtccccttcaccgtctctgatgaatacatcgaagagatcagaaaatctctgccggagctgccggatgccagaaa

SEQ ID NO: 869 - DNA, 14486 bp, synthetic construct
  misc_feature 1..14486: note = Synthetic
  source 1..14486: mol_type = other DNA
ttgcaggcattcgagacaatccgttgtctcgaatccgccagcctttggctggtgggggaaagtagattgctatatgttaaagcataggaaagcacaattgatgagcggggatccaggactgctgggagacagcaggaatcctcaatggattctcgtgatcgtgcaatcctttcagattgcaggaatgaaacagaatgtcctcttataaaagctaagcatacaaaagccgactaaaggtaaacttgtgaaacgaagctcctttcttgaaagaaagggtggaccgccagcccaaagctggcgggggatagttgataccattttgtttgaatataggaaagcatgctgatgtgctccatctgaaggctgattgtctgatgtctatttttttcggtatgtctcctaattttctcaaatcctgcctacttaattctcgcacctgttttttgccggataaggatgtacaaaaacttccacttaagaatgtacagattttctgataatacgattgatctttgcgaagtttacataccatttgtacatttttatttcataaattctgtgtatattttggtattatttaacacacgccatactatgcgtaaatttttactcatggcatggcgtatatttataaatagaggataatgttaatgtaggagaaaatttttgagcaataaaaaaaggatgtgaaataatttcacatcctttagcggattgcttgtcggataccgctataccccacggcatgtgctcgaagaacacagccttatcttagaacttgttggatataggtaaactgatacgattacctcgtttattgttggatataggtaaactgacaccaaccatctagatcttctgtaattataatatcaggattaggattctttttcaagttttggaagttcttatggatgagtcatttttagctatggtgtataattattacataatactatcaataatattaattttataaattgtgcaaatggagaaaattatgatggacaacagaaagtatcgaattgggcttgatattggtattggttccgtaggatgggctgttatctctttgtcagatgcgggaaattgagttgaaagcttagggtcacgtatttttgactctggagagtctaaagatgggaaagatagaaagagtcaggaaagacggggattcagaggtgttcgtcgtacgttaagacgtcgctattttagaaaagaacgtgtaaaaaaatatgtgcgacatattcattttctctcggacaaggaaataagagtggttgaagaaacgccgaaaccaaatctgattgaaattaaatgcagggcagtgaaggaacaaatcagtaaaggagatctgctgcgtattcttatccatacttgtaatcatcgtggataccaggatttctatgagtcgaacgatgaagaaattaatgaagagaggaggtcaaaagaggaaaaggcggctgaagaagaggaacgagtcataaagggagcggcactgaagtttgctaacaattttgagaacagtaaatgccaaaccgtgtcagaatatattttgcaaaatttcacagataaaaaagatgggcggttatattatcggaacagattctacaaaggggatgaccgtattattattctgcgcaaatttgtgaagaaagaattaaagctgattcttgaaaagcagaagcctttctatcctgatcttactgatgatcgaattaatcatcttatggacatagtattcagtcagcgtgatttcgaagatggtccggggaatccggatgataaatacagaagatttaccggatttttggatagtattggatactgcaggttttatccagatgaacgcaggggctttagaaacaccttgattggaaacatgttttctgccattaatgccctgtcacaataccattatgtaaacacggaaacaggtgaaatgggcctgacaaaagatgcggccaataggatggttaactttatcctggagaatggaggtattaaacaaaaggaactgaatacggttctgaaaaggatgaatgttaaagttgtttcaagtggtaataaaaaagatattgataacactctttctaaatcttttgattttattcgtccgctgaaaaaaataattgatgatgagggaatggattggaatgagataatccaggcaggggatgtatttgattatcagaaactttcgtttttaaatcagattggtcatacgttatcctcttttaaaacaccgagacgaagagaaaaagaaatagaggtattgaaacaagcggccgataaacgtaacatccattgtactgaaggattctggaagagaattctggggctgaagatgaatggcacgagcagtgcatcatatcatcatatggcggatgccatagaggcatttagaaatggtgatatttatggtaatttccagtgggagacggaaagtaaaaagcaagtagaaaataatgataaacggtcattgactcttccggcttcattactgacacaggatgaggacattaagaataatcctgttgtgtatcggtctatcaatgaaacaagaaagatcgtaaatgctcttatccggatatacggggctccggaatgtatcaatgtagaagtagctaaagacctggcgcggagttttatcgagcgaagggaaattcagaatcagcagaaaaagaatgaaaaaaacaatgaagatatacgcaagaagatcaaagatattttggggtatgaagaggctaaggatgtaacctggagacaaattgaaaagtataagttatatatggaacaggaaggtaagtgcatttacagcggtaaagagctccaattagaagaggtcttaaaagacagctcacacaaatttgaaatagatcatattgttccgtattctctgattcttgataatacgcttgccaataaagtgttggtttatggaagtgaaaaccagagaaaagggcagcggacccctaaaatgtacatggatgaagaacaatgggagcattttagacagcgtgtcattgccttttatcagagaaaggggaaggttaaaccaatttccagtaagaaataccagtatcttatgttggaatccatttatggtgaaaagacacaggaactgctttccggttggaaatccagaaatattaatgatacaaggtatattacaaaatatgtggtagcgttattaaagaataatctgcagtttgcaggaaaacccagggtctatggtatacggggcagcattaccagcagattccgtaaacattggcttaataaaggaacctgggggagtgatataaagtgccgagagaattatctgaatcacgcagctgacgcggcgattattgccagccttacaccattagatgtggaaatagctatggactgtgaaaagctcagacagatctataatcattatgaaaaacgcacggattcaaagccttatcagaactttttatggatggcagtacgtcgtatatcggggttctaccataaagacaaggatgaagtagtgaaactgataaatgactatataaatgatttaagccgcattccatctgtgatttcagatttaagggctgaaattgatttacgactgggattgcctgagggggatttgcgtacacctgaagaattctataaacaggtggaagaattttaccatggagcaaatgattttctattaaagccatatcagccgatttcttcgataaaacctgaaagaaaattcagaggaactgttgtggattcaaaccctattagggtaataaaggaagctggaaaatactataagatttccagagaagctattcaggatgtaaagagaacaaatcttaagcaactctatacgagcgataaatatctgttggaaaaacttgaggaagtatttcaatcggatgatgaaattgataaagttggggattatctgaagaaacacagtttacaggaatttcggaccacatctgggcagcttgttagaaaagtatcaataaaaaagaaacccatatccaattattatgttaaacggataaatgacgataatttctcagttttgggattgcctaaatattactgtatagaaatctatgaggataagttgggaaatctcaaaatgtggggattaagatatgtggatttgattaaaaagggggacaaactttatttgaaaggtactttacctgaggattatggtaagcattacttgtatctgcataaaggtgattatgtagaaattaaagcgaaaaaaggaaaatccgtcttagggttttatcagaatgcttacaatgttaatcagagtatgattagtgttttgccggtaaattcatcaaatgagccaatccctaaaattattagtaaaaatataactataaaaaaatatgatattaatattttaggggtaaaaggaggattgattagggaagatcgggagggattttcatgtatcgtacccttattgtcgaaaatggagaagaattaagtgttgagcacaacgtgcttcaggtcaaaaacagagcggaagcggttcccattccattggacgatatatattgcattgttctggataataaccggacagttataagtacctgggcaataaatgccatatgttcttgtggtgggcatatggtgatttgcaatgagaaacatatgccttcagtagttatttatccggaaatgattcattataaaccttatgctgtggtaaaagagcaggttcaaatgacggagggggtgaaaaatgctttatgggacaaaatagttagggcaaagctctgtaatcaggcctttgttctggagaaatcttgtggagaaaaagatataccgaatcggatccggcagcttgcggaagaagtgaaggaaggagatgaggggaatcgcgagggaataggagcaaaaatgtatttcagaagattattcggagaagaatttatcaggatgaatgatgatggaataaacagtgctatgaattatgggtatgccattttaagatcggcggtagtaaaaactttgtatctgtatggttattatccggcactgggaattcatcatatcggaatatacaatccatttaaccttggcgatgatctgatggagcctttccggcccgtaatagatatgtgggttgatttacatcatctggaactggaaagtgagttaagtaaggagcagaggcatcagcttgtgaatcttcttaatgtgaatctggaatataaccataagaagatgaagctcaggaatgtaataaatgcatacataaagagctttacttcggctatccaaagtgaggatatccgtaaattcaatccgccggagctcaatgatgtgattatggaggagatgagaggagggatatgtcacgatttatgagagtactggttttttttgatctgccaaccggatccaaacaggagaaaaagcaatacataaggtttagaaagtacctgttagataatggatatgaaatgcttcagtattcagtatactgtcgtattacagggaatcgggatgaagcggaaaaatatatagcccgcctgcagatgaatctgcccagggatgggcaggttcgatctctactgataacggaattacaatatgaacagatgaaaatccttctggggagtccgacagtttctgaggaaaaggtaaagaacagggaacttcttgtcttatgatgaataaaggaatatactgaatttaaggttttagctcattgttggatataggtaagctgatactggtagcgattgcatcgtgtgcgttatcgtgttttagctcattgttggatataggtaagctgatacgacgcccatccaccacttgtcttgtgggaaggttttagctcattgttggatataggtaagctgataccggcaaactgataggtcataccgcctacagttttagctcattgttggatataggtaagctgataccctgtcatttcccttacgccctgtccaccgttttagctcattgttggatataggtaagctgatactgcagatgcagaaaaggaagcagcatttgtgttttagctcattgttggatataggtaagctgatactacaatcgtcaatagcccggtgatgagatcgttttagctcattgttggatataggtaagctgatactcgggatactgttagctgtcacgccaaaccgttttagctcattgttggatataggtaagctgatactgtagaagccttgcaagtctgcacgtactagttttagctcattgttggatataggtaagctgatacgaatggtaatgtctttgtctactacaattcgttttagctcattgttggatataggtaagctgatacatactggtcggaatgcttgcgaaactgttagttttagctcattgttggatataggtaagctgatacgtggagaatatgggttgaacgcgggtttcagttttagctcattgttggatataggtaagctgatacaatggctcatgagtgcagaatatatcatgtgttttagctcattgttggatataggtaagctgataccttcgttaccatgtaatgcaccagcataggttttagctcattgttggatataggtaagctgataccgcatgttataaactcaaacctttttaggcgttttagctcattgttggatataggtaagctgatacaaggtagtaaattttgttcatcttgcggggttttagctcattgttggatataggtaagctgatacatcactactccatgattcatgattcctatggttttagctcattgttggatataggtaagctgatacagaaagttgacagagaaaagttgaaggtagttttagctcattgttggatataggtaagctgatacaaatcgaactggaagcaacaatcaagaagggttttagctcattgttggatataggtaagctgatacccagcggaggatgggcttctaacgtgcctgggttttagctcattgttggatataggtaagctgatactgaagatgaactcactatgtacgattttgggttttagctcattgttggatataggtaagctgataccagcgtgaacatgatatctggctctggaatgttttagctcattgttggatataggtaagctgatacatggcaggcggtggtaaaccacatgaaaacgttttagctcattgttggatataggtaagctgatactgatatactttagacagctcaagaaaagcggttttagctcattgttggatataggtaagctgatacgctgaatcctccttttgcctggcgaactgttttagctcattgttggatataggtaagctgatacgctgtgctgcgataagccatccgcctatacgttttagctcattgttggatataggtaagctgatactaattaaatcttttacagataacttgctcagttttagctcattgttggatataggtaagctgatacagagtgtatcggtggtagcgtttacaatacgttttagctcattgttggatataggtaagctgatacaatactcatggtgttcttacaggcaccaccgttttagctcattgttggatataggtaagctgataccggtgaatttggtctttatacgaagtatgggttttagctcattgttggatataggtaagctgatactatttaattaaatagttagcaacatcatctgttttagctcattgttggatataggtaagctgatactcggcttagagccgtctgctgcagtaaactgttttagctcattgttggatataggtaagctgatacttttgtcggtgataaaatatgcgtctgttggttttagctcattgttggatataggtaagctgataccgccttccctgtccagaatgttataaacacgttttagctcattgttggatataggtaagctgatacaagagtcaagtctaaaccaatcatcgttgggttttagctcattgttggatataggtaagctgatactgttttcacattgtcaagaccatgctagcgttttagctcattgttggatataggtaagctgataccttcagatacggcaacacttacctgctgacgttttagctcattgttggatataggtaagctgatacgtgacacggtaccagcttcccatataccatgttttagttcattgttgggtataggtaagctgataccatatgggaggtttggactggtcaacacatgttttagttcgttgttgtatataagtaagtggataccagttatttgcttattatgcattggtttttgttttactttatcgtgggataattgaaactaattaaatttcatgagttaatcacatggaaaggggaccaataagggaatcttttggtatgttctcccacatatgtggggggtgattcttcttatcatactttctctctatggtataatgtagacagtcaaggggctttagtcccttactgcctgccctttatttagcgtttatgtttgtcagacttgcgctttatgaagggctttcgttgttccagccagttgtctagaacaacctctgccagtggaactatcacagctataagtggcccacgtatatgctgatgattattaacagcttttatgtattaggtatatctttatggtaagatattaaaggaataagagttgggaaagtttcctcaacttctcttctctttatctacgcttcagcttctcatatttttcaatgattgttagtattcccaaaattattccaataatcagagaaatgagctggagcgcatttattttatccacgcaaatgcagggaaatcctggtactgaatacaacgcattattgcacttttaactttgttaattctctgctacaatatataaaaaggtggttaaatcgcccctctgcccgttttggtggggggccaacgatttagccatctttatttttatgtgtgtggggttatcgaattgatgattaaatgttttttctggatatctggaaggcttctataaggaagcgtgatatactggaaacagggaattatgtcaatgcgacaaatataattagcggtttattatgaaaaaatctgacaagggaatgaaatatttcatcctggatgattcagctgagttttgtgatagattgcgatggaaacaatcatataggcagttgtaaggatattggccgtggtggatgtttatatgcttcgggggctggtttgacaaccgaatcttatatgataattgttttttagccagaggggataaatgcaatctctcaggaaaggtggtaaggtcatggataagaataatcaggcggttcagatggctctggataagatgcatggtaaggtgcgaccttttggttatttattctatggggatgagcagaagggacttacctgccggtctgttccgcagtttgccgggattcatacattggaagaactgtttgctgttctggaacaatgctggagccaggagacggcgtatccttcctgtcaggaggaatgggttccggaggatccgtcttttggccagtgtgcgattaccgctatgctggtgcatgatatgtttggcggcactattcataagatccgtggagatggtggaggaacacactattttaaccggctgaacggaaagtatgtggatttaacgagggaacagtttgatctctataatttgccggtggcctatgaaccaaaccaggagatacccagagagttctgtggccggaataaaaatacgttgatgcgttatcatcggttgcagtggaatatcatgctgtatctggggacggctattttacaaaatgaaatattgagggggaaagtctgtatcttttgatgagtctggcagataggcttatctttatctttcagtctttctgtccccagaataggatatttcctaaaagtttaattttactgattttgcaataaagtgtggtataaaaggttggttattttaccatattgctattaattcgcctacaccgtataataagaagtgaattacaaacgtgaatttatttttacgtatatactattataggcttatatgattatattgtgtatttcttatgaatacagaaggggtttaacatggcattaacagataccaaagaaatgttcagaaaagcatatgaaggtcattatgcgattggggcatttaatgtaaataacatggaaatcattcaggggattatggaagcagctcatgaagaacagtctgtggttattcttcaggcttccgaaggtgccagaaagtatgcaggttctccatacattgttgatctggtaaagacagcggtacgtcagtatcctgaaattccggtagcccttcatctggatcatggttccagctttgaagtgtgcaaggactgcattgatggtggatttacttctgtcatgtttgatggctccaagcacccatttgaagaaaatgtgcgcattactaaacaggttgttgaatatgcacatgcccatggggtagtggtagaagcggaactgggacgtcttgccggtgtagaagatatggtcagcgtagatgccaaggatgctatttttacggatccagaagaagcggctgaatttgtagctcttaccggttgcgattccctggctatcgctattggtaccagccatggtgcatataagtacagcggggaaccttatctggattatgaacgtctggaaaaggtaggtaagctgcttccggattatccaatcgttctccatggtgcatccaccgttattccggaatatgtagctaagtgcaatgaatttggtggcaaggtactgggagctaagggggttccggaagatatgctccgcaaggcagcaaccatggccgtatgcaagattaatatcgatacagatatccgcctggccatgactgcagctatcagagaaagtctggttaagcatccggaaaattttgacccgcgttcttacctcaaagctggacgtcaggcagtaaaggatatggtaagccataagattcaggcagtagtcggttcttctcactccatttaatggggaaggggaaaatctcagccatggcaatataaaacggtagaagcaaaatgtgcttctaccgtttttcgatgggagacagggagttggccattcagacttcctcaaagtacagaatatgtggattatccctgagctggcttttaaactcaattttctggccgcgcctgggaagtcgcatgctgactacggctacgatgagctgctgaccggattggtccttattgaagtcaaaatcatataattttatgtggagtttttttaatgtctttaaggaactgacggacatcctcattgcttttaaattcaatatacagattcaggctgcgggaatttcttctgaatttcttatccagtggcccgagaacacgatagacaaagagaataaggatgaatgcaggaattacgcattcaatgaatccgaaaccgacttccagtcccacgcctgcactggcccagagcccggcagcggtagtaagtcctactacacggcttctcatggtgacgataattgtgccaacacccaggaaaccaatgccgctgattacctgggcgcccatacgggtgatatcgatattggagcctgggaactgataaaaggcgaattcattgacaatcatggccagcgcggcgcccatacagaccagggcatgggtcttaatccctgcctccttattttttgcttccctgtcaaggcctatgattgcgcctgccagcgtggcaataatgagacgagtgataacggaggggatgctccataaatgaaaaaacgttatgattgctgtcatgtgcatacctcctgttctatgaactgtcatgatgtattgtaaaaaccttataaaatatataatgatatggtagcaaaacggcgaaggggatgcaatggatgaaagtttgctcctggagaggattcttagtgtataatgagtgaggttgtatataggatggccaggttatgcaaattttattgcatggtttggaaaaataccgaatcgcatgacctcttatatggtaaaataaagaatgtcacattgtgcatatgcacaggaaatgagttagaaaaatttcggacacctggtctgaaatataaggtatattaggagaaggcaaagggaatgaagtcattttccagatcggcaaatcatataggcattgatatgggttcttcacagactcgtattttttcagagaatcgattgcttttggatgaacgaaccgttgttgcagtggacagcaagacaaatgagatggttgggttcggtacagatgcgattatccgttatcatagcaatccacagcggatacggctggaatggccaatcagaaatggagctatggtagattattattacaccaaggggattctgacctattttctgaaaaaggtattgaagcaggcattggcacgtccggaaatcgttctgtccatttccagcggacttagttcggtagccagacatgcgctgattgatgcggttatgcatgccggggcacagaaggcattcctgcttcctgtggcggctgcggctgcgttgggacagggaatccgcctggataccccggatgtggttctgtccatgaatatcgggcaggatgtgactgactgcggtatgttttcctgcggcggtgtgattgcacaggaacaggtggtttttggcggacgtacgattaacgaaggaattcaggcctacatgcgggagagcctgcagattatcatcggaatggatgaggctgaatccatcaaacaggacatggtctctgtcgtggaaaacggactggatatgacatttgcagtacatggccggcgtgtagtggatggggtctctgtggttatgcagatgacttcctcccgcatgtatccgataattcagatgtatctggaaccggtggccgaactggcagaacgcattattcgtcaggcatctccggatatggcggaagacctgcttaagcatggattgctgttaaccgggggtacggccagactctccggactggataaatggcttgccaaccgtctgggtattccggtaagagtaccggaacatgcggaaatttccgcagttatgggatgtagtcgtacactggatgaatataagaagattccggaccttattgagagtggcgagaaatattacgggaggaattagccttgttcttttttggaaaacgtaaaattattactgccgtttgcttttttgtatttatggctgtatgtggctggttctggagaaacagagagactgtaagttttgtttctcagccattgtctacagcagaggctccttttcagtatggaaccagtcagatatccttactggcccggtacggcggggcaacgattgggcagattatcgatcattggaaagaagtggatacccttcgtcatgaaaatgccaatcttaaggctgaacaggcagcgtacagtgaaattctggcagaaaatatccgtttgaagggaatgcttaattttaaacagacctatacgcagtatagtatgttgggagctaaggttattgccaaagattataacagctggaccaacaccattacgatcgacagaggatccagtgatggggtaaataaatatatgcctgtcattgtgccacagggggtagttggttttgtaagctcagtcagcaagtacacatctcaggtacagcttctggtggatccgcgtacggccattggggggattgtacagagaccggaatcccgtgtagcctccattctcaagggcgatgggaacaattccgatttccttgtgttcggaaacattcctaaggaagcggacgttattaagggagacaccattgtaacctccggatatggcggagtatatcctaagggattgcttattgggacggtaagccaggtctctgctgatggttctggggtatctctggcagctttggtcaagccggcagttgattttacaaaggttgaagaagtatttattattaccaattctgttcaaaaggtaagtccaggcgatatcaataaccagattccaatcaaggaaccggctatgaatccgaatgaacagcaggcatcggatggagatacaccggttgtaccggctaaaggggaatagacatgagcagttttagtatgatagttacaggttttctgctgtttctgattcagtggtctgtatttccttttctgttcagcgcgcagtggcaaccagatttatggcttactgtcatggtcatgagcacacttatttatgacaagaagaccgtttttatctgggcggtggcaggaggaattattcaggatcttacatcaggaagttctgtgggattccatctgtttgtctaccttgtaatagcgtcactgttttactggggaggcagaaggcgttttaacaggcattggtatgtttcctgcattgctgtgatggcagggacgcttcttggtcagataatttttgctatcgtggcagcgatttctggcgaa

SEQ ID NO: 870 - DNA, 6668 bp, synthetic construct
  misc_feature 1..6668: note = Synthetic
  source 1..6668: mol_type = other DNA
ggtgcttggggagtggatagattcacaagggcggtgtgccgcctgtttagaggatgggattctcgtatcgcagccttcccttctaggggaaggtgccccgaagaggtggatagggcagacatggcatgaaagacagctggcagtataggggaacgagaggcgcatttgtgctgcttgcgaaagcacctgagcgccgcctttttttattgggcgatgccagaaagtggtattcaagtcacgggttaccagtcataacaacgatatgagtagcccccttagagaaagggcgcgccaaaggcgcaggatggatccacgcagcggtgtgaaagactatgtgagactatccgtttcccttaaacgtcatcccgaccgaagtggagggatctttcttgcagaccggtaaaacgtgggtgagggaaaggcgaaaaaggaagcaccaaggtgtcgtttgagtgagggtgcatgtgtgcatatggcggcagtgcaataaagatccctcggctgcgctcgggatgacggtgcttggggagcggatagggggactatggtatgaaagacagttgggataaggtttcccagtcactcctaggataagaaggtgcgtaaaatgcaagagaggtccttgcgaaaaatgagcgattgggctctcttagggcgttttttgtcataacagctgtgctatactaaagaaaagcagtttgccagtgtgaaagagagaggatccatagaggggtctgtcagatattttttaaaatggtataatgaaattataaattgttatctaaaacaacaaaaaaggctgtataaagaagatcttcatacagcctttcaggagcagattgcttgtcggttactgctataccccacggcatagtgccttatcttagaacatgttggatataggtaaactgatacattcagcttggtttcaatgttggacataggtaagctgacaccaaccatctaaggttgatttcattatagcaatgaatcttataaaacgcaagtttttaacaataccccaataggaggaactatggaaaagagacagtatcgttttgcttttgatatcggcatcggatcttgtggatgggccgtggtttctgaaaatgagacgggaaataggagaatcgaggatgcgggttcccgaatttttgattctggtgaaatgaaagaaggcaaagataggaaaagtcaggaacgcagaggttttcgcggcgtaaggcgagtgctacgccgtcgatcgcatagaaaatatcggttgaaaaactatttgcgatatgttcattttatgaccgatatggaaattcgatgtgcttcggaagcgtcgatgaatcaaatccttccagtaaaagtcaggggaatcgatgaaaaactgacgaaagcagaattacttcaagtgctcattcatgcttgcaatcatcgcggctataaggatttttatgaagtgacggagaccgaaagccaggaagaagaggatgaaaagatcaatcaggcggcagctgatcggctggatcgttcgttcgaggaaagccattgtcgcaccatttcagaatacatctgccggtactgcaccatccccgggacagaccggatcgattatcgcaatcgattctacaaaaatgagaaccgcatgatcattcgaaggaaacatgtggaaaacgaggtctgcacgatcttgaagaagcagagggaatggtatcctgaactgaccgaccagaagatcgagaaaatcatggaggtaatcttctcgcagagagattttgaagatgggccggggtatgcttcggacaaggccgagtatcgcagatatacgggatttttagaaagtattgggtattgccgcttttatccggaggagcggagaggcttcagaaacactgcattgggcgatgtgtatgccgccatcaatgcgctgtcgcagtatcgctatgtgcatacagataccggagaggcgaagctgacccaagaagcggcagcgaagatggtttcttacattatgaagcagggcagtttgacgcgcacgcaggcggccaagctcttaaagcctttggggatagcgatctatggaagcaaggatgtcgacaagacattggcgaagtcattccgcttcctgaaagaaatgaagaaaatagcagaaaaatgtcaggtgtcatgggagtcacttttgtcagagacagatctgaccgagtatgaagaaggcaagacgtcgctgctgaaccagctcgggacggtatgctcgatgtaccagacaccgcataaaaaggaagaggagctgaagaagctccatgccaaatgggaacacgtacatctcccgcctgctttttggaatgcgctgaaaagacataggtttagcgggacttccagcgtttcttatcatcatatggcagatgccatcgaagcgtttttgaaaggagatatttacggcaatttccagtggaacaagcagaaacagctggacgaaaagcaagaatcacagagagaaagactactttccgccaaagtactgatgcaagatgaggatgtgaaagataaccctgtcgttcttcgctcgatcaatgagacgagaaaggtgctgaattgtctgatccggctctatggctctcctgctgaaatccatgtggaagtggctgatgatgtggcccgcagctatctggaacgaaaacgcattcagaagatgcagcgggatcatgaaaaaacaagagatgcaatcaaaaagaagatcgcagagatcttgcattgcgaagaatcggaagtcaaagggagccagatcgaacgatacaagctgtacatggagcaggaagggaagtgcttgtacagcgggcgtgagctggatctcgaaatggtgctggacacgcagagccatgcgtatgaagtggatcacatcattccctattctttgatcctggataatacgcttgcgaataaagccctcgtctgcggaaacgaaaatcaggcgaaaggacagcagacaccgctcatgtatctgaaaggagaaaagaaagaggcgtttatcgaacgtgtcaaagcagaaaagaaaagaacaagtcaccctatcagcaacaaaaaatatgattacctgatgcttgcgacattgtacggaaaggaagcaaaggaaatccttacggggtggaagtccagaaacatcaatgacacccgctatatcacaaagtatgtagtgggactcatcaagaaccatctgcagtttgccgaggaaaaggctagagtatttggtatccgaggacacattaccagccgtttcagaaaagaatggctggggaagaatacatggggctcggatgagaagtgccgtgccaattacctgaaccatgccgccgatgccatcgtgctggcaaatctgtccaagatggacgtggaaatcgcaatggactataaaaaactgcggcagatccggcgccattatggagaaatgagcatccagtatgaccattttttgaatcatgctgcgcaacgcatcgcagccttttacccgatcacagaagaagcgatcagaaagcagctggtagaaagccaacgcacaccgtcttacgtgccgaatctgggaagagaagttgacttgcgtctgggaaatccggaaggagaaacacggagcaaagaagagtatagagcaaagacggagatgtactatgaaggcgctgcgtttgtggtgacacctcatctcccttatgtatccatgaaagtggaaaagaaattccgtggggaaatcgctgactcgaatccgatccggctcgtggaagaaaatggaatccagtataaagtaagtcgttcgaaagtggaagagctgaaacgagagcagctgtccaagctgtatacgtcagatgggtatctgatcgaagcactggaaaaagcatttgagaataaggacgtaaaaaccgtcaaagactacatggaaaaagagcatctggatgtattccggacgacaaacgggcagcccgtgcggaaagtatcgatcaaggggatgccggtatccaattactacaagaagagtatcaatgagacgaattacagcatactcggagtgccgaagtattactgcgtcgaagtgtatacaaccagcaaaggacagaccaaaatatgggggctgcgatttgtcgatatgatctcttatgagggaaagctctatctgaaggatggtgtacgtccggcggactatgcaaggcatgtgatgtacctgttcccaggtgaatatatcgaagtagaaaagaaagggaagatcgtttatgaagggacttatcaaaatgtatacaacatcaatcaaggagtattgcgtataaaggtcaagaataccaatgccttaaaaccgatcagtattggggataaagccggagtcttcaaatatgccatcagcttaaatgggtgcaagtccggagtggtcaaggaaggggaggcgggatacccatgtttcgcacactgcttattgaagaaggagaacgactgagcgttgcgcatcaggtgctgcagatcgagaaacaggggcgaaggatccctgtccccatcgatgacatctactgcattgttttagataatctaaaggctgtggtcacgacggcagccatcaatgcgttatgtacggcaggggctcatatcgtgatctgcaacgaaaagcacttgccgtccgctgtgatctatccggagctgatccattatgcgccgtatcgcgtggtgacaaaacagatggggatgacgcaagggcggaaggatgccctctgggatatcatcgtgaaagggaagctcatcaatcaggcagaaacactccgcctttgtataggagatatggatgcgtatcatcgcctgctggaattggctgatgaagtggaagaaggggatgcggggaatcgagagggcatcggcgccaagctctatttccggcacttcttcggggatggcttcgtgcgaatggaagatgacgggatcaatcatgcgatgaactacgggtataccatcctgcggacagccatgatcaagacgctgtacaccttcgggtactatccgctcatcgggattcaccatattggctatggcaatgctttcaatctgggcgatgatctgatggagcccttccgtcctgtggtggatatgtgggtcgacctgcatcatgaagagcttttaggcgatctcactagccagcagcggagaagtctggtgaatctgctgaatcaggagatggactatgatgggtgccggatgaaaatcagaaatgtgatggctcgctatgtgaagcagtatacctcggcgatcgaaaaagaatcggtggagctgcttcggataccggtcattaccgcgacattttttgaggcgatgaaagcagaatgtcacgaatcatgagagtcatcatcttttttgatctgcctacgggtacgcccagcgagcggaaggcgtatatgcagtttcgtaaatatctgctcaatgccggttatgatatgctccagtattccgtctatgtccgtatcgccggcagccgagatgatgcccagcatatgttgggcatcgtgaaacggcatctgcccggcaagggacaggtacgcgctctcctggtgacggaaaagcagtatgctgcgatgcagatccttctcggaaagccgaccatcgcagagaaagagaccggttgtcaggaaatgctggtcttatagagaaaaatgaggtagaatgagtttaaggttttagctcaatgttggatataggtaaactgatactctgccgttgcaacgggatgagagacgtcagttttagctcaatgttggatataggtaaactgatacgtaacattaccaatggtatggaagccgtaagttttagctcaatgttggatataggtaaactgatacaatatgcagcatcaatgtcgaactgcccaagttttagctcaatgttggatataggtaaactgatactggaatctgagtgcgcacatcagagtttcagttttagttcaatgttggatataggtaaattgatacgaaaataccctatagggtactggctagattctggtggcgacgcatagaatttgcggtcaaaaagaacatggaagagtccttcttctgctggttggtggtgcttgcgccattgatctggagaagaaggactctttttgtgtggctcacaagaatgtaatacagcgtgtgatacaataaagaaaatgagataaggaggagatgcgatggatttagctaaggtgaagagggcatttcagagaaatcgctatcagtgcagggtctttgagacgaaggaagaggcggcggtgtatctggatcgggagatcgatgggatgaccgtgggattcggtgactcgctgacgcttcagacaatggggatgtatgagaagctgtcaacgcataatacagtgtgggatgtgcatcagatcgatcgggagaagaatggatttgcgaaaagcaatgcagcttttttggatatggcacggaaggcgatgacagcggatgtatttcttctttctgtgaatggtgcgacggagacgggggtcatggtgaatctggatgggacgggcaatcgcgtctctggttcgctctttgggcatcgtaaggtgtactttgtcttcggagtgaataagatcgcaccgacgctggaggaggcgatttctcgggcgcggaatgtggcggcaccgaagaatgtggcgcggcatcattacc

SEQ ID NO: 871 - DNA, 23312 bp, synthetic construct
  source 1..23312: mol_type = other DNA
  misc_feature 1..23312: note = Synthetic
tggtcgaacacatcgccgacgcgatatctctgatcaatccctatggtatcgtacttttcaccagccgttccacgcaccgtgtcacgggctataacatcagcgaatttgtcagtcagaatttttttgacttcattcatccgcaggatcgcgccgaggcgttagagtattttcagcaagtccaggccaaagaaggcatggcgccttataccgaaatgcgcattcgccacaaagacggaaactacatttggatcgaagggcttgcaaaaaacatgctgcacgaccccaatgtcaatgcgatcgtttttaattaccgtgatatcaccgaatggctgcgttccgaagcggcgttgcgcgaaaaagacgaattattccgcgccttgatcgaaaataattccgatgcgatcacgctgatcgacgctgaaggacaaatcaagttcagcgtgcactccgttttaggatacgacgatgccgaagcggtcgggcaaaatatttttgattccatccatcccgaagatcaagaccacatcgccgaagtatttgaacaattgatcgaggcacccggcacttcgctaatcgccgaataccgtgccatgcacaaagatggttcctggcgatggaatgaatgtaccgcaaaaaatcttttgaaagaaccgcacgtacgtgcgatcgtcatgaacgcccgcgatgtgaccgatcgtaaactgacggaacgcgcactctccgaagagaaagaacgacttttggtaacgttgcaagcgctcggtgacggcgtgatcaccacgaacacggaagggcgtattatgctaatgaatcccagcgcggaacgtattttgggaacttcactttcgaccacacgcggtcaaacggtcaaatccgtttttcctcttctatctgaaaccgcagataacaaagcagtgcatccggtggatgtcgttttgaacgagcagcaagccttcgtctcgtccgaatttacctataaagttgccggcgatcagtcaccgcgttctattttagccggcgcttcaccgatccgcgatatgagcggtgcgatgcagggtgtcgtgatggttttttccgatatcaccgaccgcatcaaaatggaacaggaactgttgaagtcccgcaaaatcgaatcaatcggcgtgctggccggcggtattgcgcacgatttcaataatattctttcggccattatgggaaatatttctttggctaaagttaagatcgcggccgcacaaaaagataaggctcaggaacttttgagccgcgccgaacgtgcatccgagcgcgcgaaagaactgacgcaacaacttctcacattttccaaaggcggcgcgccggtcaaaaaaaccgccaatatcgccgatctgttacgggaatccgcgcaattttcgtcggccggttccaatgtccgttgcgaatttttcattcaggataatctgtatccttccgatgtggatgccggtcagatcagccaagtgctcaataacttgatcatcaatgcgcgtcaagccatgcccaatggcggcattatccgtattcttgcacaaaaccatgccatccagtctcaccatgaaggtatgcaactcaagcccggctcttacctcaaaatcgctatcgaagacaacggctgcggaatttccgaagaacatttgcaacgcatatttgatccctattttaccaccaaacaaaccggcaacggtttgggtcttgcgacgtcgtactcgatcatcaaaaatcacgacggtgcgatcacggtggactccaaagtcaacgtgggtacgacgtttacgctatatctcccggcatccaagtttgccgttcagcagccacgcccgcaggagccgcaggcgcttttatccaatggccgcattttggtcatggacgacgaagagtctattcgtgaaatggcttccaatatgctcaaccacttgggatttgatgcggtctccgccaaatcgggcgaagaagccgtcgcgttgtatgaagatgcacgcgcacgcaataagacttttgacgcggttattatggatctcacaattccaggagggttaggtggtaaagatgcgatggcgcggattttgtccatcgatccggctgtctgtggcattgtttccagcggctattccaatgatcctgtcatggctgatcatacacgctacggtttccaaggcattctgcccaaaccctatttcatcaacgatctatcccgcgtgctcaatcaacttctcaaaccgaaggcctgaaattaaagaccgggtaaaacggctaaagcgaatttaagatgcgttcactattttctgaccgacatctacgtagtcacttcaaatcaatttcaaaatcattgcgaaatcctgcggcatcccaaataatgcttctcatagtacgactcatccagcgatgaaatcgttacgccgaccgtcgtactagcgtgagcgatttggttatttccgacatagatacctacatgcgaagcgccgacggcacctttataggtattttgaaaaaaaaccaagtcgccaaatcgtaattcattgcgtgtgatcggtgttcctttggcatacatgtccgcagcttgccgcggcaattcgatctgacgaacttttctgaaaaccgcgccgacaaatcctgaacaatccgtaccctctgattttttttccataccaaaacgataaggcgtacctatccaagttttgatctctgccatcatcgcttcttcgatgtttgccggttccttctttgcaccggtcgcggatgagtcacttaccgatgcggtcggcatatgcgtttcagacgctttcaccgacgtcttttgcccatcggctttcacggcacgatagatcggttgaggcgtgcaaccgacaaacaccagcataacaatcaaaatgcgtgtcattttttttccggcgcatgcgccgctgttacttttttgatcatcgtgtccttattcggcgattcttcctcacgcgcttccttccatatttttttaccccacagacgcaataacgccggcaggataatcagggacgaagcggaacagataataataccaaacgaacacatataacccaggctggccaacccgcggttgtccacgaaaatcaatgaaccaaaaccgatcactgtagtcgccgcactcagaaaaagtgattggccggtttcgtgaatggccgcatacacatcgtggctgtgatcttcaagataccgcgaaataatataaataccgtagtccacgccgctcccgatcaaaagcgggagcgtgatcatattgacaaaattgatcttgatgcccatgagccgcatcacacccatgatcgtgagcaatgaaaatgtaagtggaaccatgcatacgagtaccgcgcgaaatttgcgataatgcacaatcactaaaagcaatatcgcggtcaaagaaacaatcacggcaatttgaaaatccttttttacgagggtgagaaattcagccgtcacaacgcggatacccgtaatgataacgttttcattacgaatctgttcgtcgcgattaaactcatccacaaattgattgacgatatcgatttcatacgactgacctgtaaaatcaacttgggtgaccactttttttacgccgttacgttccacgtaaaaatgtttcatgatttcattaaagccttcgtcttcgaagttgcgtatcgtgataggctcacgcacctgcaacatatcgcgcaaacggtcgagacggaaataattcatccgaagtccgtttttattcatctccaaccggattttaaagagaatactctcgacgtccagattgcgaatggcctcaaggttatgcttctgctgctcgatggagggaatataacgcagcatggagttgtattctttgatcatgcctttggccgtcaattcgtccaatttggcattgagcttatgcaaacgggcgatcaacgcatcatccgaagtcgccgaaacgacaacgctgatcggcttaaagtgcgagccgaatttttgttccaagcgccggatcatctgaagatcaacatcgtttttactgcggatattttcgatgttatcgtcaaatgtgacgccaaggccttcatctttactgggtacgactccggttaaaacgccgatcataaatatcgttatgatcagtgcgcctgtagcgatgtatttcggatgttggagaacaaaccgtgaattgaatccaagcaatttgctgaacgcgccttgaaggtaattcacacgcggatttttacgtttacgaagcttgatctctgccggcatgacaatcacaaccgcaacaaaaagtatcaggatgcctaccccgccgagaaaacccagttcatacaatccgcggaattcagtaaccatgagtacgataaaaacaaatgccgtactgacagcaccgtaaaaaacactggtaccggtttcgcgaaacgtgatatccagatttttttcaaccgtattatggcgttcatgcgtttcctgttcgacaaagcgattatagatatgtatcgcataatctaccccaagccccaataacatcgcaccggctgccgccgtgatgatattgactttttcaaacatcagatcggcaaaacaaaatacccacgtcacaccggcaagtatcggtatcatgataaacgccagcgaacgaaaattaccaaagaaaaaaaagaagagtacaagaattaataatatcacaataaacgaactgctgatcagaccttgtttgacggcattggcgttggcgagggacgaaacatagttaccgcccaaagtcacggagagttttttaccgttatcacccatcgctacgataagcgaatcggtaatttcgcggctgcgtcctacgatcgtttcgcaaaatttcgtgtcattcgctacgccgtccggtttgacgaacatgagcagcgtacgtttgtctttggacatgtagtagctctctttttctcgaattaacgaggcattttgagggcccaacattttttcgatatacggcacgaacagttcggacaaaagcagcggatcttcgcgtaaaacacgcttcagcaaaggatccggcggaatcggcgcattgagtatatttttagcgttgagaatggctttttcgatattggcatcatctaagcgtcgcacgaccgaatccaaatcctgcggtgaaagatagagcaacgcattgcgaataaaaaaatcttcgacaaacgatttttgatcgtccgtgatccggtaattgacttgtttgaccaatcccgatgccataaaggccgcatccaaccgctcggcgtaatctttgatgatttccggctcggcgggcaatgaatcgttggtttcgataagcaggatatgtgtttcctgcgcaccaaaatcttcgttgacttcccaaaattctttgatgagtttggaattttgcggcaacagatcaaaattattagtgcttattttgatctgcatcatgtaatatgtagagacaacagttataagcccgacggctataagaacggacgtagagtgacgataacaaaaacctgcaatggccgacaaaatacgcttcatacaatactcctaaatagtggcgcaaaatagaatatttaggttatttgtgcaatttaattcacctctttatttgtcatcataacatggactgtttaccgctttcgcattgaattaaagttcgcgaacatctacttttttgtatgaccacacaatatatattacaacccatgcgatgggttataggaatcagtcttttgggaatggtattacccgttatggcacagcatggccattccttaaaagtttccgagacggatgatctctccgcggccgatgtgtctttttaccttcaaagagcctctgaacttttagagcagcgtgaatatgcatcggcattacgccattttgtttttgccggggaaatcgagccttcattgtatcgtcaatttgtttttcagtacaaattggccaaaacgtatcgcggtcttcgccagatggaaaaggccatccaatatttttcacataccgcgaccgactcggcgtttggcgactttgcgctcttatctctcggtgaattatatttggctgtagatagtacgaatcaagccgggtcggttgcacgccagttgttgcgccgtttccccaagtccgctcttattccgcatgggtattatctcctgctgaagagtactgatattcaaaaagatgacggggcatggaaaccgacgatggcggatctgcggcgcattctgtcggattatccgaaattgcaaatgcagtgggaacccgatctcctgcaaagagaagcacgtttttttatacgcaatcgtgaaaacgaacaggcgcaggcgattttacgtcgtttacaaaacgaatacccttactcacaagaggcatacgaggcttggccgcaattatttagtttttatccatccaaaaacaatcctccccctgtagatgacttgatcaatgcattgcaggtgcgcatgatgcaaggtcatcataccgaagcgctcaatatgatcgccgctttaaggacatggtatatagatgatttcgctcataaagaaatagattttatgacggcgcgcatttatttcgctcaaggaaagtacgacttggcgttgccgcgttttgccaatctatggtcggatcatgcgtctgcggaagcgctttttcagatgggtcgcgcagcacgttatgcggatgaaatcgaacgatccattcacgcgtacggccaatacttgcagcacggaaaactcaacgatgcatggtcgtcgtatattcgttttgaaatggccaacaaccgtgcgatacacttcgattccgccgcgatcggtgaagtcaacgacggataccgttccgtatatcaaaacgcctcccaacgttcgcactatgccgtcgcatcgcgctttcgcgaagggctcaattggtatgtcgccgggacgtatgacagcgcgatcgtttattgggaaaaatatatgcgcagtacgccgtctcaaaaaacacgcgcacaatactggatcgcccgcgcgtacgccaaaaaaaatgacatacaaaaagcgaaagcgttgtacgaaagtattacgcacaccaaaggggatgaatactataccacattagcacacatgcgtttgacttcgcatgacctgcgcgctttttattttaccgatacgaccgatagcggcaacaagaccaaaaaattattccaccccgtaagcatccccgatatcggtaatgatccgagattggaccgcgtagcgatggctattagaatcggtgaagtggcgtggggggaacaggaagccgagccgctggtgaatgactacatcacccgccgcgatcggggtgaaaaatttcgtgattatttggaaagcctgcacgcatacgatctggccgtggatgtcaatgttgctctgaaaaagaaataccgcagctattataaaatatacaatgacgacgtgcgcatgttttatccgctgtactatcgtccgttggttaggcatcatgcgacagcctatcgtctggacgaaactctgatctttgcattgatcaaatcagaaagcgctttccgcacgtacgcattgtcccccgctcgcgcgatcggtttgatgcaaatcatgccgtttacgggcaaagcgctggcggcagaaaccggtatgcccgactttcaaccttcgtctttgcatgaaccggacgtcagcattcacctcggatcccactatctccggcaacttgccgatatgtataaaaattatataccggctgtattgggcgcatacaacgcggggccgcatcgcgccacgttttggatgaaagcgtttaacaacgaggaacctgacatcatgccggaagtggtggagatttttgaaacggaaacgtatatcaaacgcattctcgtggatcgctataaatacgatctgaaactgcacgctaaataaaatccgaatacaccatgcgttggaatatgcggcaatcactgcaattgcgcacacggcactttttatgcagttcgatcagcccttgcgcatattcggcattgatccgatccggcatgcccggtaagcgtttcctcatccagccgatgatatgattgtgttcgtacgatgcccacgttttcatacacgtcatgacggtatcatgcagttgtttatcccctcggcgttgtgcgtacagcgtgacgtacggaacgatcgcattgacgatgatctcgtatgcgcgttgctttccgatcagatcggaatacgcgcggctcgtttggacattccaccaaatgtgttccccccaataaccgtaggcacggacttttagaatacgatgtaagtttttgagaattactggcggcgtgtcgcattgagaaaatagtcgtaccacagcagcactcaaaccgtctttgagatgagttacaagcaatcccgcaagagcggccatgcgcggaagagggtaatttttcgggcgaagccggtcgcgtatccaaacctcggcatgcaacggagtaatttggtactgcgaagataaggccaaccacaaatcccataatcgccctgcataaggccacaacttgggatcggctgacattgtcgcctcatccggaagcaaacccgccgcaccgatcagcagcgcttgcacacgcatcagcgcgaccgatgaatctacaccacttgccgaagcatacactacatcataaggcacacgttcggctaacatacaaaaaggaagcctgttctttgtaaagcccatcgcatcacacagagcatagtagagaagctgctcatccggccactgtttttctttttgtaagtttttgagttgctcggttttccggcgcagccgatgcgcaccattttcctgcacccattgcgttacaaattcaggttcgatggacgacacaaagtcactgcaaaaaagagtatcctgatccgcatccaatagcattaccttttccgtcagcgttttcaaagtatcgctcagttgatctttgatttccagcgtgtatggtgccccttggtgcagatctttatcgtgacggtacacgacatgtaagatcactcgaaaataagccggatcgcgttcatggccgtgtttgagccagtctgtggtttgccagtgaatttctacatcgccgcacaatatcgtatcaccgatgcgcaaagtcgcctgacgaaagtccggcccactgccgctgtgccatcgccctttgtctaaaatgcgaattttatgcccctccacggtcgtcagatcatccatacgcaaaaacaggtaattccatataccctgtatgatgtgttcggaaatgcgttcggcattttcacgcaactggatgtcgctataaatggactcgacgtaaaacataaaaaatctgttgcaaaaaatggaaaactggctatattcatgccacgttttttgaaacgataaaacgccgaagtggtggaattggtagacgcgctggactcaaaatccagttgggctcaaacccagtgagagttcgagtctctccttcggcaccccaaagccatgcataatactgttatgcatggcttttttatttctctcaattaaaaatctcgcatcgtatttattaaaaaatacaccacgatagtttgaattttatgtcaatttctgacaaaaaaaggccttagagttatatacgacgtagtatagaaacgacagccaataaaaaaaacccggttttaattatccaattttcttttagtgattaaataaatcccttattttcaattggtataaatcgcgcacgatttacttgcatagcccgatttcacgatatacattaataggtctctcagtaaaatatctccgagtgaagaaatctcttaatcgaaacggagaggaatcaattcgtcaataaaataaaaaaggctctactgctttcgcaggcagagcccaagacttttcatctgcggcatatagccttattgtgaaaagatttcaaaggtgtgatttgatcacaaactaagataatatcagattcgtcgtttgtcaatactctatggaggaaaaaatgggaaaaactcttgggttggatttaggcactaattccatcggatgggccttagttgataacgaacataagcaaatcataaaaaccggtgttcgtatctttccggagggcatcaatagggatactaagggttctgaagtgtcaaaaaatgaatcacgaagactagcccgccaagcgcgtcgaaataatttcagaacaaagatgcggaaatcaatacttaaaaaagcgttgattgctaatgaattgtgtccaaatggcgatacgttaaccgattggcatgcgctaaatccatacgaactcaggtcgcgagcgttaaaggaaaaattatcacttcacgaaataggcagaatcttatatcacctttcgcaacgccgaggcttcaaaagcagtcgaaaaacggccaatgataaaaatgaaggaagcatatttgacggagatgaaaaaatcggaaaaacgggtatcaatgaaacaagtgatttcatagcaaaacatggaacccttgggaattaccttgcctcattggttcctgacaagaaaccttacaatcaactgaaaaggatacgtaatcgttatacaacccgtgatatgtatattcacgaatttcagatcgtatgggaagctcaatcaaagtattatcccaccgccttaaataatgaacttcgtgatacgataggacatcctgaaaaggggattttgttcttccaacgcccactaagatcgcagaaatttcttatcggcaagtgtacgcttgaaaaaaagaaaccacgctgcccctccagtgcgcttccttttgaagaatttcgcgcatggcaatttattaattcgatacagcgctggaactctaacggtgaaatcatcaatttttcaacagaagagcgactcgctatcttagatgttatcaatacttccgaaaaagctttcgaattcaaaaaaatactcaacaaaattgataagaagaggttatatagatataactacgtacccgatcacaccgtaccggcaaaccccacacatgccgggctgatcaaggtctttggaaacaaattatggaatgccatgactgaagatgataaagaaactatttggcataacttatttattgccaaagaaaatgaatggcttaaaggagaaacaaattccaattctcacagatggtccgatcgagcaaaggtgcttggcttgtcagatgaacagcttgaaaagctttccaaaatacatcttaaagatgattatgccaaccttagtcgcaaagcgctcaacaatattttgcccttcctacgcatcggctttatttattcgacagctgttttgttcggcggcataaaaaacgcccttgggctattgtgggatgaattgagcgaagaatctaaaaataaagtaatagaagaaatcaacaatcttaaagagtccaataccgacgaaaggctaaacgagctaataataacttatttgatcaaaagattctcactctctccgacccaattaaaaaaactttatcatcacagtgatgatgaggttttgagaaagcctgaattagaagagttgccccagcctaaaaaccttcgcaatccactcgttcaacaagcattatatgagctacgtaatcttgttaatcacattattaagcaatatggaagaccctccgaaatccggattgaactagctcgtgatttgaaaaacccaaagaaaaaacgtgacgagatgcgttttgaaaacaaacaacgagaaagagaaaatactaggatcaagcttgagcttgaaaaactaggtgaactaccatctcgtgacaatattcaaaaatatgcgctatgggaagaatgcaaaaaacaatgcccttatacgggtaaagaaataagcgttaccgatctttttgggaacaagtttcagattgaacatattattccgtggagtgtttctttagatgactctatggccaataagaccttatgtgaggccaatgaaaatagaaataagggcgatctaacgccatatcagtattacgggaagaacctcgaaaaatgggatgaagttaagcgtagagcgtatgacttactcccaatgtataaatataaacgatttattcgtgaagaaatggccgctccggatgattttatagcccgccagcttaatgatacgcgttatatcagccgtgaagccaaacaataccttagtcatgtatgcaaaaacatattggttaccaaaggccccttgacggcagaattgcgacactactggggtatgaattctattttgaatccgtcagaaaataagaaaagccgcgatgatcacagacatcatgctgtagatgctatcgttatcgcgtgcagtaaaaattcacattttcaagaacttcgatcttggaataagtatcgaaaaagccatgaaaatcataattttcctgaaccatggaaaggttttcttgatgaggctaaacaaagtgtcgaaagcatacttgtttctcacaagaacagacatcgtttgttatctacaactaagaaaaaaatagttaaagatgggaaaaaatttaccggacaaggtgtgtccgctcggggtacgcttcacgaagaaaccgtatatgggaaaagaaaatctccattcggagacgaacatttttacacagttagaaaacctatcggaagtcttactcccgctatgatacgagacaagatcgttgaccctgaaatccgtaaactgatatgggaacgtctaatgaagtacgacataaatcctaacgataaaaaatttgaaatacccaaagacgcgtttgctaaaccgatatacttacgaaacaaaaatggcgaccctgtaccggtttttaaggtgagaattcgtgtcgaatcatcaaatatacttcagatgcgagaaggggttaatcaatgggttgatcccaaaacaaatttgatggttattttatatcgtgatcaacaaggaacattgtatgaagaagttttaaatttttttgaagcaacaaaaagaaaaatcaataagcaatcgcttattagtattcacgaaaacaagcagtactttgaatctattcaaaaaaacgaccttttcgtacttgggttagctaagtcacaattcagaacttatttttcaaggcctgacatcctaagcaaacatctttataaagtagaagctatttcatcaaagtattatgagtttaggcttcactgcgaatcaactcaaaaaaacaatgatttcccggaataccttataattagtagcttgggagcaggaaaaaaaggttggctaacttttaatccaataaaagtaaaaattgacccattaggaaacattgtcgaggatgcttaaacgaaccgtttacatcaccaatccttttcacatcagttgccgtctgaaacaactgatattgacacctaaagaggatggtaaagaaactaccatgcccgtcgaagatttgggttttgtgatattggatcatcctaatacgaccatcacattggccgctttgcaggaacttcaagccaataacacggcggtgattgtctgcgatgcaaagcatcttcctgccggattactattgccattagaaggacattatctgcatagtgaacgattagcgactcaaatacaagcttcagaaccgctcaaaaaacaactgtggcaatataccatcaaatacaaaatacgaaatcaagctaaacttttagaaagcttggggtatccgtttgaagcggtaaaacgtcatgcagacgaggtcaaaagcggcgatacttcaggagaggaagccaaagcgtcgcgtcattattggaaaaatttatttccgaatatggactttcggcgcgatcctgacggtgcatggcctaatgccgcgcttaactacggatatgctattttgcgtgctgcggtcgcccgtgctcttgtgggcaatggattgcttccggcacttgggatttttcatcacaatcggtacaatgcctatccattggcggatgatatgatggagccttatcgtccttttatagacagctgtattgttgaaattatcaacgacatgcgggatacaaccgaacttaatagagaaatcaaagcgcggttgatacataccctatcatcggatgtaaaaatgctgggcgagagaagtcccatgttagtggccatcgaaagaacggccacgtcgctctcaaaaagttatgaagaaaacatacgacagcttctctatcctgaaatgaattgaccgcttaatcattgacgagccgcactatgcagttcgaccgaattaatgcgtaccgagttatgtgggtttttgttttttttgatctccctaccgaaactaaacctgagcgcaaagcccatgcgcagtttcgtaaagaattgatgaaagacggctttacgatgatgcaattttcagtgtatgtgcgtcactgcgccagcgcagaaagcgcggaagcgcatattcgtcgcgtcaaagcttttatgcccaaaaaaggccatgtcagtattttgcgtattaccgataagcagtacggagatatactcaatatctggggcgccaaaaccgaaccacttgaatcaccgcctgcccagttggaatttttctaacaatttttcgccaaaagcacaaaataagccgacgtcttagtttcgcagtaattcaaaaaattaaaaaaagaaaaagatgccctttattgcaaaaagagcatcttttttcatttttaaacgatatttaagccctctaagtcgaacgattgtgtgagttacaatcacatcgaatatcgttcatacacctttgaaatcaaaccacaaccggcttgcccattgctcaacattacgctttaatatcgttcatacacctttgaaatcaaaccacaacgatttttttggcaatcgctgttttaggcttaatatcgttcatacacctttgaaatcaaaccacaacagagtgcgttatttgacggttgtttccctcaatatcgttcatacacctttgaaatcaaaccacaactgtttgattctttaagttgcgttatcgtagaatatcgttcatacacctttgaaatcaaaccacaaccttcagtttgcgattcaaatgtttccgatgaatatcgttcatacacctttgaaatcaaaccacaacagtactcatgccgtcgttccggttaaaccgaatatcgttcatacacctttgaaatcaaaccacaactaaagtccagtatctatcgtttccgccgtcaatatcgttcatacacctttgaaatcaaaccacaacaacgctgggctttaaaggtttatacgatgcaatatcgttcatacacctttgaaatcaaaccacaacgatagccattctaaatcgtttcacgtttctaatatcgttcatacacctttgaaatcaaaccacaacaaacggcaaggaaagtaatacaagaatataaatatcgttcatacacctttgaaatcaaaccacaacccgatcaggcttttgtattcggcgtctgccaatatcgttcatacacctttgaaatcaaaccacaacagaccactttccggctattttatcggttataatatcgttcatacacctttgaaatcaaaccacaacacaataccttcagcaatgctggcagcctttaatatcgttcatacacctttgaaatcaaaccacaacagacagtgtgcgtgagacaaccgtagaagaaatatcgttcatacacctttgaaatcaaaccacaaccagtttgtacatcctgcggtgcggcggtgaaatatcgttcatacacctttgaaatcaaaccacaacattgtgatacggacagtatttttactcctaaatatcgttcatacacctttgaaatcaaaccacaacgtgaaaaagatttatccaaagaacggtttaaatatcgttcatacacctttgaaatcaaaccacaactgtccatgtctgtgagttaaagtcaaatcaaatatcgttcatacacctttgaaatcaaaccacaacgctattcatgactataaatttgctcggttgaatatcgttcatacacctttgaaatcaaaccacaactgttcgtgtcggcttaaaaaacggtacggtaatatcgttcatacacctttgaaatcaaaccacaaccttttaacagcttgcctataatgacaagctaatatcgttcatacacctttgaaatcaaaccacaacttgagcgcctatcagaatgttgtcaggataaatatcgttcatacacctttgaaatcaaaccacaacctccacgcagggagtttgccggactctttgaatatcgttcatacacctttgaaatcaaaccacaacaaccggcaataaaagaccttagtgagagcgaatatcgttcatacacctttgaaatcaaaccacaacagatccggaaacaggaaaaatggttcacttaatatcgttcatacacctttgaaatcaaaccacaactgaacgtagccgctggtgtgcacgatatgcaatatcgttcatacacctttgaaatcaaaccacaaccgaagtcgttgcagtgaatcaggtacgtctaatatcgttcatacacctttgaaatcaaaccacaactcacttagattcggcccggcttgtccaaataatatcgttcatacacctttgaaatcaaaccacaacccaaccgtgcaattcgtcgccatctttacaatatcgttcatacacctttgaaatcaaaccacaaccgaccaatgcgatcatcattatgattgtgaaatatcgttcatacacctttgaaatcaaaccacaaccacgcgacgtggttaccgatagtgtcgcgaatatcgttcatacacctttgaaatcaaaccacaactgatataggtgcatcataactttatatacgaatatcgttcatacacctttgaaatcaaaccacaactattcatcgcgtgatacgtcgctcatactcaatatcgttcatacacctttgaaatcaaaccacaacagtccttcagtccacgatacattcatagtaaatatcgttcatacacctttgaaatcaaaccacaaccgtgaggaaatcatcgccatgatggacgctaatatcgttcatacacctttgaaatcaaaccacaacccaccacgcttctctacatcgcgcgataaaatatcgttcatacacctttgaaatcaaaccacaaccagaagcaattgaacttaaagcgcacattgaatatcgttcatacacctttgaaatcaaaccacaaccgtgtaactataaataaattattctttgtaaagatcgctcaaagattatcgaaattaaacaacaaaatacttttgtttatctcaccgaagcattcccaataaaaaaaccgcgcggtctcccgagcggtttttttaacgagaaaaatattaatcggatcaggcttccgcacctttgaaaggtttgaattcgatccagtcattttctttgaaaatgtctttcaacagttcacgatctttatcagtgggcaataccgtttcgcgataggtcttgtattgctcttcactcaaaagacgaccgtccactgtgtacggctgtttggcatgcagaccgatgctgcggttaaactttacatcgggcacgatcaatttgggcatttcgcgagggatcagagtattcatgtcctccacgagtttgctgatctcggcgatatacagatcgcgtgcaagctgattgagtttgtctttctgcacttcttcatccgtctcatgttcattaaaacgacctttgagaccccatacatatgcccagtgcgcgttggacgaattatccgttccgaaaagatcgtaggcggtaggaacccatttgttaaaatatttctgaataatctcgaccggtattttgcccgctttgatgatacgcttgaggccgttattacctgtgccaaggtgaaatgattcttctttgagcataggattcatactcatcgagagcggcataaatgccgaatggctcagcattttgagctgaaacttaccgtcccgatcaatgaattcggtataggtgtaaagatcgagccagttttccatcacttcattaaatgaacccagtaaccgtttttgttcaaacgcacggcgctccaggagtttcatcgcttctttgcggccggcatcgccgaagtgcgtcactaagatgtgactcatttgccaaccgtggcgcatttcttccgcgttaatacgcatcagcgcatagagatcgtaatcgctgggcgcacgatccaccagataccgctgctgttcgaccgaggcaaattccgtatcgccttggaatacgatcaactgctgcaacgcatcgcgaataccctgattgggtatgtccagcacgcgttcccacttacgatcacctctaaaatcgccgaattcgatttcgttgtacttcagcgcttcgtacttgggttccaatttgtagttgggaagaaaccgcttaaaagttttttcatcatagccgatgtcttttttccattcttggaaaagatcaatccaatcgtcaaatgtggaaacctgtgctttgatcataacgcggcctttcggttaggagttatttatgtgaattatgattgtaaattcttttgtaagaaaccgctcagaaaaatatccaccatctgcttggaaatacgggcgatattagtggtattgtgggtacgttttttgggattgtaccacgtataagtccagttcatcataccgaaaagagccaacgcggcaattttgatctccggcgtcgtccgacgggcagatttgttgtttttggagattaccatttcggagagtatggtttctaaaattttaagataatttttcttcttttcattaataatgcgatgatactctccggtcagcgaatcgctctccaacgcgagtattttcatagcgtcaaggtgcgtgacaaaatagagcaaatgattttgaacgaggatgtgcagtttcaacaccggatcgtggacgtgtgcaagtttttcgtgcagcgaaccgataaccgagttaaatgagtactgcgaaatcaaaaacaaaagctcttctttagttttaaaataataatacaaaccggccaaactcgtatgcattgctccggctatgtcgcgcatggacgtattgtgatatccttgctcggaaaaaagagtcgctgagcgctccaggatgtcgttgagccgcagatgaaatcgcgcctggtcacctgcattttcaggcatatataaccggcgtttgggcacggtactgcgtacggatgatttggtgacggcagtgttcataaatcaggtttgattcggttatacaattcgaacgaacgttcgaaatctaagcgaccgtcggcatattgtcaaatttatttttttacggcaatcccgtcgtttattttatccgttcatgactttcccgttgaaacttcctgtcatgattcgtatatattcaaaatacatctccatttcccaaatttgatttttttttcatgtcttcagttgccgtcaaaacgcctgcacccaagagaaaattcagtcagaattttctgactaatccgcattatgtgcgaaagatcgtggatgcggcaaatttatcctccggcgacaccgcggtcgaaatcggatgcggtaaaggtgcgctgaccgaacttctgctggagagcggcgcgacccttcacggtgttgaaatcgatcccgatatgatccgtattctcacggaacgtttttcccaacatccgcgttttacattgcatcatcaggacatacttacttttgattttcacggtatggcttccggttttcctttgaccgttatcggcaacctcccgtatcatatttccagtccgattttatttcatttgatggaatccgggccgatcatccgacaagccctgatcatggtacaaaaagaagtcgccgaacgcatcgtgggaaaaccgcacagcaaagattacggcattctttccattttttgccaataccatgcagcctgtgaaaaactttttgatttgccacccggcgcttttttcccggcacccaaagtgacgtcatccattgtacggatgaccttccatcgcgatatgacgccctggcctcattatccgctttttgtaaaaatcgtcaagaccggatttaatcagcgtcggaaaatgttgcgtaattccctttcttcgtttgaaggcatcaacaacgtcacgatagatttgagtcaacgcccggaaaatctttcggtagaagattttatccggctaaccgatgaacttgctatgcatcagaggcattatgcggcctaaagcggaaatcgaaattgacaaagaattgattgacgacatcaaagatctcgtcgattccaaagcagaacttcttgttcgtaatattctgagcgatctgcacccgtccgacatttcagaaatcttggatcacttggatgaagaggaacggaattacgtttttcaggtgatcgaacctgaaaaagcctcggaagtcatccttgaactgaatgctacgtcgcgcgaaaacgtactcgataatctggatgaagaacaaatcaccgagatcatcgaagagatgcaaacggacgatgcggccaatatcgtacaggaactcgacgacgaaacggccaaacgcgttctagaccaacttgattatgaagatcagcaggaagtcaaggaactgctgaaatatgacgaggatacggccggcggtctcatgcagcttgagtttgtatccgtgattgataccagtacgatggtgcaagcgactaacgaagcgcgtaaaaaagccgcggacgtcgaaaaaatacacgatatctatgtcgtcaacagctacggtcacttagtcggttcaatctccatcgaaaaattactcgtggaaccggctgaaaaacatgtcgccgaagtaatgcatcaggaaatcccgtttgccaaaacagacgaggatcaggaagaagtcgcccatttattcaaaaaatacgatctgatcgctttgccggtcgtgacacgcgccggtaaactggtaggccgtatcaccattgacgacatcgtggacgttatcgagcaggaagcttccgaagacgtttccaaaatggccggctccgtggatgaagatgtcagcgaacaatctacatttcgtatttccaagtcgcgtttgccttggctttttacggctctggccggtgaaacggttgccgcttttgttttgagccgattcgaatcgtcgctcaacgcgatattggccttggcttttttcgttccgatcattatggcaatggccggtaatatcgccatacaatgttcatccatcgtcattcgcggtctcgccaccggtgaaatcagtatcattgatattcagcgccaaatattcaaagagttgcgcgtcgcaaccatcaacgggttcgcattgggcatcgctttggggatgatcgtcgcgctatggatcggaaatatgcaagtggcctttgtggtgggtatcgctctgatctgcgttatattttttgccgccttcaacggcaccttattccctcttttgctcaaaaaactcaatattgatcccgctttagctgcaggaccttttgtcacaatgaccaacgatacgatcggtattctgatttatctgggtatcgcgacgttgctgctaatacgatagagattttgaagcattattttttttcgatgatcacggtcgccgtggcataatgatcggcatgcgaaaccgtaatgtgtatctgctgccccgccaattctttttttaattcaccataaagttctatcgaaggcacaccccgtgcatccgtgatgacctccgcatccagccatccgtggggatgaaatttacccacccgcgccgctttgatcaacgcttctttgacggcaaatcgaacggccagcgacggatacggatcttttttagaatacgcgtacgttatttctcccgaggtaaatacccgatgaataaaacggtccccatacgcttcacagctttggcgtatacgcgctatttcgacaatgtccgtgcctatccctgcgatcatgatcggctccgtgtttcatcccataggcgcatcgcctcagaaaattttccgcgggcggcggtttgtgaaatcgattgaagcgcttccgaaatctcgccatcgcttgctccgacgtgtacggcacctcgcaaatgggacatgagttgccgttctcgacccatcgccgccagcgcgctgatcacgcacagctcgcgctctttggccgtcagtataggccgactcaggactttgccgtatccttcaaaaatcatccagtcccggatatcggtgctgagcgactgcatattatgcataagtttatcaaaatttttatcgtaaatcatcgcacacaaggccataccgtctgatttgatttgttcttctgttcgcatctcgacccaattgttatcagcaataccgcggtgtttgagcgtcgcgccaagtacgatcaagccttcgatcgccgatggaaacccgctgaaaagataattttgcagtatcacttctttgatgcgcaatacgtcatacccggcatccagtgccgttgcaatactttcgcgcatcggctcggcatcgtgtatggcgacacacgccgatagacggcaaaacagatttaattcgggagataaagcggaaggcgttgcactcataaccgttatttatgcgcttagcgcctgttcccacggcaggctgatgataaattccgtacccttacctaaaacgctggtcacagcgatcgagccgccgtgtttttgaataatcgcctgcgaaatagcaagtccaaatcccgtgccttcagcttccggttttgtcgtaaaacccggatcgaaaacctgagaaatatgttcttcggctattccttgcccgtcatctttgatggatacgcgaatgccgtccggaccgcgccaggtgcgaatccaaatatggccttctttctgaatagactgcgccgagttttgtaaaagattgaccataacttgtgtcagcggtcccggtaaacctttgatggagggtaacggggtataatctttatgaaaggttattttgtttttgtatttgatgcgaagaagatgcagagcgcgttcgatttgtttttcgatatccaccgcgatccattgctgatcatcattacgggcaaatcctttaagttcgctcaataagtccatcgcaaaaacagacgcattggcgatcgtctccatcatttgttcaaaatcatgcgtgagttcagctacccgtttttcgcgcatcaaaagctgaacatcgatcgccgaaaaattggcagatgttacggtgtccaaaaattctttcagatctttccattcatgctgcgccaaagttacggcatgattgatattggcgatc

SEQ ID NO: 872 - DNA, 22024 bp, synthetic construct
  misc_feature 1..22024: note = Synthetic
  source 1..22024: mol_type = other DNA
ttcacttcccctgcgttttgaaccattcctcgatagcgggaatgtcgaagaaacggaagcgttttttgatgcgctgttcaagcgagagttgggcgtgcttggcaacgtccagggatggatcttccttgatggctttaatgagttgggcgttggtttcgggcaaggtactgccgaggaggaggaagcagatgcgtacgcggacctcccagggctgcttgtagtcggccaggagtttgagcagcgcttcaggcttcacatcggcctcgtcgcggatgttgctatctttgaagagttctgcgacggggaggtggtagccgggttcttcacgctggaggatctggatggcgcggacggcgcgcatgaattctacttgagcggcatcgtgcagatggggaacctcggggtcgcgcatgtaatcgaccagcacctccaaagggcggcgcgagccagtagcgatggcttcgtcggcgtattgagtgaggcggttgcgctccttgagctggatgaattcctgctgggtgggagaaacctcgggcttcatgtccgccatgcgcgaggtgccaggcaggtccttggcgggggccacgggggacgggacgagctgcgggattttcagcgtggcggagatgttttcgagcgattctcgggtatgctgctgcgtgagcaactgctcgcggcgcatgacatcgacctgcttctgtagcgcgatgatttgctcggcggacttggcgagctcttccttgagagtggcttccgacgtggctgaagcgacggaggcaggcgcggtggccccggagagccgaggttcgatgtggctgaggtagaatgaccgaccgaaaaacaggagcagcaagccgatgagaagggaggtgctgagggaaataaccagatgcctataggtgaggtgggagcggcggattttgggcagcgcggatgaaggctccctcagctcctctttgggcagtccaccagcggcggatttctgtttggccacaggggggccagtcttggtgtttttcggcgcggccccgtccgaactttcggagcagcgggcgaaaagaagggcatcctccttgttgtcgtcagaatctgggggtggagtgttggagcgctgcttggacatgaagttgatgcgtcggtgacgttacgcgatgaaggttgccagaatcaacaaacaaggccagcctttgtccgtcaactgatgtcatggcaacagaatccacccagccccctagcacttccctccgtacttccaccacccacagcctcgaacagccagaaacgctgcgtcgggtggctttgtgggggctgccagtagtgctggtgctactgtttctggtgtggccgtaccagcagtgggactataacaagcgcgaaagtatcctgatcggctggggccgctgggtgaacaagcagtcagactggcagttctgcctggtggtgccgctgctagtgggctggctggtgtggctgcggcgtgatgagttgtgccgtctgccctggcagggcacgtggcggggcctgccacttttgtgcctgggactgtttttttactgggtgggctacaaggcaaacacgggctacccgggctttctggcggtgcagtgcgttctggcgggcttcattctgcttgtagcgggaacggcgtggatgcgcacagtgttctttgcgtggctgtttttgctctttacctggcccatgcagccactggaggattccgtggcgtcgccgctgcgcccacggacagccgcgatggcggcggcggtactgaacacggtgggagtgcctgcgatgaatgagggttccgcgctgcaatctgcgcccgatgcggcgcgcggattgctgatcggcgatggcttcagcctggatgtggatgcgaagtgcagcgggatcaattcactctttgcactgatgatgatctccgcgctgctgggctacctagctctgaagcggccacgcgcgcgattcattctgtttgtgtgcgcggtaccactggcagtggcggggaatgtggtgcggctgctgctgctggtggcgggaacgaagctgtttggctccgattttgccgtgggcaggcacattggcgagcatcaggagatgtcgttttaccacacgtttgcgggctttgcggtgtttggcatcgcgctgacgggaatgtttgcgctgtgctggctgtttgaggggcgggagatgaaggcgaatctacagcggcatggccgcccggcagtgggcggggcctgcgccattccccagccgcgccgcactttggcccaactgctggcagccctagtgcttccgctggcggttctgggtgtgtgcgccgggacggacatcggctttcatgtggcggcaccgggcgtgcgactgaagccgggtgactcgaagcagccctacctgcccctgtctctcggcgactatcaaggacgtgagtttgaaatgaccgcagccgagaaaaacctgctggatgaaggggttaaactttcacgcgatgtgtatgcctctgtcgcaggtaggcagatcatggccacgatcattgtgagcgggtttgaaaaacgcagcctgcaccgcccagaggtgtgcctgccgaaccagggatggacggtgacggatcgcacgccaatctctctacaactggcagacggccgtgagatcagcctcatgatgatgcgcattttccgcgatgtggagccccggcccggcgagcgaattcgctcacgggcgatcaatttctactggtacattggcgccgacggcacctcctgcgcggaccactacgagcatatctttctttcgtactacgatgcggtgttccgcaacctccagcaccgctgggcgatggcttccatctttgtgccgctgccagagcagcgcgtgggtcaggaggacccgctgcaagaactcggcgcagcggaggatgcccgcgcgtttctggcgcaactggtgccgacgtttatgctgacgaaagcggagtgggaggcgggatcaaaggcagacggggcatctccagcaataagcccataggaccgataacaggattgaggcgcatggcatccattcccccgcttaccggctcaaatcctcttggttcaacaccttgaatccggcactggagaggacctcggcaccgacttcgggggagtcgaggtggaggacgaagacagggtgctgggcggggcgcacgaagagggcgtagctgaagtcgatattgatctcagcggaaagcagggcggagagcgcgtggacgagagagtggtccgtctcacgcagctcaacgacagtaactggaaagaccacatgggggatgcctttttcaatgaagagcatctccgtggtttcagggtcgctgggaataaggcgcacaagggccagctccgtggtgtcctggagggagagtcccaagacatcaatgcggtgctcggtgagcagcttcacgagggacatgagggcaccgacacggttgtgcaggaagacggacaactgccgcaccggggtgcctgccggagtggtcgtagcggaatgtgtctggggcttggaggtgatcatgggcggctagcctgcagggccggtggcggaacgacgctcgtcaaacaaagtcacgcgcagcgggatgctggccaaggtgctgtttttgtgctgcaccaaccagcggtaaagcccctggcgctcaaacttgaggcgctggagggtgtacacgatgttgcgtgagacgaacgggatgaaggccgagggaaaggacacatccaactgggcaggcatgggcggcaggcattccttaccgtcgggatccacgcaacggatgacgaactcgtgcatgccggcgtcttccgcgttaaaagtggcacgcacggcgatggagcactgcggatgcacgacgggaaagttttgcgcgcagagggtgtcaaacgcgccctggatgcagagcttgccctgatagtcggcagcaaagtcacagacgatggcaagctggatgttcattcttgtacttacgtaggattagcggccaaagagacgacggaaaaagccaccgataccttttgacggctgcgcctgaggtttcggtgcgggtgtcgctttcctggtctgcggctccgcgtcgccaccttttcctccgccggtggcctcatccaccaactgggccttgggcacttccttcatggccagcagcatgggatcatccgccggggctttttcaaagatattggtgaagacctcactgacgataggcgcggcttttttgccaccactgatgtcttcgccgggctcgccttcataaaggacagcgaaggcgaacatgggcttgccagcgggaagaaagccggtgaaccaagcgaggttttgatctttgctgatgcgccactgagcggtaccggtcttacccgcgatctcggcctgcttgatagcggctgcgtggccggtgccaccgccagcattgaccacggccaccatgccgctgattaccgtctgacgctggtctggattgagatcaatgcgcttgcggtctttgggctcataggccgtcatcacgcggtcgctcagatcctgcacttgcagcacaaggcgcggttgggggatgcgtgtgccgtccccgagtccggccatgcactggcagacctggagcggcgtggccagcaccatgccctggccgatggcaacgttagccaagtcccctggcagcatcttgtggccgcgatgctgaagaagatagctgttggtgggaacgaaaccctctccttccgccttgagcgggatgccggtgcgctcgccaaagccgaggcgcagggccatgttggtgatgtagtcggcccccgcttccagggcagcgcggtagaaccaggtattgcaggagcgcttgatcgcgctgactacgttcattgagccttcgccatctttgttccagttcttgaacacgcggtcgccgatctctagcgcattggggcagtcatactgcgtcttagcatccaccttgccgctatccagtgcgccgagggcggtgacgaccttgaaggtggaggccggggggtattcgccacggaaggagcgcgggtagagcggctggtgtgggtccttcatcagctcgtcgtagcgtttctggcggatgccgggcacgaattcattgaggtcaaagccgggattggacgccatagcgaggatgtcgccattggtgacgtccatgatgaccatggcaccgccagtggtgtgctttttgagggcgttttcggcgtatttttggaagttgtagtcgatggaaaggaccacgttgtgccccggactaggcgcacggcgcacgtcctcggagaggcgcttgccatcgggactgaagaggacgttgacgatccctgcctggcctttgaggtcggtgtcgaacgcggtttcgatgccctcgcggccttccatttcctcaaacacgggatcgccatccacgatggggccggtgggcagcgggcgggtcttgcccgtgtagccgatgatgtggcaggcggtgctcccttgcgggtaatgccgcaggtaggcggcctggatgacgaggctgccgcccaggaggggcttgagcttctcctccatgtccggggtgatctccacattcagaccctcctccacggaaaagaccagcggcagccagcggcggtgcttgtagtgcatgagcacccggtcgtcagagagggaccaggtcttgccgagcgcggcgttcaccttggcgatggtggagcgcgcaaaggcagtaacttgcgcatccgtcgcaccatccatgtacggcatgaccagagcgagatagttggcggcgcggttttgcgcgaaggggatgccgtggcggtccacgatctggccgcgcggggcgggtacgctgagggtgagcgcacgcgcctccttctgcgtggcccaggaggcattgaggtcctgcttttccggcacagcgggcttcgcctttttcgcctcatcctcaacctcgacgacaggctgcgccttgagcaccacctgggcctgcacctgcggtccgagcagggccagcagcccaatacccgccaccagcaaccggctgcggaggggcgacgtggtcagttcatacgaaaaaagcatgggcataaaaagcaagcgccgggtgtcatgcgacaacccggggcaagcgagaacatgcggctacgcatgcacgacgtcaagctggaggtcacggttggggcgctgtttacggtggctgcgcggtgcttgaatttactcggaatagcacaaatagggaccggcatgattaaactgtgcggctcatgacctgcttccgcctgccgcattgaaaaaaggcattgcactaaaagcagtcatttgatggaatcaccgcgctcactccgttctcgcaagttccgttctcccttccctctcccgaccatgactcagaccaccaccggcaaagccgacatgaaactcttctgggcgtgcttcatcgccctcgtcgccacctcctttgtctttggcgtgcgtgccaacaccatcggagaactgcaaaacaacttcaacctttcagagtcgcaaaagggggccatcaatggcgcgggcatgtggccctttgcgctgagcatcatcttcttcagcctgatcattgaccgcatcggctacaaactggtggcgctgtttgccgccgcctgccacgtggtctcgctggtgctcacactgcgcgcctcgggttttgatgacttttactggagctcgctgctcatcgccgtggccaatggcacggtggagtccttcatcaatccggtggtggccacgatcttcagcaagaacaagtcgaagtggttgaacatcctgcacgccggctggccttgcggcatggcgctgggtgccctcttctgcgcattgctgccagagaccaaactgtttttcaatgccgtgtggcagttccgctttgcactgtgcttcattcccgtggtgctgtacgccctgctcatcctgccacgcaccttcccggtgaacgagcgcgtggccgccggtgtgagctaccgtgacatgctcaaggaagtgggtgccgtaggctccttcatcattggctccctggcctactgtgctgtggtgcagatgctcggccacgaggcctcgctgtgggaatctgtcatcgcaggcgtggtgctgggcgcggcggctggggtctatacacagtcccttggcaactggctcttcatcgtggtgctcatcactatcgggccgctggccaccacggagctgggcacggatggctggatgccggagttgctgaagctcagtgggccggacgtgccgaactttggcacgtggatctttgtgtatgtgtctgtcatcatgacggtaatccgcttctatgccgggcccatcatcaacaaagtctcgcccatcggcctgctggccatcagcgcggccatcgccatcgtggggctggtctttctcagcaacgccactggctggatcatcgtggccgcagcgaccgtttatgcgctgggcaagaccttcctgtggagcaccacactgggcctcaccgccgagcagttccccaaaggcggcgcactgaccctgaacggtgtctccgccgtgggcgtgctcttcctgggtgtgctcggcagtccctacatcggccacaagcaggaccacgacatggacaagcgcctctccgccaccgagcacagcgcgctctacgcgcagattaaaggcgaacccaaacccggcatctttggcagcgccccgaccctcaatcaggaaaagatccaggccctcccagccacgcagcatcaggaactcgaagccgtgcaggccgccagcaagcgcagcgtcttcatcaccatcgccatcctccccggcttcatgctcgcctgctacctcggcatgttcttctggttcaagtcccgtggcggctacaaggccgtggggatttcggatcattgaggcttggggggctggtgtgcctgcgcccagaaagaggcgtgaatttcagtccaaattttccagcaattcgattataatgcgtaagggtgagtttgcccctgcgcgttcttcagcggcgctggtggtcaatagtcgtcgcggtcgcgtggttgaagctcgaaggggccgggcaggcaaacaggagagcaaccgccgtttcggcggccattcatgcccggcaggaatggcactcagttaagacgtagtttcgtacatttgaacccttgccaagccattggaaatcaatgatttgaagcgtgaatctcttcatagtgcctggcaatttttgttggcaatcaagttttcacacctggattttccataaaaatccagacacctcggcggcataaaaagacaaacttgtcattctcacatctattggctacaaataccccttatggttcccaattgcacatttgatctggataggggaaatttgaagtcaaccaagctaccaacgagatttgatgcacccatggccccaattgaatcatgaaagattttacaatcccgcccgcttcagccaatgacttccttaaaggccttgtctttggcttcgatcttggcacaggatcaataggttatgccgtgcgtcgtggcgctgagtttctcgatgttggtgttcttatctgcgatagcgacatcggcgcactggatggacgcaatggtatgcgacggatgaggcgcacgttacgttcgcgcacttatcgtcgaaagtggtcggctcaacagttggagcgcattggcttgtccaaaccgcaggctgctttctttcagaaacaggagggagaaacgcatgtggtatttcaacagcgcaccaatccagtcattctacgctgccgtgcccttgccggtgaaaagctaaaccctgagcaactgcatgtggccgtggcgcatctctggaagcggcgcggctatgaaccggtggtgccttggagcaaggatggcaagccattggaaggtgaggatgaatggaaaggcactgtctctccagggcaaaacaacaagaccttccaggaaagcgagtgcgcgcatccggcgcagttcctcaaaaaccagatggaacgacgcgatgcagcagaggcatggccgaaaggtgtttatgatcagcgccgccgggtgtggcagcgcgatctgcttgaacaggagtttcgggcgatgatcaaggctcaacctggtgccttggataaaaatatcacagtcacaaatcttgatggagagactgcttctgtgtccttcgagcactggtttttgtatggtgatggcaagctacgcacacggcacggcaaggaataccgctggtatgacaaacccaccgaggggcgtaatcctggagtgcttggcctcaaatggccgcgtttcagcaaccgcagtccggggcttgatgtgctgcgcccttatgatgagaagggccgtccgcagcatgtggtcagcaaggatgcgcctattgcccgcaaggccatgtgggaactcgccacggcgaacttccgtgtcacggatttacaaacggggaagcgagttcgtcccagccaggagagtttggacaaactcaaggagctgtggaaagccacgctcaccaagaaacagcgttccgctcttgatggtggcaccgccgactttgatgtcgaggtcagtgcagaggataaaaagaataagaaaggtgaggtttccaaagaaagtttgctgaccaagtggggcactctttatcaggggcagtatgcgctgctgacgcatcaacatgatcttgtctccgctgcgggtgaaggccgcactcgttattcttcgcccaccattcaggcgatgtttgaccatgatcttgaggcgttgcagaaaacaccccagcccttgctcgtgcggcctggacaaagccgcgaggatgcgatgaatgcgtttctggccgatgtgcgcagcccggtggtgcggcatcggctgacactgctgcttcgtttaatggaacggctcgtcaaggagcatggaacaccaaagctcatcatcgtggaagcagcgcgcagcttcgggcttggtcgcaaagccaaggagaagcacatgaaggaggtggcgcagaaccaaaaggagcgagagcaggcaagaaagacggtcaagaaagaaggattctcatcaggccggaatggcctgacacgctaccggctttggagagaggctggtggccgctgtcctttctgtggtgatgcgatcaccattgagcagttcaaaacaggtggtgccgacattgctcatatcgttccacagtccatccacgagtgtcatgacttctacaacctgacggtggctcatgcggactgcaatcggcgtgagatggagaacaaaatcccccgcgatgcctttgggcatcggtggcatgaattggaaacattcgcccgcactcacttcaaggatcggaagctggaactctttcttgccccaacgctggcagaggcacaggacattctagaaggcaaagaccagctctgtatgaccgcgcatctctccaagttggtgcgccgtctgtgcatcatccgctttggctgggaaggcaaagacgggcgtgatcccaccacggaggagggtaatctgcccagccaacaatttcttgtgaccaacggcagcctgacctccgcgctgcgtggtgcctggggaatcaacacgctgctgcaccgtgccccatgcccgaccgaagacgagtggcacaagctatccgaagaccaacgaaaagacattaaacagaagcgttgggaggccaaacaaaagaatcgtggtgatcatcgtcatcacggcctggatgctatggtcatcacctgcacactgccctggctagcacgccgtgtcattgaccgtggagagaatgcccagggagagctcatttggtggaaactggatgagcaaacaagggagcgccgcgccatcaatcctgcgttccctggagagaatgccttccgccatgctgcagcgcaatggcgggacaagatggaagtgaggcatcatgtggcgaatgccacccataaacaacctgccaagaccacgttttattcacgacgtagcctcgacaaattcatctcacgcgaggatgtgacaagcctaacacccaaagatctccatacagaaggcaatcgtaaatgccgcgtccatccagaggagttggggcgctatctgcatttgttgtggacctcttacagcgaggatctgctcggctatcttgccgccgcgcgtgatgtgtggatcaaagagcatcccatttccaaagacaatcaggaagacgtgctcaaagaattcaaaaagcggctctgcttcgctgcctttgaaacatggcgagtgcgtggcatgaagagcgaacctgaattgccagttgagccagctcagcacctccgtttcgacggtatcctcaagacggtgattcaggaaaacataggtgcaattgaactacctctccgccaaaagctgttcaagcggctaacgccagactttgcccgcaggctgtgttttacagactttcaaaagtggcgggccaagaaacaggcggatgcaccaactttcccgatgcaggttcgcattcctatcctcaaactgcgttatattgcaaagctcaatttggacaacgccgtgccaggaccaaaaaccatgccgggatacggcggacatccagtgtatgtgcagcgcacggatttccgtgaagtgcgaatagtaccagccacctcaggtgatggctatgtgccggtgtttgtgccactgggtgccaagtattcgttgttctcaccctttggagattacgtcaaagaaggtgaagccatgctgacgattcgcaaacgtcagcgcatcaagctggttcaggactacaacgacagcatcaaggctggggaatatgtaatcgaggtactgggagctgaccaggtcacgatcaatcttgcacatgtggcacgtcccaatgaggcacgcgcagcgtttggtcttcccgcgactggatacaagccttactggaagttgttgctaccagctatgggtatcaaattttctgcaacagcacttggagttgaagtgaatggtaccgatgaaggttcagaagatacggacgaagatgataaggaaaaatgagccacattatccatcttctaggccctcatctcagcgcccgactgtcgcgtgagcagctcgtcattgtggataaagagaagaatacgaaacgcccggtgccgatagaggacatcgccgccctgatctgtgcggctcccgacactgtgtttaccgctggtgcgctgcgccgtctggcggagctgaatgtgccggtgctggtgtgcaatgagtctttcgagcctgcggccatgtgcctgccttactatcgcgccacagacacggcgctcctgcgctctcaggcaacgtggcagccggaatggcaggatggggtgtttcgtcgtttcattgcggccaaggtgagaaatcaggcggcgaatctggatggtaaaatgagtgatgccatgcgggagatcggtactcgctgcgctgaaggcagctaccgcatgccagaggcaccgcgtcccggcaagagcatcgcgcgtgtcacctttagtcgccgggcctttctgcatacagacacgccagccgcctgtgagtcccgcgcagctaggctttattggcggcgctttctaccacctttatgtgccaagcttggcaccacggaacgaatcaggcagccgggaaccagaaccggtgtcaacggaatgctcgactatggttatgccattctccgcagtgcaacactgcgcgcattggcggctcgtggcttcatcgctgcgcttggactgcaccatacggcacgggccgggacgtttgcactggccgatgatgtaatggaaccactccggccatttatggatcgagccctgcgtgattacctcgaacaggcggatgccccggacatgcgcggctggatgcgtcctgcggtcgatgtactgatgcagcctgtcaagatgcccaccggtaatgtgcgcctattgcatgctttggatttcctcgcgcaggcactcgcgcagctctcagtgaagaacgactcacgcggcagcctgcccatccccttgctggtgtgaacacttcacgcgatcttatttgcaccaaataccgcatggcttgggttgtcgtcatgtttgatttacctgttggcacttcagaagagcgccgggcggcaactcattttcgtaatgacctgataacggacggttatttcatgatgcaattcagcgtgtatgcacgcccttgcggcagtgcggacaaagtggaaacccatatgcgccgcttgaaaagcaaaattccgccaagtggtgaagtgcggtcactcatcatcactgacgcccaatggggccgcatgttcattgtgcgtgggaaacagaagaataaaccagaggacatgccggagcagttaatgtttttctgaaaacaaacccaccctcagcattgctgctgagggtgggttttaataaccttgtaacctgcgggtgtcattgctgacagggcacgcaagttggttaacttatttgggatgaataaccgaaatccgaccggggacttctagactcggatgacaataacagagaactgaacagcgtcaacctagtctagatggccccggtcggagggcaatcccaaactctgactctggcgagcacaccaaagtgttcagtctagatggccccggtcggagggcaatcccaaacaggccttgaacgaaatgcacaaaacgttcgagtctagatggccccggtcggagggcaatcccaaacccgggccgctggcgatgcggcatgggagcgagtctagatggccccggtcggagggcaatcccaaacgatgatggattcgattccatgcctaccgccagtctagatggccccggtcggagggcaatcccaaaccgtgagcgagactgagaagttgaagctccgagtctagatggccccggtcggagggcaatcccaaactaaaagtcgtctgaatcgctgccccacactagtctagatggccccggtcggagggcaatcccaaacggtcgatccgcgatttcctgcggagtcttgagtctagatggccccggtcggagggcaatcccaaacagcttcgtgatgcagcgtacgccaagcgtaagtctagatggccccggtcggagggcaatcccaaactactgcccgcataatacagcgaataaggccagtctagatggccccggtcggagggcaatcccaaaccatgactacccttactacgttgccatttacagtctagatggccccggtcggagggcaatcccaaactgctgggtgcgacgcccgcgacgacttcggagtctagatggccccggtcggagggcaatcccaaactacactgcctccatcatgttcatccgccgcagtctagatggccccggtcggagggcaatcccaaaccccaccacaagctcatctcgtacttcgagaagtctagatggccccggtcggagggcaatcccaaacgtttgtttgcgcctacctggatgcctgcgccgcgctgcgaaggactaaataccttttccaccgagctatgaagccgagctaaagcacgggacgacgttctcggtcagcaactctgaagcctactcagccacctcactatccttcatcccactcttatacgccacggccttcacctggatgccgggctggacggagatgaggccgcagtagatgtagccgcgggtgcgggtgggtggggtgccgtcgagggtgtagcggaaccaggcaccttcggtggcggaggtgagggtgatttgtttgccgtcgttggtgatctggggcttggcgcagggctgggcaccttcttggaagaggccgcagtcggggtagttttggatgacgtcccaggcgagcttttgaagagcggtggcttggtcctgcgtgaggtcggtgccgatggggaggagtttgttctcgggagactggcgatagagtgcgccgtaccaggtgaggccgacgaggtaacagccggagggattgacgtggacttgatcgtcaaagagggtggcgtagtagctggactctccgggtaggacgccggggagtttgccttgatcaatcatggtgcgcgcccagcccatggcgatggcggtggggatgatgcggacgggtttgccttcgtggtactgcgcggtgatctggtgctgcacttcttcgttgtagagaagcatggcgctcatggattcctgccaggtgagggcgggaaaggtcttcttcatctggtagctgggcacgaggcctttgtcggtggggcgggcgcggggcatctcgtcccactcggcgtagagccagggctgcacgttgggggatttttcgcggatgagcttgatgaaacgggtggcgtggtcggcctcgcgcgggacatcgaagtcgcggggctggatggtgaagtagtcgagcggatggacggctttggcgtattcggtgtcccagcgtttttgatcggcgccgtgggattcgttccagagcttgttggtgagtgagccgccgatgaggtaggcgggaaagtcatcgcggccgccggcggtgcggatgaagacgcggaagcggctggcgttgccggtgaggctgttgccgacgtggaaggagctcatgggcgcgtgcggctgcttgccgatccacaatgtggagagtgccgcggggctgggggcgagcgcggggctgaaggccacggtggtgatcatggcgttcttctcgatggtgaagggcttttcatacacggtgccgctttgggcatcgggcgtggtgccatcgagggtgtagcgaatggtggagccgggggtggcgcacttgatggtgacgaggcgtggtgtgtcggagtcgccaccaccgggattgatggaggggcgcgcggtggcggcctggtcttcgagatcgatgccggcgtactgcgcgtctgcggtgggggcattcatgtagctctcgggtttgccatcgagtgcgccgcgatagtagccaccagctgggccgaagggctggcctttgagtttcttgtcgcccgcgtagaattcgatctcggcgacgtttccatgcgaacctgcgggggcttcgtagcgcagccagcggtaggactgggtggtggtgagcttgacgtctgcccactcgccgctggcgggtgcggctttgacttcgccaaggggctgaaagcctgcggtgggcgaggtattcgagccggtgatcttgccgccgacgagggcctgtgcgcggtctttggcgggaaggaggcggacgtgatctgcgagggtgagcttattggtgccagcctgcaaaacggcggcgggggcgctggtgataccgacttcgatctgtgatgacggagcggcaccgccctggccgtaagcggcggtggcggctttttgaaacagcggcaggatgctcttcccctcccctgcccaaccggcgtgctggacgaggaagacggtgatgagcttctgctcgcggtcgtagcgggaattggtgccgtaagcgccgccgtgggtgaaggatttgccatcggtggcgaggccgaagccgtagtgcgaattggcctcgccggactgatcgctggtcatggtctgcacggctttctcggagagaatgcgagtgcctttgagtatgccattgtgtgccagcatttggtagaagagggagagatccttggcggtggcgaagaggccaccagcgggcatgggctggcgctcggggttgtccaatgggtagaggagctggccgatggggatctcttcgaggttatccttcgcagcggtgggcttgtaggatttcgcgaggcgcgactgctgctctttgctgggccagaaggtggtgtcgctcatgccgaggggcttgaagaggcgctctgcgaggaacttttcatagggcatgccgctgacgacttcgatgatgcggcctgcggtgttgatgccggcattggagtacttggatttgctgccgggctggaagagcaaggccatcttggcataactgcgcacgcgctcggcgaggggcttcaaatcgagcgtgggggtttccatctcggacttgaagtcgaggccgctggtgtggctgaggacctcgcgcacgaggatgggatggcgcggggcgacgagttggggcttggcgggatcggtgctgacattgacctgctggcctttgaactcggggaggtatttttctaccggatcgtccacattgaccttgccttcatcgacgaggatcatgaggcctgcggcggtgatgggcttcgactgcgaggcgatccagaagacggagtcggtgcgcatgggcttctgcgcggcgatgtccatggagcccacggcttcgacatcgaggatcttgtcgggatttgcgacgagaacgacggcaccggcgagcgtgtggctttcgacgaagggccggaggagtggcgcgagtttggtggcgggtgcttcgccgcgcagcgcggtggcgaggaggagggtgaggaggaggcgagggagcatgaggggagagtgaacaaggtcggactcggacgctggcgcgagtggttgggcgcggaggttggagttaacgcggtgagcactgaaaactgacaactgaaaactgggaattggaaattgggtgggagagtcgcggcatcaattttgcacagttttactttgatgattgggattgagcggagtgaatgccaccttaactttccagcccaatggcccgttctcccgatcagacctttcgactttcgttggtcgcttttcgtttcgtgagccacttcctttttctggcagtgccttgtgtggggattgtctggtaccgttcagctcacttcatccacgctgtgccttttttgatgcttgccttggttttggccacgatctcagccgtgcggacttatctgcatctgggaaaaatgatgcgtgaaatcgaagcgaaaaggcgggcggatgaggctgcgagatgagcggctactttttcgggcggggatggcagcgagtgcagacgccccagttccagccgtaggcgaccaagggattttgcgtggcgatccgctggccgcacttctcacacttcagggtgaaacagatgatacccccgaggatggcccaggcaatgggcaggtagagtccataggggaacagcatggctgcgatgaggcaggccagtccggtgaggactaaaccaagatgtactttctgagcggtgctcacggccatggtctgagtgtgggcagagcggatacgtttgtcaacgcggcggtggacatgcagcgcgccgccaaaatctacaatgtgggcaagccccaggaggagcagattttgcaatgcatcggcctcggctacggccccaagctccgcatcggcgaccaggaggtctttggccgcgaagtcaatgccgccagcaagttgggcgaagacatcgccaaagcctgggaaatcctcgtcaccgactccctgcaagctgccgccagcaccgtccccggtctgcaaattcgaacccatcgccgaaatcccacctggcgcagcaagcgcagcgcgggtgatctacacgctataaaaagggtgcattttttgaagtactgcccgtagcaccaacaattccctccagccccaggcagagtgaagtgatttcgatgatagacggcaggctccaagccgacgattccctggaaaccaagcgcattttgccgtaagtgcctaccagccccctctctcaggcaaaaaaacaaccctgccggaactcggagctcaggaaaaaaacccccaaaacctgaatccaattaacccggcagggttgatttaatgaatatattcggaaacagcttcatcatgcaataccaaaaagtttttcatcgaaaaaaggcactccttatcaccctgctgggcatcggcatttccgccttgtgcccttcggagtctcacgcgcagctcgggcgctcagtgcgtcaggtgatcgtctcccaagcagcgacgtggaactccaacaccgccacgatgcagtgctatcagcgtgcttccgccagtgcgccctggcagccagtctttgagaaatcggtgcccgtcctgctgggcaggaaggggctggcctgggggcgcggagtcttcaatcccccgcagaacggcattcctgccaaggtggaaaaggactggcgtgcaccagcaggcgtattccagctcggttccctgtttggctatgccaccaccccgccgggtggtgcccgctggccgtatgttcaggtcgggccgtgggacgcctatgtcgatgattcgaccatgccggagtattacaaccgccatatccgcattgatccccgccagggcattcccccttggtttgagaaacaaaaaatgcgcctgggcgactccgcctacaaatggatgctcgaaatccgccacaatcagcagcctgccgcaccgggctatggcagcgccattttcttccatgtgcgccgtggcccagacaagcccagcgctggctgcaccaccatggccgagggggatctgacgcgcctcctgcgctggctcgatcccgccgcctcgccgcattatgtgctgctaccgaaggcggactatgcagcgctgcgtgggacgtgggggctgccgtaaagccacgttcggattctagcgttccgtgcgtttgatcgccttcttgagccactcgccttcctctttccagggcgcggcgttgcgcagttcggccacggtcatgggcaggcgggcgctccagttgctgtcggcggcgatgccggggacattgaagcggtcttcgaggccatagaggtcggtgagcatgaaggcggcaaagcgtgcgttgctggtgaagagggcttccagcagggcatggcggatgtgggcgtcgtattctggccagccgtcggcggagaagcgcagaccggcgaactcggcgagatctcccagctctttgtttcccagagcgcgctcgctttcatcgctgctggcggcatcacgacggcggtgctcccaatgcgttcgcatgggctcatggtcgtgcgtggcgtaggtggtgaaggcgcagttgtcgtaggtgctgcccatgaccacgcggccctgatcgttgtgctcccactggctgactttgaagccgggaatgtcgaggctgaggagatgcgggcgcacgtaatccggcacggtgcccaggtcttcggccaccacctcggctttgccggctgcggcgtcgaggatcatgcgcaggtacttgtcgccgttggcgagattcgcagctttgtgctcaggcgtgtcgtcagcattttcgatgaagtgcggcagacgcccgccggtgagggctttcgcctcctcatcactgaggtagcagaactccgcattccgggtgggacgccacgggaagctgtagatgcggtagaagccgagcacgtggtcgatgcggaagatgtcaaagaccacggtcagcttctgcgtgcgctgccgccaccactggaagccgccgcgctccatgacatcccagcggtaatggggaataccccagttctggccccaatgctggacgaagtaatcgtctttgaaataggtctctggcggcgcgccaccgcaccattcgagatcaaactgctcgggcttgaaaaacacatcggcgctgcaccaggagatgccgaagggaatatcgcccatgagcttgacgcccttcccgttggcataagcacggagctccccccactggctgaagcagagccactgcacgtaggcatgaaacagaatgtggtcgtcgatctcgtcagccttggcatcacgccacgcgcgggctttggcggcggtgttcagctcctcgcgccagttcgtccagtcttcatggccgtgctcttccatgaggactttgaaaaggcagaagtcatccagccaggaggcttccttttcgcagaaggcctcaaattgggccattcgcccagtctggctttcgacttgactgaaggcacggcgcagcagcgtgtttttcagccgccgcaccttggggtagtgtaccgagccatggcgcagcaaatccacgcgcagaatgccggtgatgctgccgtagaatttttcgtccagctcaggcaccaccgccggggagagatcgagcgtcaggtaatccagcgcgacggagctgatggcgttgtaggggctgctatcgctgccggtggcgttgatgggcagaaattggacaaagccgaggccggtgtcggcggcccagtcgatgagctgacgcacgccgccgatgtcgccaatgccgaggtcatcgggcgtgcgcagggcgaaaactgggatcagaatgcctgcacggcgaggctgaatggtaggcatgagagggtgggaggattccagaatgacaattgattggtggttgtctgctgcgatttgggtaacttcgcaagcgtatagagcacgatgcgttcccgattcttgatgatgctgctgtttttatcgatctccaccgcttgggcggcggagacgaaggagccgcgtgtcatcgatttcaaggggccgccgcattcctacctcgattggaagccgaaggaccgctttgccgagctgcaggagaaggcgcaaaaaggcgaggtgaggctggacactacgaatgacaaagccttcctgaccagcctgctggaggcgctgaacatcccgatcagctcgcagatcatggtgttctccgcgagttcgctgcaaagcgagatcatcaatccgcgcaacccgcgtgcgctgtacttcaacgaggacacctacatcggctgggtgccgggcgggctggtggagatcatcgccgcagatcccgagatggggccgatgttttatgtctttgaccgcctgcgccctggcgggccggtgccgaatgtgactcgctccaccaaatgcatgaactgccatgcaggcaacgccacacgccgcctgccgggattgatcgcagagtcgctgctggtctcacgtgccggatcaagcctggagaccttccgccgggacgtgcaggggcaccagatcccgctggagatgcgctttggcggctggcatctgaccggtcagcacaacatcgccaacaacaaggcgaacgtgatgggcatcccgaacaacgggaaaaacgagatcacctcggtgaacccc

SEQ ID NO: 873 - DNA, 23243 bp, synthetic construct
  source 1..23243: mol_type = other DNA
  misc_feature 1..23243: note = Synthetic
  variation 20200..20299: note = n is a, c, g, or t
  variation 19877..19976: note = n is a, c, g, or t
  variation 8849..8948: note = n is a, c, g, or t
  variation 14710..14809: note = n is a, c, g, or t
ccttccttggtttcccagttttcctggcggacggtgccggtggcgatcacgcgcatccccttgcgcagactgtcggcaacattgtcggccagtggtgcccacacggtgacgtccatgtacatggtgtccccgtcagcaaattcgccggagttcttgtcgaagtagcgtggggtggacgcgatggtgaggttgcagacggacttgccggacttgacggaccgcagctccgggtcgctcgtcaggtttccaacgattgtcagggtgggttcttgagccatggtagtaacctaacctttcttgagagggggcctttccccttctaacgcctcttgtgggacgcgcctggtgttcgcgtaccgggttcagtgccacgaacagtcagtagtatcaacgctggtcagggcgcttgtggcggacgtgtcgaggcggcagcgaaccatgcgcacggcaagaagatgcgcaccaacccagtccactccccgcaggtcacaatcggtcagcgtcgagttcgcaatggtggctcccatcatggtggcgccagttaaagtgcagtcggttatggtgacgtcgcgcgcaagcatcccgctcaggcaagcgtgggtgagggtggtgtctgtcagtgtcgccccgtcgagagtggttccactcatgagcgcgtgttccaggttcgtgtccgtgatggtggtgccggtcaggttggatccgtggagtgtggcgcctggcaggtcgcactggtcgacgtgcgccccgttcagggcggtgtgcgccatgtcagcgtcctccagtgtgcagtcggctatgacggcacctgacagtgtggcggagtgggctttcacgtgtgtgaggtggcagtgttcgagtatggagcgtggggcgtacaaggtggtgagcgtgacgtttgtgaggcgcgcgcgtgtgagggtgctttctgccagtgttgagctggtgagtgtgacgcgtgtgcctgttacgtcgtccagcgtgatgctgccgttgcagttgtgcaggtggagtccgctgatggtggcgctcgtgatggtgagcccgtccacgttcgcgcgtgtgagtgtgcctgtgggtgctgtgccccgatagtgggtgtgggtgagagtggtgcgggaagatgcggggcgggcgtcgagtgagctggctggtatgagccgcagggatttcgaggtgtttccgagacggtaagcgccagggtatcggccttttttgagacgcaagtacacggctcctgtggtgatgtgttggcgtgccgcgacttggccgggcgtcagcatggtgtccatgggtggcctcctggtgtggtgttccagccttccttgtgggacggattcagcgttcgcggtgcgactagatgggcagccgcaactaggttactcatgactacttcattccaacctcgcaagcctgccgggtcaccccagggcggccagtttgattccaagccccacgccacgttgcccgaccctgtgcctgaaggcatattcggcccacggggttttgttgccgagtgcggtgcggaagacactctgaagccgtatattggcgaatcctggcaggatcctcgtcttgatttcgcaccatttgagaacgtgtcctctgaagatgcgggaacactgctgaatcagctgccccagtcggtggctgaagggcggcaaaatggtgctcctatggccggtcagctcctcgtgttggctcacaagtatggtgggcgtgtgggcggctatgtggtgcgacccccgcgcatggacgagcgggtgagcattgactccgtgaccttgccaatggatggggattttgacgacagtagtagcgcgttcagtgctgtgcgtgatcgttacgacctggacgctttagacgagccggacggagtgtcgtgggacgggcacaacgtggaattgtggtgggactaggcgtgagcaagccgcgtggtggcgcttgccaacgtacccagggcgagtgcgagtgagatggcggcgagtgccgcgtaggttcgtatcatgctccaccttgtgggacgtgcttctaaaaccagcacccgaccatgctgctgttccccttgcggatcatctgttccatgctggcctgcatgttcgcggaaaaacggcagtttttgaacaggcagtcacgcacgtcagcctgcgtcaggtcggttttcgtgaagtcacagtcctcaaagtaggagttggtgacggtggctccggtgaacttacaatcctggaacttgcccccgctcacatccgccatgtccatcgtggtgccgctgaaaatgcacttggtgaacgtcgtgttgtccacgtcaagatgattgagagtggagttggtgaagttggtgcgcgcgaacttggttttactgacggtcagctcgtcggcctccacgtgtgtcatgtcaatttcagtgaacgtggagtcggtgatggtggcgtagttggctgtggtgttcctggcgttgagctggttgtacaggccgtgcgtcgtggtggaggaggacaggttcgctcctcgaatgtcagcaaagttggactcgcagtgggcgaatgttgacgcggtgagagtggaatcctccagtgaggcattgtcgaacgtgcagtgggtgaactggctgtctcgcatgttggcgcgcgcggcactggctgatctgaaggtgcagttgtcgaacgtggagaggatggattggacgccgtcgagtcgcgcgttattcaggctggttcccgtcatgtgcgtggtgccggttgcgagcgtgaggtcagcgttgtcgagggtgacgcccaggaagcgtctttggtgaatgtctgcccctgcaaggttggcgcctcgcatgtcggcgtgagtgtagttttctccgagcgggtcaatgtcgagggtggcgtggggcttgttgtcgaactggccgccctggggtgacccggcgggtttgcggggctgaaaagaactcatgggggttctagttgcggctagctgagattgcgagagaccggcggtgctaaagacaccgccgatgaatcgcccgtaccgcgtggcccctcatagtcggctgatcaactactcacgcccacaagggtcgaggattcttgcgccagacttcataaagcgttgacccgccttccgcagtgagcgccaagccgtcgtgtcagtgtcgccgcgaagcgaaaccaagcccgcatcccgcaaccgcacaagtgtgcggaacgcgtccaagtcgaacgtgcaggagtcgaacacaacccgcttacagtcaaccttgtccaaccgccagccggtaaagtcacagccggtgaacgtggtgtcgcgaacagtcatcccggtcgtatcacacgcgcgcagcgtgagccggtctatccacgacttgctgattcgaacccagtgcaggtcgcaattctccagcaacaccccgtcagcgaacacgccgtccaaggttgagcctgtcaactgcacgtcgcgggcctccaaatcctggataccattgtctgtcagttccatccgacccagatccacgcgggcaagcgtcacctgggtgaacgcagcccccttcgccgtcagtacacgcacctgacagtcctccagactggtttcacgcacgttcgccgatccgaggtcaacacggtcggcagtgcaaccccgccacgtggtcctgtatatgcccgtgtaagacagatccgcgtcggtcaggttcgtgtcggccacttcactgccgtcgaacacgccttcgacaagactgacactactcaggtcacactttttcagtgtactttcaccgaaaaagctttggaacagcgtcgcccggtgcaggtcggactccgtaaacgtgcacgcgtggaactgcgtgcagtccaggattgtttcccccgcataagtcctgttgaattcgacgtccgtgtattctttgccgattttaagcgtcatgttctcgttcatactcctccttgtgggacgggaggggcagccaagaaccgcactgcgtgttgcatttatcgcagccacatgggttgacgtggccgccacaatgcgcgcgcggggtgcccccgtcttcaggcggggtggtgaatcgcgcaaggcctaccgtcattacaggccaatgtggtaaaatagttgcatgagtcagaaggtcgtaatcaccagggtgagcctgcgcggggccgcacccttcatcggcctgaccaacaccggaacccccacttacactcgccagcccgaacgcgtcatggaatggttgtgcgacgggtggcgctacaggttcaacgcctttcgatcacgacgcaaaaaatacggccccggaaaagcccttatcccactgggaacccccgacacgcgcaccctcgcccagacacgccaggacgaacccttcatcgccgccatccccacactcgtcgcagaatcagcagaaaaaatcgaaaacacgcagtggtggacggcaatagcgcgccgggaaacactccgcaaaaaaggcgtcaaaccagggaaaaccccagggtggaaacgacgaaaagacggcctcgggttcgtgtgctggtacaacggcggacgcaacgccaggctccaccgcacaggcagaaaaacaggaatcgtcaccatcaccgggcaaaacccaccccgccaccgtgacacgggagtgcgcttcaccatccgcatccacatcacactcacccaggacatccacccctacacgtccgtcaacgtcaactggacccgccgcacactcaccttcacgtcacgccccacagaatccacgcgcacacccaccggacagaaaaccggaattgaccgtggagcaatacacaacctggccaccgcgcaaggtgaattttacgacctccctacacgcagactggcaacaattgaccgcaaaatccgcactcaccaaaaagcaatggcacgagccgtcaaaacagccggataccctacccagcgcgaatacaggaaagcaggagtatcaaaacggttcgccgcacacgacaaagccgtccacaacctccacgccaaagcagcccgcatcgtcactgacacccagcacaaagccaccacacaactggtccgcacctacgatgaaatcgcggtagaagacctgaacgtgacagcaatgatgcgccgaccacagtccatccccgacccgctccacaaaggccgctacctccccaacggcagagcactcaaacgcggactgtcacgctccatcgcatccgcacggatctcacaggtcgcaacacttcttgaatacaaagcccacgcggcgggcgtgaccatccatcacgttcccgcctactacacatcccagcgttgcagtgaatgtggggtgatcgacaggcgagcccgcgagaaccaagcgtgctacacgtgtcgcaacccccagtgcgccaattaccgcgtcactgtcaacgctgacactaacgccgcccgcaacattgcatgggtcgcgttccataatcacgggcgaggactatcgcctggcgtggagggaatgtcagacgggacaggcgagctatcgcactgcccgcagtccccgcgaagcgcaaacctcgggaagctgctccactagcagcgcccggaatcccctcgccttcaggcaggggaggatgtcaacaacacgccctggttcgcttccggtcccatggccctacatgcagccggactaaacgaagtcggcggagagcacattttctacaccacaaaagtcgatcaggtcgcaggtgtactgagcgacaacgccgaacacggcggacacgcctggattctccccctcaccccactggtgggaaccggcacaaccatactcgcccccctgcaacggtgggtacgtctagggtgggcgctcgttgacacaatggcgaccgagtgggggcacgaccatgtgaacacaattcgaacatgggaggaagcacaatgacgcgacactccaactaccagcgaggctccaaccagtaccgcaaaatccccaaaccgcagcgccagccagcacagattaacgagagccacatggtgggtgttgaccgcgccgtgtaccgatttcgcgcaactttcgacgagcacgtgtggacagcggcaaacagggaaggctcaacgttcaccctgtccgaagtgcgtacactcatttccggcatcagtgtgggtggtaaaagcacgcacgagacggaggaagtgctggggctcatccgcgccaacgagtacctggcgagcgttgtcgagagtggagagtttcagatggggcgcgagcagagcgaccgcattaatctgatggtctcgcagtattcggttctcgctcccggtgttttcaggggcgaaggcgatattggcggcgacggtggacacgttgcgcttgcccgtggcggcacgtacacggctccaccgcccagcgaactccccgctgtctaccacgaaatagtcaagaattgtcaaaaagttcgcgaccccgtggaacgggcgtgcctgtatttctgcctcgcatccagggcgcaactgtactgggacggcaacaagcgcacgagcctgaccatagcgaacggcaccctgctcagccacgggtacgatgcgatactcatccccgccacagaccggctcgaatacaacgaactgctcgacaggctgtttgccgataacgacacggactccatgatggtcttcctggccgaacacgccacatactaggccgtcccacaaggaggggcatggaactggaaatgatgcgcatgttcgggctcaacccggacgacccctcagactgtgccgcagcactcatggcgatcaacgcctacgagctgtgggaccggctgcgcgaaatccgccacacccaccaggtcagcatccagcacgtggccgacactctgggctgtgacgtcgaacaggtggagctgctggagaacggcggcatggacgccacactcaccaccatccagctgtatgcgtgcgctgtgggggcgtgcgtacaggcgtgggcggaacctgttggcgactcggcagcatctcgtccgtgacgtccgtgcgcgggcagttggagcacgcctagcgtgtgcacagctccctgaaaatgaggtcaaacctcttcaggcacatcatgaataccagggcgcagtgagtccctatcacggccaccaatacgcggccccaccacacaggcgggacaaaactggccacacaggcgccgcacagtgcgaccaggacgctgtacaccaggttggcgaacagttcgttggtgttcttcacgatacgctcgggcattacccattcgtcgcgcattttcagtcgaagccagaacacgaagattgccgccacgaaagacgccagcccaccgtttgacagtcctccagtcacccccgaccccaccagtgatggtacgaacaggccaagcgggacgcccacgacaacaggcacgacgtagaagatgagaatgtctgtggggctcattcgcgcggttctcgcgtctgtgagcgttgcaaggtgctttcggataattgccgtcattgagattttcaactgtgcctcctcacccgtccttgtgggacgagcacccagaactggcacccgactacagagttcttcccgccgcgtccacaaggagcggagagtccttgcgccgaggtcttgaaaagacggctcaattctcgccttgctctcttaccgggatccggtcgacacgttgggcagcccacacattttcagcgtggctggaggcttcgatcggatacgggttgttatcggggtcaacactgaggggaacgctgatagcgccttccaactcacctacactgcgtggcccctcataatcggctgttgaagtcatgatgatacaggggcgctcgtaacgcatggtggcatccttgttccacgcttcgtggccgtccgagtcaagcagcaggtcagtggggtttgtctggcctgacacgctgaacgcaatgtcttcaccgtagtccgtctcgtccatttcgtcgaccatggcggcaatggtggcacggttgtgttcagtgtcgggaatgccgaggcgctgaaggctgtccatggttgtgctgaacaggtcggctttcaattgctcaaggggaacatcctcatcgtcggggacgctgacctcgctcaggtggtgggtgaatcctgcgcggtctgtctgtccggcaagcttttcgatcgcgccttggtccatgtgtcgggagtagaagtcgcgcgcgtcgaacactagcttgttttctcccccggcctggctcaccagcgtgtcccattggtcgggggtcatggactcgcgcagctcgccgagtgcccggtcggtttgctcgtctacgtggtcgaattcgtattcgagaatgtgggagtaggcttcgatgttggcgccaccgtgtaggagctcgtctagttctgcgtcgctgaggtggtcttgccagtcaaagtcggggccgtaggtgtagaagtcgcctccgcgtccgtatgagtagttgtcgaacacgcgggtgaagttcactgtgccgtctcgattcataaagtcggcggctgcggtcacgcccgtatcaagcgcgcttccgatctggtcgtggggttttgtgtcgaactgcccgccctagggtgacccggctggcttacggggctgaaatgagttggtcatgggtgacctagttgcggccatggctgtacgctcgggttgaccagcatgaaagtggggcgagctgatgcccgagtgagtggtggggcgaaggtcgccggtcaatggcacaggcagttcgtggtggccgtgggttgagctccagcgtgccaaaacaccacggcgaaagtccgtgcggctggaacaaaacgcttgggctgagcgggctatggagcgggctgtgtgatcgtgctccagtttttaatcgataccatcgtgcgggcatgannnnnnnnnnnnnnnnnnnnnnnnnnnnnnnnnnnnnnnnnnnnnnnnnnnnnnnnnnnnnnnnnnnnnnnnnnnnnnnnnnnnnnnnnnnnnnnnnnnnatatcagtgggaagtgtagagagaacccaacgagttggcggcgttttcgatggtgaagtcttggagcccggcgtagttaagacggaccgcctgccccgtgtggttgctgatggtggccttttcgccttccgtgtacgtcaggtcgagttcgtcgatgaacgagttggaaatggtcatgtggctgatggtggattcacacagtgacagttcgtcctggctgagcccgtcgaagtccattccggtcaggtcgtcactttggtattcgtaggggtcgatctcagtggtgtggggtttgtcgacgctgacgctcacggctgcgtggggtttcgtgtcgaactgcccgccctgggggctaccggctggcttacgaggctggaatgaagtggtcatgggtgacctagttgcggctaagacagcacgcctaggttggccagcacgaaagtggagcgagctgatacccgagtgagtggtggggcgaaggtcgctggctggcggcactcgcagtcagtccatgaccgtcgcgcttgagagtggagcgccccagcaggccagggcgaaagtccctgcggccatggttgtacgctcgggttgaccggcacgaaagtggggcgagcttcatcccgtgtcaccactctggtgcaggtcaccagcagaccggaaccggaagccagtccatgaccgccgcgcttgagagtggagtgttccagcgggacagggcgaaagtccctgcggctgaaaagacgcgcttcggggaaacaatacgaaagctgggcgggtcaacacctgagaaagcgcaggtcaaaactcgttgatgcccgcatggatggaaagaccagacgcctttcacgccctgcccctcgtgggtgtgggtaattgacccacagcgcgacacgccaacactccacccgttgacacacccacccacactcctatactggacagcgtagagaacttaacaaggctcctgccaatgttcgcggagctgactggtcaaccgggtactgtgaagtgcccggttacttttatgaccgccacgtcccacaagcaggggcatgaacgaaaacacgaccagctaccgtgtcggcatcgacgtcggcacccactccatcggcttcagcgctatccaaacagacccgacaggcacacccaccaacattctcacctccaccagcttcatccacgacggcggagtcgaccccgaccaccacaaggccggtgacacgcgccgcgccgtctcggggacagccagacgcgtccgcaggctcatgcgccgcacacgaacccgcctcgacaagctcgacacctttcttagcgacaacgggttccccatcatcaccgacgccaccgaaaacgacccgcacgaaccctggctcatacgcgccactctcgccaccacccccatcacatccgccacccaactcgaccaccacctgtccatcgccgtccgccacatggccaggcacagaggctggcgcaacccctaccaaaaagtcgacaccctcctcggtgacctccagccctcccccaaactcattgaactcaaaaaccgcgtcgaagaacaccttggagcacgcgtcggcgaacagtacacgcccgccacgctcatctgcgccatccttgacgccgcacccaccacccccatcaggggggcggacgggatcctcgccggaaccctccaccagtgcgactacgccctggaactgcgccgcatccaaaacgttcaacacctcaaccccacactggtcgaccagctcatccgcctcattttctccatgaactctcccatcgggtccgctcgccacctcgtcggcaaggacaccctgcccggcatggaaaacgagccacgctgtgaaaaagcccaacccgtcttccaacgcttccgcattatccaaactgtcgccaatctgcgcgtcctagacggcggacacgaacgccacctgacgcgacgagaaatgaaccaggccgtcaccttcctgtccaccgccacacgccccacgtggggtgacgtggctgacacgctcaccattgaccggcgcaacctgacaggaacagcccgccaaaccagcgacggagaattcctcgggacacacccacccatcgaccagacacgggccgtcatccgcgccctgaacatccggcccctcaccgagtggtgggacaaagcgactgacagtgaaaaagccgcattcattgacgccacgtccaacgtggggacagacgccataaacgaggacgcgctggaaagcgtcaacacgctgttcgccagcctggacgcctcccagcgggcaaaaatagacgccgcccggttcccgctcggaagggccgcctacagtgccgcatccctggaaagactgtgcgaacgcatgatgcacgacaacgttgacctccatgaggcgcgcgccagagaattcaacgtgcccgacgggtggcagccgcccgcagacccaatcggcacgcccacaggcaacccgaaagtggatcgcgtgcttaaacaggtggcacggtggctcgccgccgtcacgcaacgctacggcacccccatcagcatcaccattgaaaccgccaggggtggactcaactccgaaaaggtcgcccgccaaatcagccgcgacaatcagaaagccgccgaccgtaacaggcagctcgctgaccgcgtgcttcaactgacggggcaagacggcactatctcgcacgccgacataacgcgcatgaggatctgggaccgtcagggtggagcctgcctgtactgcggaacccctattgctttcaccgctttcgagctggatcatattgtccccaggtcggggcccgcatccactaaccggcttgtcaacctggccgcagtgtgccgcacctgcaaccatgagaagggtgccaccccgtttgccgcgtgggcagacggatcatcgcgcaccagcctgggtgagacggtcagtcgcgtcaaagcgtggaagaacaccgaccggatgccggtcaaagcattcgccactgtgaagcgtgacgtgatcgcccgactgaagcgccgcaggcccgacgagccgctggacgaccggtcattggaatccgtcgcgtggatggcagtcgaactgcgacaccgcatcgactctcactacggtgggacagtggatgtgcgtgtttatgccggtcatgtgactgcgagcgcgaggcgtgcgagcggcctggaacgtgatattcgcatgattggtggtggcgggaaaacgcgcctggaccgcaggcatcacgcggttgatgctgccgtgctcgccatgatgagacccagcattgcccacacgctcacgatccgcgacaacatgcgcagggcccaccagttgaccggcgtggacaatcagtggtgggagtttgatggggtgacgacgggtgatcgtctggtgtggcatgagtggcgtgaccacatgcgggtgttgaccggattgttaaacgagaaactggacaacatgacgatcccagtcacgatgaacgtgcggttgagcgtgccgaacgctgctgctcacgacgcgacaatccgtcccctcgaccgccatcgggtgggggccgcgtggactgttgacgaggttgacagggcgtccaccccggcactgtggtgcgcgttgacgcggcaggatgatttcacgccgggcgtggggcttccagccaaccagaaccggcgcatcatggtgaacggcaccccgtttgaggcgggcgatgaggtgggcgtgtttcccgccctggcgtctgctgttgcggtgcgtggcgggtgggcgtccattggcgggacggtccatcactctcgcatttaccgggtgggtaagcgtttctaccagttgcgcgtgttcgcggttgatgtggcgcgctccggtgggcgtgacgtgttcagcatagagctgccgcccaagtctatttcggttcgcacggccaacgagaaactgcgtgaagcgttggcgcgtggggatgccgagtacgtggggtgggtggttcgcggcgatacgctccgcctggagtcgacagatttcaaggccgcgaggatccgcacgtttttcgacacgtaccctgtgcgcgagtggacggtaacggggttcgagtcggctggcatgatgaatttacgccccactcttctatcaagtgaaggactgcctgatgatgcccccgacgatgtgcgggttgtgctgaaacggtgctggagggtgagcgtgaatgacttgatgacggtggggcacccgagcgtggtgcgccgtaacacgctgggcgaggttcgcatgaaggacacgaaattgcctgccacagttcggctggcctaagacaccgtttgggcgtgggcacgaaaaaggcggctcaacactcacttttgcgagtatcaaaccgccacttttcgcttgtatcccgccgaaaaccggtgccagtatatcagtgggaactgtagagagaacccaacccctagttgatggtgacgccgtgtgtcttttggagtgcgcttagggtgtcctcgtcgaactggcagtcggtgaatgtgacattctgaaagtcgatgccctggaggtttgccccacgcaggtcgcactttttcatctcacagtcctccatggttgcgcccgacaggtcagcgctgcgaaaactcgaattcgttgcccgcagctcacacaggtgcgacttcgcgagacgtgacttgctgaagttggtgtttcgcaccgatgtgttgagaaaccgtgcgcccatcatgtcggccagcataaaattcgcatggtcagcctgactgttcagcatggagaagtttttcagcgcggaaccactgaacgccgtgtcggtaagcgaactgtcctccaccgcgattgagtcactgctcattcggtacatgtccatcgcgtcagcgtgcacgcggttaaacgacagtccctcaacgttcgccctggtcatgtcaaccgcttcgagtgacccgccattgaaagtaatgtccagcagtgtggagtcgcgcatttccacattactcacgcgcccaccgctcaagtcgagagtgttcagggttgcgttattaaactcgcaccgcttcatggcgtagtcacggaactcactgttggacagcgtggagcagtcagcactcagattaatcatccgcacgccccgaccatgcaccttgttgatgtaggcgcgctccattgtgcagtcggcaacatgcgcgccgtcggcttgcaggcgggtcagtgacgctttgttcaaggttgaagacgaaaccgttgcgccgtccagtgtcgaatcggaaacatacacgccgtccagggctgtcccgccaatatgtgtgcagtccagaatagtcttggtgacaatctgagacgagtggtctccctgaatgtcctcgccggtgaaatccttcgcgtgaggcttatcggtgtcgcccatgttcacgtccacggcggtgtggggcttggaatcgaactgcccgccctggggtgaaccggcaggcttgcgaggctgaaacgagttggtcatgggtgacttagttgcggctaagacagcacgcctaggttggccagcacgaaggtggagcgagctgatgcccgagtgagtaatgaggcgaaggctggttttcacgcgccactggtagacagtccgtggtgggagcgggtcaggctctggcgtgtcagaacactaggacgcaggtcatgcggctggggcagcgcgggctgtgtggtcgtgcgccgatttttgggatcgaatcgcccgtgcgggcacgaaaaaggcggctcaccactcatttttacgagtgttaaacnnnnnnnnnnnnnnnnnnnnnnnnnnnnnnnnnnnnnnnnnnnnnnnnnnnnnnnnnnnnnnnnnnnnnnnnnnnnnnnnnnnnnnnnnnnnnnnnnnnnggacgttcaccagtatatcagtgggaagtgtagaaagaacccaaccgccggagccggtcgcgaggccaccaaaccagtatatcagtgggaactgtagaaagaacccaaccaactaatgactggcgtccggcgagtcaaccttcctgcgcgtcacactgctcgcagccttctcccccatgatgttcgtatccacgtgaatacagtcctcctccaccatcaaaggcgcgctcagcgtgccggacacatacccgctccccacgggtccatactcatacgaataggaatcggaccgcatttccacgtaaggccgctcataatccacagtggaatcccaccaccacacctggttcccctcctcgtcacacagaaggtcggaggcgtccgccctgcccgccacactaagcgtcagccccccacccaggtcatcgtcgtcaatcttgtcgaccatcgtgcgaaccgctgccctgttctcagccgtgtcatcgacacctttcgccacaagctcgctcatcacacgatccgtgatagcctcacgcatctcatcgggctccatttccagccactcgtccgtgtcaatagtgacaacatcatggcgaaaatcgacgttcctggtgaggcgaaccagctgggacatcgcgtcctcgtccatgttgtccatgtagtattcgcgggcttcgtcctccaggagcgtcctgtcgccgtcgaagtgcctgtcgagtagcgcgtcccactcttcccaccccatggattcttcccacgcctcaagcgtttcagtgaccttctcatacacttgcgggtaggtcatgctggtgaaaatctcataatccaccgtgctatcaggatcaccctggaggagagcttccacctgttcgctgcgtagctgatcatcgtaatcaacgtacacgccgaacagcctgcggttatcgtccggcccgtaggtttcctcggcaaagattttagcgaagttgacggtaccgtcggggttttccaggtcggatgcggtcacgcccgtatcaagcgcgcttccgatctggtcgtgaggtttcgtgtcaaactggccgccctggggtgaaccggcgggcttacggggctgaaatgaagtagtcatgagtgacctagttgcggctgaaaaaaaacgcgctcaggtcgggtagcacgagcattgagtgggctgaaatcgggtaacaactttggcgcaggtcggcgattaccagcactcgcaggcggtccacagagggcgtcagctgagctccagcccactaagagcacgggtcgaggtggactagcataacccgcacttgaccagctgttggtatgccgtttactcgcgtgggtggtttttactcaaacccgttggttacggtgtgtttgttttatccgcagggactttcgccctggactgctggaacgctccactctcaagctcggcggttatgaactggcttccggtctgccgatgacctacaccagggtggtggcacgggttgaagctcgctccactttcgtgccggtcaacccgagcattttgcctcagccgcaactagaacctccatgactacttcatttcaaccacgcaaaccagcaggcagcccacaaggcggacaattcgacaccaagccgcacgaccagatcgaaggcgacccgctgaacgccccctacgacacgtacgaccacggcaccgccacctacaccgaaccgccctacgtctccaaaagcggcagaaacctcggactctccttcggcgtcaaattcatccccatccccgacctggaccaggaagccacacacgaacacgccgaccaggcacgcgaactcagctacgcgttcgacaccgaccacgcaaccaagaccggcgacaacagtggcgtcatcacctacacgagcgaagcaaccgacgcccactacaccatcgcctacgacccagaaggcgttgacctgacgatccgcgacgacgggtacgctgaagaacaccacattcgcatcaacggagaccctgaaacaatcatccgctccatggaagacgtgacctccacgtacgctgacaacctcgatgagtggagcagcgaatacgacgaccaggaaacatacgaacaggccgcatacagaaacgcggtcctgggacgctcaggcttctagggcgcagcgcgcacaaaaatccggcccactcttaaaaggccacgcggaaaaagagtgggccggacgactatgcgtgccactaaacgctggggaaagcctccacggcaaaattcaccagagcatcacgcgtcacgcggagcgtttgggagccaagacgcagtgcgggtagcttatgggcgtagatccacttgtacacgccctgctcactcacgcccaggatggacgctacttcggacacggaaaacagcacctggtcgggcttgtagccggataggaaattcatctcactcatattcccgcttgtgggacgaggcgcactctcacgcaccaacccacgtcactccctccgtgctgtaggcgacctgctcaatcttgcggcggtacgtctcatcaatcgtcgccccactcacgtccgcgtcatcaaacagggcaccgtccagtttcgcacccttcaggttcacgccccgcaggttcgcactgcgaaaatccgcgcggatcgcgcttgcgccacccatgttcgcgccttgagcatccaccccgaccatgcgggtactaatcatgtccgcctcacgcaggtcagcaccggccaaagtggtggtttccgtgatggaagcctggttgaggatagcgccgcgagcctgcacgcccctcaggtcgcagttgtccaggtgggcgtctgacaggtcgatgtattcgaggtgcccgctgattgttgaatcatagaactgtgcggaccgtgcactcacgccggaagcactgacgttgaggaactggctttcgcggatggtggagccctccatatcactgttgacgaggcgacagtttttgagtgtcgtgtagccgatgtccatgcggcgcatcatggagcgcgccagggacacgtcggtgagggagcaactggtgaccgtggatccgtcgagttcagagaaggggaagatggagttggttgcgtccacctccctgaacgtacattggcgggcacgcatggctgtctcaatgacgtcattgacggtgacggaatcaaagccggagcggtcatagtcgtagccggttcgcgtggtgtgcgcgtattcaaggtcgctgaacgcatggtcacactggttggtcgggttgatgccgtcggtcgcgtcctcttcttcttcgcctagtacgaggtcggaggggacgtgcggcttggtgtcgaactggccgcccttcggtgatccggcgggcttacggggttgaaatgtgctcatgggtgacctagttgcggctgggataaaaaacgcgtgagtcggaggtgcgaaagttggtcggtctgtgtggtcatgcgccagtttttgaatcggaaccccgcacgggcatgaaaaagggcggctcaccactcatttttacgagtgtcaaaccgccacttttcgcttgtatcccgccgaaaactggaagttcaccagtatatcagtgggaaatgtagagagaacccaaccgtccggccttgtcccgtacgagtccccccagtatatcagtgggaaatgtagagagaacccaaccggtgattcgacctccgtgggtttcttcctagaatatcagtggattacgtatagaaggaccaaccatagcgcaaaatctcctagcagtttctccgtatctcggtgagaactgtaccgctccacgctgagatggatacacagacgagctatgtttcgttttagacaagccagagtctaaggtgactccaattgtcgggcgctcctgtgcgtgccagcggaacaatgggattatcagggtaggtgctaagcaacctgggcagcttatcagcaggcgacagttttagttggcggtgcatatactggattaaagacagttgcccaaaaactcgatttacctgcacggtggcttccaacaattgaggatcgttatttagcttgggtttaatgtcgtagacacggttgaacatacgggcgtgatgtgctgcaaggttgcgaaggatgttcatagacttgagccacgattcgagctggggagcgctcagtccacagtgatcggcgattcggtttcgtgctgtagttggcgacataccgtacaggtgagacagcattccccagtccataacttcaacagcagcccatatagggatcgctccaccatacttttcctcatgatggcgaacgaaatcctctttcgagttctctacggcagactcgtattttgatagccaaatgctatgcactgttttctggcgccccctgagttgccgagcacgtgcacctaatcgtttcgtgttcaggtggatcattgggtcaatactcccaagttcatggcccaacatggctcttactgccatttcgactcgatcaagttcagcaaaaactgtgtgtcggagacgctcatcgaattcgtaaagggaaagaaccagttcaaacgaggaacccccgacaaattcgtcaagcgcttgaccgtcaacaaaacgacgcatggggtgccaatagccagaaagccggtagtagttcagccgggcaagtgtgctttcggcgccagcacgatcgtcaacacgcattcctcgcgcgcgaagtatgtcaacttgccttgagtgagtctcgaatgtttttgcctgcgacatcagcttgccccgttcggcatcctgaaagcgaagaccggccctggacttcccaccgagatgggaagcggaaccggtcgtgttactaattatgttacgtcgtaaaacagaatttatcaatcttcaccactgggagtctccccgaatccttggaaggagttcatcaagctggcaagcggaagactttcgaaaaccattgacatctatagagagcccggccaacgtaaacttgtcggaaaccccgaccagttgccggtgtgtcagtgcgaacgaaatcctccagtgagtacgacagttttccgttccccgcacgggcatgaaaaagggcggctcaccacnnnnnnnnnnnnnnnnnnnnnnnnnnnnnnnnnnnnnnnnnnnnnnnnnnnnnnnnnnnnnnnnnnnnnnnnnnnnnnnnnnnnnnnnnnnnnnnnnnnnagtatatcagtgggaaatgtagagagaacccaactaatagcgcgttccgaccttggcattttccagtatatcagtgggaagtgtagagagaacccaactaggcgtttggcgacgtaattttggctttccagtatatcagtgggaagtgtagagagaacccaacaacgtgacggcggcgttcgcaacagtgaccagtatatcagtgggaagtgtagagagaaccnnnnnnnnnnnnnnnnnnnnnnnnnnnnnnnnnnnnnnnnnnnnnnnnnnnnnnnnnnnnnnnnnnnnnnnnnnnnnnnnnnnnnnnnnnnnnnnnnnnnatatcagtgggaagtgtagagagaacccaacccgccgaacagtgccaagccttcgtattcggtgtgtcacacgttcgtcaaaacttggtattgtgttggtcactcccgtagaacaggtcactcatggcttgggcgagcttttgctgtgtgtcctcatcggtgtgcgtgtaccgcatggtgatgtccgctcccctggcatgccccacgtagcgtttgacgtccatctcgttgaatcctggcagtcgtagtgccagtgtgatcgcggtgtggcgcaagctgtggggtgtggcgtgttccagtccggctctgtccagcactcgtttcatggagtcgcgtagcgtgttgtcgggcagtgggtgtccgggtttcattttggattggaacacgtagtcgtcgggggcgtatgagtggttgttcacgtggtcgcggagtgtggcagccagccccgtaccgaggtggacgtctctgactcctgcgtcggttttggcacccatgtgggcgtcttggttttttccgctgccggtgacaacgtggcggatgtgtatgacgttgtttttcaggtcgaggtctttgaaacgtaggccgcgtacttcttcggtgcgcattcctgtgacggccatgaggtggaaggcggggcgctggtagtcggggacggtcgtggcgatgaggcgggcttcgtccagggtgagggctcggcgttcggtgatttcttcgtagcggagggcttttttgtcgaggtttttgaccagtgcgcgtaggtatcgcaggttggtgggcgctttggtgatggtgccgtctccttcggcggcgcgcatgatttggacgaagatggcgtagacgtggcggcggttggtgacagagagtgtggcaagtgtgtgggtgatccagtgttcgatgtcgggcgcggtgatggtggtgatggtgcgtgtggcccagtgggggtggatgtggttggcgtagcggttgcgaacggtgcgtgccgatgctttcgtccagccgcaggttgcgaagtagcgttgggcgtattggtcgaatgtagggtcgggtgtggtggcggacagttgttcggggcttttccatctgccggtttcgatgagggcttgttgggtgcgcagccattggtcggcgtcggatctgcgcgcgtaggtggtgggtgctgtgacgcgcgtggcggggttgtgtgggtgggggaaggttgcctggtattttcctgatgggaggcgtcggatgtttccgaattggcgtctggctggcatggttccccttttttcgtgcaatctacgtgcaataaggttttagaaaactatcgtaacgtggggtaggcagtctaatgtgcgcgacgcacactttcgcggaatatggcgggtaaaagtcgacttttcggcgtggtggtggggatgactgaaacggtggtgctgtgggttcgaatcccacccggggtacagaagtattcggcattattcggctgaaaactccctcgacgagggcgtttggggtgcgtttatcacaccagttggaatcacccttctgagctgtgtttcactgcagtatccgctcgtaatgggatggaaaaagtcctgcagcaggctacgacaatgtgaatgtcttttcacccccgaagcaagaaagatctcactcgatacggccgagaagcagggcagcgccgtggaccaatggaacacaaccgctgcgcctggtcacattcccagcaaactgacaggtggaatgaagtatctcccaagaatcgtttcttatgctcaagctatccgagccggacagaacatgaagcacgacacgtgctggtgcgactggccgttacgctcggggatctgaaggaaggggctctgttttcgaaggactcgcactgtgttgatgggatagtgttgggggtcggccacatgtggccgacccccaacactgcgtctgtggtagctttcccttatgcagcttcaatgagttcaagacccagaaagtctgctgcagcgatgcggctggcaggcacacgcagagcctcgatggcgcgacgtacgtcgccgttcgtgaaatcagcaaaccacgggcgtaccgcattggaaagttgatcaagcagaacgttgtttgcctgccgatccgaattccggtcatggactgacacggtctttgcattgcgatcttcaattgtcatatttctatcctcttcttcttcctcacgccataacggggtatgtactctttgcgcacaggccgccccgtcaggcattcagttctcaatcacactcgcccacccctcatcaggtggaaagtgtgaagtcatatcagcgcaactctcaacaccaggttgacagtttgcatccacgtcaacgataacacatcatcgggtcgcgtgagaataagcctcggcggccgttagagaaaacgtcctccccgcagcatcgccgttgatgctgacggctcgacgcgatcatctactgtctgcccagcattccgactcggccaccaatggagtaatcaatatcgtcacccactgagtgaacacgaatcaggttcgacgagcccgacacgcccggcggcataccggccacgatgaccagctggtcaccctgcttacacagcccggctgtctgtgagatttgatcgacctgccagaccatgtcatcggtgtgcatcaccgagggcacacggtaggtctgcactccccacgtcagtgccaactgcctgcgtgtctcttcgagcggcgtgaaagccagcattgggatagggctacgcagacgcgccatatagcgcgccgtcattcctgcctgcgtgaaggtcaccaggaacttcgtatcgagcttctctcccactgacacggcggcctgggagatcacggccgagcggtctgcgatgaaaccacccaacggcgcgatgcgctcaccaccgttttcttcgatgttctccacaatgcgtgccatcgtgcgtacagcct

SEQ ID NO: 874 - DNA, 23099 bp, synthetic construct
  misc_feature 1..23099: note = Synthetic
  source 1..23099: mol_type = other DNA
gggtgcagtttctgcgccatcaacgcacaccagggcaagttcatcgcgagccgcagccgcgaaagcatcttgcgcgaagtggatttgattaccaagatggacggctttgccggcaccatcaccgacttgggcggcccgagcgccaatatgtacaacatgcgcggccgtgacccgagccgctgccagaaatgcgcccgagcaagttgcctgaccccgaaagtctgcgacaacatggacacgcaccaccacgagcttctggagctctaccgcgaagtgcgcaaccacccgaaggtgaagcacctgttcatcgggagcggcgtgcgctacgacatgctgctgcaagagaccaacgacgaagaactgcgcaaggaccacgaggaatacgcccgcgaactcatcgactaccacgtgagcggacgcctgaaggtcgcaccggaacatacgagcgacgaagtcctgaagctcatgcgcaagccgagcttcacgctgttccacaagttcaaggaattcttcgacgacgaatgcaagcgcatcggcaagcgccagcagataataccttactttatcagtagccaccccgggtgtaccgaggccgacatggcggaactcgccctcgagacaaagcagctcgggttccagctggagcaggtacaggactttacccccacgccgatgacgattgcgaccgaaatgttctattccgaactcacgcccgacggaaagccgctttacgtggcaaagacacccgagcagaagcggagccagcggcagttcttcttctggtacattccggagaaccgcccgcaaatccgcgcgaccttggaacgcctgaaactcgggaaaatcggcaggctattgctgagccgcagcgcgaaggccgaaggcaaggaattcttcccgagcaaggagcgcgaaaacaattcggaataccgcgagcgcgaacagcacatgcgcagcgagcgtgccaacgcactcatcccgaaaaaggaaaagccccgctggacagaagaggaacgcgaaaagttccgcagggagcgcgaagaacgcgccgaacgccagcgcagggcaaaggaccccgcgttcaattacgggcccaagaagaaagtccgcttcggcaagaagagcccctggggaaaatagggcttataaatgcaaaagggccgccgcacgactgcgacgacccgaattttttttgcagactgggttaccgcttgccttcgcgcttgtagcgttcgatgcattcctggtaaaagtcgtacgtctgcttggcaatggacttccagctgaacacgtcgatagcgcgcttgcggctcacctcgcccatcttcttcgccagttccgggtcaccgaggaccttgttgagcttgttcgcaaaatccgtctggaaggcaccaggatcggcgggttcgaaatccgtctcggatttcgccttgagtggcaccaggaatccggtctcgccgtccacgataatctcgggaatgccacccaccgcagaacccaccaccggggtaccgcagctcatcgcctcgaggttgatgataccgaacggctcgtagagcgagggcgtcgcgaaaacggtcgcatggctgtagagcacgcgcagttcctcgtgcgggatggcttcctggatccacaccacgccatcgcgggtcgcctgtacgccttcgataagcgacttgcattcatcggcaagctcgatggtatcgggagcgcccgcgcagagcaccacctgggcgcccttgtcaatctgcggaatcgcctggataagctggctgattcccttctggcgcgtaatgcggccaacgaacagcacataggggcgcttcgggtccacgccccacttggtcaaaataccttcgtcgaatgtcggcgcataaaagtccgggtcgatgccgttgtagataaccttcacgcggtcttcgggcacgccgtaaagcttcatcacatcgcgcttcatgccctggcttaccgcaatcacgccgtcggcagcctcgtaggcagtgcgttcaatccagcagctcatggcatagccgccgttgcccagctgttccgccttccacgggcggtgcggttccagcgagtgcgtggtgaggataagcggacactgcagaagcctgctcgcgagcacgccgccaaagtggctgtaccaggtatggcaatgaatgacgtcgatgtcgtcgagttcggcagcccactggaggttgatatcgagcggcttgaaaatcttctggaagcggtcgtccttagggtccaggcccagcttgcgcgaaaaaccgagagcgcggatattgtcctcgtcgacatcctggtcaccgaagcagcgagcctcaatatggcagagtttcgcgagttcctgcgtcaggaacttcacgtgaatgccagcgccgccgtaaatttccggcggaaactcattggtaagaatagcagcgttcatacaacaaatctccggttacaccattaaatttactttttcgaggaattgatggtcgccatgaattccgcgcgggtcttctcgtcggtcttgaagcggcccagaagctgggtcgtgaccatcgtagcacccggttttttcacgccgcgcatcgtcatgcacatgtgcgacgcctcgagcaccacggcgacacccctcgggttcagttccttctggatgagttccgcaatctggcgggtcatgcgttcctggatttgcgggaagcgggcatagaactccacgacacgcggaatcttggaaagcccgacaacgcaatcgccgggaatgtacgccacgtgggcgcgacccgtaaacggcaagaagtggtgttcgcacatgctcgcaaattcgatattcgggacgacaatcatctcgtcgtacttctcgtggaagcgtgtcttgagaatatcttcggcgcgggtttcgcccgaaagtcccgtcatgagttcagcatacattttcgcgacgcgcttcggcgtatcgataagcccttcgcggtccgggttttcgcccatgccttccagaatcatccggaagccggcagccatcttttgcatatccatcatgtgcacaaagatagaaataaatgtattttgataccatgacaacgccgcaaaacattcccgacccgatggcagtgcacccgattgcgggctacgacaaggaaatctacgtgaagccgacgctcaagaacccgaatatcatcgtgggcgacttcacctacatcgccgacagcgaattcgaaagccacgtgacgcacctatatccgtggaacaacgacaagctggttatcggcaagttctgccagattgcggcgggagtggagttcgtgatgaacggagcgaaccaccagatgaacgcggtatcgacttttccgttctacacgcttgcaggctgggacatgaaggcgcccgcccctgcggacatgccgctcaaaggcgacacgattatcgggaacgacgtgtggattggccagaatgcgacgatactccccggagtgcatatcggcgacggcgcgattatcggcgcaagcagcgtcgtgggcagcgatgtggagccttacacgattgtcgcaggcaacccggcgcagtttatacgcaagcggttcgacgaggaacttacaaacctgatgctcgaatggcgctggtgggacaagcccatcgaagaaataaatgcgctcatcccgttactcacgagcagcgacttgacagaagtcaagaagaaaattaaagggttgctcgggaaagggtgacctttcgcacaaaatcacagactgcgaatagtctcttcagagagatgggtgtaccgagaaattttgtcaatcggttcattatccgcaagcatttgccttgccatttcgagttcacgttcggagacaccttcagctaccttcgcgttgatttcatccgcgaattcctcaaagaaacttgccctcaggacattgtgatcccatttttcgtggaacatcttctggtatgcctcgaattcttccttactaaacttagacactttggagctttctgtcaaggattcgaacttgcgttcgtctagctcagcgggcagttccttgagcttgtccagatagcgaaagaaaaaaagccacttgcgaatgctggatgacccagcctcaatgaagaagggcaccttcgaaagttcaaccgccgtaaaattgtacgaatctacaaattgctctcctgtttcaagatccgtgaccgtagcacgatgaatgatacgatcgtcatcaaacattctctgtcgagtaaaggcaatgacataagtcggcttgacatcataattccaatcatcgcccggatcagcttggttggcaaccatctcgccagcataaaaagcaagccgcttcaaaaaattgtcctgcttacgaatctgcacctcaatctcaatcagattatccatgtcatccttgcaatgcaagtcgaaaatcgccgtgcgcgacaccttactcccgctcatattgtgcgctacgttgcgcgtcttcactgtcacgattggccgcttaagctgcggttccagcaggtcgtttaacaggttcacgagattctgccggctgacgggcttgtcagggtcaaatgccttcttgaaggcgaaatccacgagaaggtttgcaaaagggctcttttcgcccggcttcacgatgcaatccttgagaggcttgcgcttaatctttttatggttttccatattatctccattgtattaaaaacaaaaatggaccactccgcaaagcggaaaatgatccataataccaccttttctggtgtttggagtaatatacaaaaattacacgaacacgacttcgttgccgacgcgcggagattccgcgcggttcgggaggccactctccgtatcggcgtagccgatggcaacggaggcgtacacgcgctcgtcttcgcgcaagccaaggccacgcaggtattccaaaagcgtcgggtcttcgttcagccacttgagctgattgatgtagcaactgccaagatcgagctcgttcgcggcaagcatcatgttctccacggcacaggcgacatcggccatattgttgccgtattccttcttgttcgcgaccacgatcagcacaggcgccgtgtagcagaacgagtagttgcctttacgggcgagcgtaatggaattcttgagactcttgtaaaggtcttcgcgaagttccatcgcggcaaaggcggactgcacgagttccttgagcttcgcaatcaccgaagcatccgaaatcacgaagaagtggttgctctgcgcgttgccgccggtaggcccgaactggcccgcctcgacaatctgcttcaacttctcgagttcaacaggctgagccttgaacctgcgggtactgcgacgcgtcttgatggcttcgagtgtgttcataatatttaccttttactggatccttcgacttcgtgcttcgcactccgctcaggatgacacttgcgtgtcacttctccaacggcagaacgagaatacgcgagttgcgcttctggttgtagttgtcccgcttgctcttgggcaagtcctcgaccgtcccgtcttcgaatccgaacgggtagaaccaatcgagcgcctgtgtcgtgagcaggaacaatttcttgtagcccttcatctggccaatcgaaatcaggtgccgcacgatggcatcgccaattcccgacttgcggtagttcgcacccacggcaatgcccgcaatttcggccatgccgtcttcgaactcgtgcaacgcaccgcaaccgtgaatgctgttgtcgatgctgtacaccacgtagtccttgagcttttcggaaatgctttcctgcgtgcgcggcaccaggtagcccttcgcgatgtagtcctgcataatccggaggatatccggaatatcttcgatgttcgcgggccggatactggagtactggtttgcatacaccatggtaccgtcaccccgcgcgctgaagacttcttgcagcacgctgccctggaattcaccgctcagcaagtggacacggttcgcgcccgcctcgcaagcatggatggcgttcatcaggtaatccatctgcgcaaaattcaacacgtcggaattgagttccaacagttccttggcctggtccacgtccaaagccgaaatcacgcccgactcggtgggttccaggtacttggtgttcttgccggtcacaagccccttgagcttgataccgttctcgttaccgatgaagaacaacttgcccaccttcatgtacttgcaaatctcggtcgcaagttcggtggagctgatgttgtaggcatgcccgagcttgttccagccaatcggcggaataataggcacaaacttctcgttcaaaagctggtcgaggatatcgcgctggatacgttcgatccggcctgtcctcatgtagtccacgccgtctatgacgccgaggctccgcgccagcacccagttgccctggataccgctcaggccgctcgccgtgaggtggctcatgatgcgctgggcaacgcccaaagacgcctgctcgataaggggcagggcctcttcgctggtaagccgcacgccgtcgtggaacttggactcgatttcccaagccttgagctgcgcgtcgatactcttgcgcgtacccggcacgataatgatgcggatacccgccttgtgcaacagggcgatatctcgcatgagcaccggaaacagggggtggtccataaggctgtcgtcaatcttcaagatgaagagctggcccttgaaccggtccatgtaaccgaagacttcccggatgaacccggcgacttcgaagtgctgagagtaaaaatcagacgcagacttgttcatagtacaaaacttaataaaaaacggcacccctggggcgccgttctgcaaaaaactagtccttactattcagggattacttctttttacccttcgcaggcttcttggcatccttcgcgggcttggcgggttcgggagccttcggggcttccgtggcggcctcggccttcgtgggttcggcagctgcggtcgcagcggcttctgccggagcagcaggcgccacagcggtggtgtccactgccggagtctcggtaaacaccttcaggagctcgacttcgaacacgaggagcgcattcgccggaatcatcggcggcacgccggcctcgccgtaggcaagggcgctcgggatccaggccttgaccttcatgccttccttcatcacctggagcaggtcctgccagccctcgatgaccgcgctcaccgggaattccagcggttcgccgcgtttgacgctgttgtcgaattcagtaccgtccaggagggcgcccacgtagtggacctgcaccttgtcgcccaccttggggatgatgccgagaccttccttgagaatcttgtactgcacgcccttcggggtgaccttcaccgtggaatccacgatgttcttggcgaggaacacggcctgctcgtcaagcgccttcttcgcggcagccctctcgtcggcttccttcttctgctgcatcttcaggagcaggtcctgcagggcagcttccgcagcggaatccgcaaggagcacctggcggctcgaatccacctcgtccttgatggcctcgatgatgacatcgagcttgaggggcacgctgatattcgcgatggccttgcccaggtccatgccgagcgcgtagctgtagcggtcgacagcgctgtccaggttgaccgtcttctcgggggtcacgaccggggcaggagcgggggccggttccgtctcggggacagcgttcttgtttccaccgcaggcaacgacagcggcgcaggagacggcggcaagggcaaaatagctaaacttcataaaaaacctcgtttttcgtatggccaggggcacttctacaaaaataggattttcgggaaaaaaataccactttcgcaggccgtattcgcgattttcgtacaaattatgcaaaaaacgccatttttcggccaaaaaagcacactttggaatcgcgtgacgcaattcacggaaaaaccgcattgtaaattcatggatacaaacggcttgcaaagaaggccgaaggtttctatttttatacgcaggaagagaatcgctatgaataagagcttcatggacatagtatcgaaggcgtcggccaacaagagcctgttcgattcctctgtcgaggagatcgcgggcgctctcgatatctccgtcaaggcagcctcgcgcaacgcatgggcagccccggcccgccgtacgcagctgcagacgaccggatggctccgcggctccctctcctacccctgggccatcatctgcatcgtcatcccggcggtgctcgacacgctcatgtaaccgcccgccagggccgtttccgccaagacactccaagacgcaaccccgccatcacgcggggcttttctatctttgggggcgaacattcgcgcaacccgcgcaccggagacattatggcagcactcatcctcgacggcaaggcactcgccaagaccacagaagaagaactcagcgcccgcgtggcgaaactcaaggaaaagacgggcaagaccccgatcctcgcgaccatcctggtgggcgacgacccggccagcgccacctacgtgaagatgaagggcaacgcctgcgcccgcgtgggcatggaaagcatccgcgtggtgctccccaagaacaccaccaccgaggaactcctcaacaagatccaggaactcaacgacaacaacgacgtgcacggcatattgctgcagcacccggtcccgcgccatatcgacgagcgcgccgcattcgaagccatcgacgcccgcaaggacgtggacggcgtgacctgcctcggtttcggccgcatggcgatgggcgaacccgcctacggatgcgcgacccccgccggcatcatgcgcctgttgaaggcatacaacatcccgctcgcgggcaagcacgccgtggtcgtgggccgcagcgccatcctcggcaagccgatggcgatgatgcttttgaacgccgactgcaccgtgaccatctgccacagcaagacgcagaacctccccgaattcgtgaagcaggccgacatcctcgtgggtgccgtgggcaagcccgagttcatcaagaaggaatggatcaagcagggcgccgtcgtcgtggacgccggttaccacccgggcggagtcggcgacatcgagaagggcctcgacgacgtggcatctgcctacaccccggtccccggcggagtgggccccatgaccatcaacacgctcatctaccagagcgtggaatccggcgaaaagtatttaggctaattcgtcatcctgaatgaagcatcgcagatgcggggagaaggatccagtccatatgtttgggcctggattcctcgacttcgcctcggaatgacgtaggttaccgcttctgccactcgcgttcaacggcatccgcttcggcggagttcggagagagcatgttcttcatggtctcgcccacgaacttcgcgccaatcccgataaccgtccccatcgtggaatcgttggaatactcgcgactgtccatcgtggatgtcgctccgctcgcggccctgtcgttgcgcagcgaggcgctgtccgaataaactagagggcggttcttcgtcccgccggaaaggtcaaccgaatcagccgcagacggctttttctgcaccagctgtgcgcttgccgaaacggcagcaataaacaataacgtcaatacaagtctcatatccgctgctcaatatagctcttgtgagcagggcgggcaagcctattgactacaaagttgtagcctacgacggctattgcgcctaaaaaaaggacccgtttctgcacatttttcaaaaaaattttcctaatgacattatttgtcgcacggagagtgtatattaaatgggtatgcgatacggaaatgcacatatacaaaacgagggtccccttgcgggaaccctatttagtgctagtttttcagcttattactggcgaaaaacctcatttcctaagtcactaatgaccatattataatatttttatttgggaaagtcaatagaaggaataaaaaaatggaaaaaaagcgctatcgcctcggaatagacctcggaacggcaagcatcggtaccgcacttgttgaattggatggtcctgcaaatcgtccttatcccacaaatatccttcacatgggcgtgcgcatatttgatgatggacgtgaccccaaaacaaaagttccgctcggcgttgcacgcagaatggcaaagcagaatagaaaaatgctcgaccgttaccttaggcgccgcaagcgccttattgacgctctcattgaatttaagatttggccaacagacgaagcccaaaggaaggctctttgccttttgaatccctatgatatcagaacccgtgctctagacgagaaggtttctctgcacgaactcgggagagctattttccacctcaaccagcgccgcggattcaagagcaacagaaagacggatggcggagaagacggcaaaatcaggcaggctgtcgccaaacttgaagaaacattccaaaaagaaggctgccggactttaggcgagttctatcaaaagtgcattgaaagaggtctatccgttcgtgcaaggttagaaggtgccggtgcgaaagcggaatatccattctacccgtctcgtcaaatgatagaatgcgaatttgacaagatttggaacaaacaggccgaattctatccagacattttaacaaaacaggcaaagaaaaaaatcaaagaaacgcttctctatcagcgtccgttgaaacctgtaaagcccggtaaatgtttcctagaacctaatgaagaccgcgctccaattgcaagcccgtatttccaacgctttaggattttacaaacaatcaatgagttaagaattatcagccgttacggcgaccaaagatcactcaccttagaagagcgtaatattcttctagatgatctttcgcagaaaaaggaactgaaattttctgcagcaaaaaaactcctttctttgtccgtttacgacagattcagtatccaagatgagcgtcgcgacaaattccagggcgaccagattgcggttttactcggcaacaagaaatatttcggcaaaaattggaaatcattgccattagaaaatcaaaacgcaatcgttgctgaactaatcaatcaagatgatacggaaaacctaattaagacattatgcgcattcggcctttccaaagaggctgcggcccaactatccgaagaaactctccccactggttacgggcgtctttctcttgtggcattgaagaaaattatacccttccttgaagaagctgtcattacatattccgaagctgctgccaaggcgggctacaaccacagcgataattacaccggagaaattttccactatctaccctactacgggaaagtccttgaaaacagggtcatgcgcggaagcggtaacgaagccgataatgatgaagaccgctatggtaaagtcggtaacccaaccgtccacattgcattgaatcaacttcgacgtgtcgtgaactgcgtcataaagcattttggcgccccagaacaaatcgttattgaagtcgcccgcgacctcaagatgacgcaggacgaattaaaagattacaagaagaagcaagcagacaatgaaaagcgtaatgaacgcattgatgaagaattaaggaaactgggtcaatctgttaatcgtgaaaatcgcgaacgtttcaagttatgggaagaacttgccgatgaccccaaagaacgttgctgcccctatacaggcgaatgtataagcatgacaaggctgttctccgacgaagttgaaatagaacacattcttccgttcgcgcaaacatacgaagattcattggcaaacaaaacgctttccatgcgatacgccaatagactcaaacaaaaccgctccccttacgaggcttttgcagagcattcctataaaggaatcctcccttatcaaaaaatgcttgacaaccttcaaaaaaaaggcaaggcttgggaaaacaaacgttggcgttttgaaaaaggggcgatggacagatataacgcaaatggagatttccaagcaaggcagttgactgataccgcatatgcttcccgcttggcacttgaatatctcaaattcgtatgtcccaaggactctatttgggcgattccaggaaaaatgacctctatacttaggcgtcaatgggggctgaatagcattcttggcagggaaatgcctgacggttcatttaaaaaaagccgcgaccatcacggacaccacgccattgatggacttgtaattgccatgactgatagagcgctactaaaaaaagtgtccaaaataacccaacttaattgggaacgtcaagaaagaatcctttcccatattgagccgccgattattgacatttttgaccaagcaaaagaacggctttctcatttggttgtttctcatcgcaaagatcatggattgggtggagcgcttcataacgataccgcctacgggattgttggtgaatttaaagaaggcgaggtttctacagtacggcataaagttccgataacatccattacaggttcaaatttcaaccaaattcaagacgagtccatccgttatggcattcaaaacctaatagcggaatcttcttctgacgcagctctaaaagatgctatcaacgaatacgcaagcaggacaggtataagaagggtttcccttatagaaaaattgtcggttgttcctattaaggataaatctggccatatctacaaggcttttaaacctgatggtaattactgttatgacatctgggcgaatggtgacaaatgggagggaaaaatcgtcagcagatttgaagcgaatacgcaaggagccaataagtccaagaacgtattaatgcgattaattgtcggagacacagtttgccgcgaaataaacggcaaaaaagattaccttcgattagtaaaaatgtctttaggacgaattacatttgccccaatttttgaagcgggagcattaaaaacacgtgatagcgatcccaaagacccatttaagtatatcacaatatcgccaaacctattaaaacaaaataaaactcgacttattcacgtagacgaatgcggttttgtatacgatcccggatttaaggagaaatgataggtagaattctagaaataggaactcccggaaagtttttaaaacttttccgtgggttctgcattatagaagaaaaaggttccgagttgggaagaattgcccttgatgacttggaatctgtcatcctacattctcccgatggaatcatatcgtaccaactgttagcagaattcgcagaccggaatattccggtcattttttgcaacgaaaagcacatgcccataggcatatattgggggctcaacgggcattaccaaggatccaaacgcatcaatctacaagctcaactgagtttacccaaaagaaagcaaatatggcagcaaatcgttattgaaaaaatcaaaaaccaagctaccgtattaaaagcagcaaaattagactatctagaccttgagtattttgcaaataacgtaaaatcaggagattcagacaaccgcgagggaatcgctgctcaggcctactggtctcgactttttggttctgaatttcgaaggaatcccgacttagatgggataaacgcatttctaaattacggctatgccattttacgagcaagcgtgactagagcaatcgttgcagtgggtttgcacccagctttctctttgttccaccacaattcagaagaccccacccctttggcaaatgatttaatggagccatggcgtcctattgtcgatatcgccgtctacaaattgtatctagccgaaaaatcggaacttacctcaaaagaaaaagggactctaacccaagtattagaatgggatctagagctaaacaatcagcgttctcctctccgaatttgcctccaacgcctatgcaatagttttgtggatatctgtgaagggaattcgtcaaatcttctatttgccaaaattccttctattgaagagattcaagaagaatggtctgaagtttgaaaagacttagtggatatagaattttgtggctgatggtcctttttgatttacctgttgttgaagagcccgatagaaaggccgcaacggcttttcggcaatttctgctagacgaaggatttgaaatggcccaattttcagtttatatgcggcactgttccggcaaggaacatgcagaaaaatactaccgccatatagaaatgaaccttcctcctggaggcaaggttcacatcatcacaataacagacaaacaatttgaaaacatcgtgcgttttcaaaacagttttcaagagcctcgcaaaaaaaatccagaccagttatgcctgttctagcttttttttgcccgtttttctggcggattagtcggctaacctgctgttttacaacactttagcgcgaaactaatatagaaacttaggaaatgaggtttcgccagaacgaaaaattctgatgcgggaatgtagtcttcaatatagaaacttaggaaatgaggtttcgccagaactcgccagagcaagcgtctcgctattttttaaatatagaaacttaggaaatgaggtttcgccagaactgagatagttaacggggagcagaaattttaaatatagaaacttaggaaatgaggtttcgccagaacagaattgattgatgtttatgttgattgaaaaatatagaaacttaggaaatgaggtttcgccagaacgacccacaactcacgcaacagcaacaagaaatatagaaacttaggaaatgaggtttcgccagaacactttcatcttcgacataaaaccaaggtctaatatagaaacttaggaaatgaggtttcgccagaacccgccgggcgtcccggacctcgcccgagtgaatatagaaacttaggaaatgaggtttcgccagaaccacctgtcgcaaattaacgtaatgttcataaatatagaaacttaggaaatgaggtttcgccagaacttggcgatgggcttgttcaggttcccaagaaatatagaaacttaggaaatgaggtttcgccagaactcggactattctgaggaagagcgtctacttaatatagaaacttaggaaatgaggtttcgccagaaccatattaagcttaagtatttgagcgcgcttaatatagaaacttaggaaatgaggtttcgccagaaccagcgtgattctgttaagctcgaaacggctaatatagaaacttaggaaatgaggtttcgccagaacaagtcaattgtctgttccgacaggtcgtggaatatagaaacttaggaaatgaggtttcgccagaacgattacatcgatgtaacgtatgacagtttgaatatagaaacttaggaaatgaggtttcgccagaactcaccgacaccctttccgacatactcaccaatatagaaacttaggaaatgaggtttcgccagaacctgaaagcaaatcacaacatattaccggacaatatagaaacttaggaaatgaggtttcgccagaactccgtgagtggctttggcgtgaatatgattaatatagaaacttaggaaatgaggtttcgccagaactggataggatgtgtcggcctcgcgacgatgaatatagaaacttaggaaatgaggtttcgccagaacttcgactgccgccctgcccatctaaagtttaatatagaaacttaggaaatgaggtttcgccagaacatgctcgctatcgaggattcgttcgagactaatatagaaacttaggaaatgaggtttcgccagaactcgcacgttaaacaagtaagagtgcacgccaaatatagaaacttaggaaatgaggtttcgccagaacaatacaatgcgatgtggcgcaagaagaacaaatatagaaacttaggaaatgaggtttcgccagaactcacgggaaccatgatgcgcaacaaacccgaatatagaaacttaggaaatgaggtttcgccagaactccctgcgtagttctgaattaggcatattgaatatagaaacttaggaaatgaggtttcgccagaacaagggatccggcttatagttcttaatgctaaatatagaaacttaggaaatgaggtttcgccagaacagttcaagcattctccgcatgcggacaaagaatatagaaacttaggaaatgaggtttcgccagaactgttgaacttggcaccaaaatttttgatttaatatagaaacttaggaaatgaggtttcgccagaacagacccatgtattccacgtccggctcgtgaatatagaaacttaggaaacaaggtctcgttagaaccttctatgtcacaatgttcgctaatattaaatatagaaatttatgaaacaaaatttcgccaaagcaaaattttactgtcgtcgacatggttggcaaatatgccatgtatttttgtggcagtccaaatacttgaaaagccgttattttcagcgatcaacaacccaccattcctcccccattttcacacaaaaatcctataaaactattttacgtcattttatgacacaccctaaatctatattttcattgtaaccttcaacaaggaggcctacaatggcaaaggatatcttctacgtcaaggtcgagacggccaaggcggcaaccgtctacgccttcacccggagcgaaaccggcatcatggactacgcgggcacggcaacgccatccgccgatgaactctcgcagatgcagtgcgtcgaggggagcgcctacttcacgccttcgtggtacacctacctgcccaaggagctgcaggcggaaatcacggtattcataccggccgccatcaaggacctggatgcgaaccagtattccttcttgctgcacgtgggcgccctgctgctcgccgtacaggaacgcgacagcctcctcaccgccgaactcctgcaccggcgttcgatggtcttcgcgagcttcacgccgatcctgctgcacatcctgaagcccgtcgcggccgaggcacttttcgcatgggtctacgggaacttcagcggcaacggcaacttcaagaacatctacgcggtcgacgcgcccatctccaccggcgagaccgacacggcggcaatcctcttcgcggccgcgcgcgacgcgctcgagcccgtaccgcacaaggaatcgcccgaagaaatgttcatccgttacttcggcgagggcactaggcgtttcgatttcaccatcgggatagtcggtaccgcgaaccacccgtgggtcgacggtgtcgagaaattcggggtcatctccgatgccgcggtcagcttccatttcggcgacgaccccgcggccgccggcaaaaaacaccaggaaatcttcgcatcgctcaagacgaaggtgcaggcggaaccgtacaacccgcacgaccacaacgccatcagcgtgggcatcgacgacctggaagccgtcctcaagggcgtcccgagcaagagcaaggcgggctacctgcgggcgacaggcgccgccatcctccgcaaggcgcgaccgaacctgtactgctacgattcctcgctctggcgcatcggcggcaatcccgactacttcgagaacgccatcgtggtgcggatacggttctaatagtttgggcatggcgaaaaaatgactttcgttttacaaaactcccttgtttttcgatactatttatgcgtatattgatatatatgcataaatagaaacgacagtaatcaccgttttccatcaaaaaacaaaggagtccccatgcccgaaaccatccaagaaacctacgccgacttctgcaggcgccaaaaggccggcctgctcatcgtcggcgaacagcagcaaaaagaagaggaagaccaggaggcgctccgcgacatccacgaaaaacgctacgagcgcaagtacgacctgttcttcgacaacctcgacctgattctccgacacagggaagagattctcgcgacgccccgttacgcgaacatcgacgcgcactacgcgctgggaggtggcgggctgtatgtcggcgagctccgcacggcaaggcagttcaatatcgccgggacgctcgtcacgttcaacctcaagctcggaaccgtactcaagatctgggataccgaccagttccgcgcccggtgcgaatgcggggagacggccgtcatcaggcattttgtcgggtcgccgctctcgggcgggtccaacgcgaccgcggtatgccccaagtgcaagaagaagacccatgtcgcgaacaggagcttcggcatgtactacttctacgtgaaggggatgctcgacgacgatatcgaaatggtcgtgaagaaccttatcgtcaagtggaccgtcgccgaggtggagcaccagaagaaggtcgccgaaggcaaatgccgcgaccccaaaatcgcgcaggacttcaaaggcgacaaggaaacctgcagcctcgaaaccatgctgcaggaactacgcctgaaggagttcaaggaatcgggaaacttttgagaaaaggaacaccccgacctggacgagcaatggtccaaagaggccgaaggcataggcccgagagacgagtagcaccgcatttcagtcgcataaacgcctatttatggccgcgggaaagtcgccaaatttaacttaataagttaaattaagttagagaggtggatatgagcatcggcggcattacatacaagaagattaacggcaagcggtacgcctattaccagtggtgcgaaaatggcaagcagcggagccgtcgcgtcaaggacgacgagttggaatcgctcgtagcgcaaatcgagttggccaagagccaggcagcactcgggcgctccatggaattgtccgatgtccgggcggtttatccggcgcaatcggcgttcaagaccgatgtaaagaccggtgtgctgctcgaaaattttgccgcccccgtgaaggggttcaagaagcgagagtgtttcgcggctttgcacgaatatgtttatggagcgaataacgaccgagttctggtgctgtatgggttgcgtcgtaccggcaaaacgacgctcgtgcgtcagctgattggagaaatggatgcggcgcaccgcgctaagactgcctttgtccaggtgaatgcgcgacatacccttgccgatgtcaatcacgatttgaaattgttggaatcgcagggcttcaagtacgtgtttgtcgatgaagtgactcagctcggtgattttatcgagggagcggcgctcttttcggatgtatttgccgtgggcggcatgaaggtcatcctttcgggaacagattcgctcgggttcgtattttctgaagacgagcaactttatgaccgctgcattctactgcatactacatttattccgtaccgtgaatttgagcgcgtgctgggcgtcgcgggtatagacgagttcattcgttacggcggcaccatgagcatgggcggcaccaattacaacaaggatgcgtttacctttgcgaccaagaagggcgccgacgattatgtggattccgccattgcaaggaacattcagcattctcttaagtgctaccagtatggcggccatttccgctcgctccatcagctgtatgaacgcggtgagttgacgaatgccattaaccgcattgtagaagatataaacaatcgttttacgctcgatgtattgactcgcgacttcgcatcgaataacttgaaaatttcggcatcgaatttgcgccgcgacaggatgcacccgacagatgttctggataaagtcgatgcggcggcagtcgcacaaaaaatgaaacgcctgctcgaaatcaggaaccgcaacgaatgttcggtgaatattgaagacgcccatcgggtagaaatccgcgaatacctgcagatgctcgatatgatttgcccgattgacgtggtgaacatggcgtcgctcaaccagactgctttcagaacggttttggcgcagccaggcttgcgttatgcgcaatccgaggcgcttgtccgtagccttatgatggacgaggcgttcaagaaaatttcgattgaagagcgcaaccgcattatcgcgagaatcctggatgaaatcaggggccgcatgatggaagaaattgtgctgctcgaaaccaagatggcacggccggacaggcagatttttacgctgcagttccctgtgggcgaattcgacatggtcgtgtttgattctgaaaatgcctgctgcgaagtttacgaaatcaagcatagcgacaaggccgtgcctgcgcagtgccgccacctgctcgacaaaaagaaatgccacgagacggaattccgctatggcaaaatcaagggccaatacgtaatttaccgtggcaggtcttgccgcttgggcgatatcgagtacatgaatgtagaagagtatttgaaaggccttggctaaaatgcgtaaatgggaagagtggtaaattgttatctatggcgatagaaaatgagcgagatttcgtacagcaaaaagaacgaccatattgaatgcgtgcgttacaaggattggcgcaagtcgtacccgccgcacacgcataccgggcacatgaccgtgggctatatcgaagaaggccgcgtttgcattgtgctgaacggcgatgcaaaaatttatggcgccggggaacagttccagattccgccgaatacgttgcacgaaatcaagaccgtagatgatgaatgctattcaatggtggtgctgtgtatcgccttggagtccgacgagattgttgccgagggctgcgcgcgagattatgaaagcaccgtcgcgcggttagatgaactgcaaaaaagcattctcgaaaatcccgagaacatttatttgatagagcagatggcgcatgacgcgtgcatcagcccgttccacatgatacgcgaattcaagaaggccttcggactcacgccgcatcagttccagatgcagtgcaaagtccgcaaggcgcaaaagctgctcgaagaaaggcccgcggccgaggtgacgtatgacgccggtttttacgaccaaagtcacatggaccgctgctttaaaaaagttgtcggcctttctccgaaggaatataaacgcgccgtgaagacggatgactaatacgtcattgcgagaccgtaagggcgacgcaatctcctagcacagggccggcatgaacttcgcgaacagataaagcccttgattgcccgcatcaacctggtgcgggaccttcgccggcataatcgagatgactcccggagtgtattcgagcttggcgccgtcattgatgcaaaccccgctccccgcgatgacttcgtgcgtttcgagctgggtttcgtgaatgtgcgttttgatgctcttgttcggcgcgattctcaccaaatgatagctgaacgtgccgccggtttctttcgaggtgatgatatgcttgagttctacgccctcgaaagtcgggtgcttggaccaggcgatgtccttaaaagcgattgttttgcccgggagcctgagctcgccctcgttgaatttttcgaaaatatcgttgccgagaattgccttttccatgattttactcctttgtttgagattccttcgcgacgttggctaagtgcgtcgcagtgatgcccgaaatctatacgaaggggtatgtggaaaaattggacaaaattgcggaaaagtatttatatttatcctgtactaccgagcattacgtgctgcaccgctacaggagcgagccggactttgtgccggaactctcgctcgtgctggaagtggacggcgaaatcatcgggcacgtgatgtacgcgtggtcgcacatcgacgccgagatgggcgcaaaatccgcatgatgaccttcgggcccatcagcatccgccccgactacaaacgcaagggatacgggaaaacattgctcgaccattccatgcgaattgccgccgagatgggcgcgggctgcctcctgatttgcgggaacatcgcgttctacggcaagagcggctttgtggtcgcgagcaccaggggaattcgctatgccgacgaccccgaaagcgacgcgccctacttcctctgcaaagaactgcaggaagggttcctcgacggaatcaccggcagttaccgcgaccccgaaccgtactttgttgccatgcgcaatcccgaagcgttcgagaagtacgacgcggaattcccgccgaaggaaaagctcgtgctgcccgggcaactaggctaaaacgaacctgcgtaggggagggccctcccctcgctcctgccacatgtcatccccgctatacgatacttggcaacttgttgccatagtagagttatcctctttggggagaaggcgggaatctccatgcgtcatccgctacccctcctcctaggggcgtggcccctaaaacccctgaaggcgagtgttacagggtttctgcaatgccctcgtctgaaaaactgcatagtatagagtagttgtcaaggaatacttgacaactactttagtggttggttccttgaaaaatcccctattccccctcttcctgtagcctctcaaacagtgtgtgataccccgcgatatcttccagctgcatgatggtcgtaatcttgttccccgcgtccttacttgacgccccgcagtggaaaagtttctcgctgtcggtcccgaaatccagatagatgtacctgtcgtggaacatgttccccgtggtgcgaacatcgtcaagttcaacgtccgggcgggcagccctgaaatccgccagcatgctctcggtcaggcgggtacgcccgtgctgctcgctgaaaatcttgacagaaacgttcttctccacgcaccgcaacaaatcgagcgtctttgcatccaggtaatcgtcaacaatcagcaccgactttttcgccatgccgtagatttgcgtgtaggcgacgtcggcctccaggcgttgcccgttcagaatcaagaagtgcttgaaggtgctcgggtcaatgaaatttgccatgactttctggaggaaattctcgtttcgctccactttgttcgaaagcgcgcggacatccgtggcaatctcggcgatatcccgcgtgttctggctcgtctgcgtcgccaaggcgaccatccccgcagaaatatccggcgcattctccgccgcaatgtagtccttcatctgcttgaaaagacggataagggctttgctctgtg

SEQ ID NO: 875 - DNA, 23096 bp, synthetic construct
  misc_feature 1..23096: note = Synthetic
  source 1..23096: mol_type = other DNA
ttgtcccagccgggcatgtcttcgagcgtgataatgtagtcgttgttcatcaccgtcttccagctttcggcgttgttgtcgttggcccagccttccatggcgtagtcgccgtaccaaggcatgaaccagctccagttggcgccatcggccttcatttcgtcggggtagggcacggagccattttcagacaaggtgacaatctttttggcgccgtacatttccttgactttttcgaaggaactcacgagagaggcgtggtttgcttcgcgggggtagtagtaatagtcgcggcctacgacgtctacgtattcgtcgcccgggtaccaatccagtgcatcgggggcttcgtcggtggtccagacccaaatcaggttgtgcagccccttcttgttcacgaaggtgtcgaacatgagcttgtacaaggccacgcaaggctttgcgccatcggtgccccaccagaaccactttccgctcgcttcatgcagcgggcgccacagcacggcaacgccttctttctggagcgtaagcagcgaatcggcaatcatttccatgtcgcgcataagggccttgtattcgtcgctgtcggttttccacttgccggtggtggtgtcgtaagcaagcccgatgctgaattccgtgtaagggtcgtttccgctggattgcgtgtagaacgcttctacagtgtgcatcgggtctttccagtgccagttgaattgcggaatgccgccttttttccatacggtctttgccatttccaaggaggcatgtgtatagccttgataccactgctggtcagaactcttgccggaagaatgcaagaaatcgaaaccgacgagtaccacgttcttgccgctcgccttgttgatatagctgagttcggtttgggtgtcaaaatcctgcggggtgtactgcccgttgttttcgaaggggcgttcggtcatcacgccgctgatcgtgcgcttgccgaaattgctgtaaagaaagttgtaaagcttctgggcgctttcggtgggctccggagtgacgggcttggggctgatgttccagggggtcgcctcgtattccgaaatttcgatgtagtcaacggccacccatccccaggaatggacaatcccgattgcgttttcacctttttttagcttgattttacccgccgccttgaggaccttaaaatcatcggaaactccgaaggtcacctggccggcggagcttccgttcaaagtcagattctgggtcttgctgccgcgatcggtggggagtttgtagcttacgtacagcgtgtagtagccgtcgcttggcatgttgacggtgaatgcgaggtcgccatcggccatttctacgtacttgccgcccgaggcttttgcgtcggtcaatgtctcgattttatggtcgtcggcaggtacggcgtcttcggcttcgatgcggatggccgctgccatggagtaggtcgaaaaagcgagcgctgtcgcggttaaaaacttgtaggtattcatacaacctccggttccattttaaaatacattattttccccgaaattgaaaattcattgttcaaatagaagaatccccgcggcaaacttgcgtcgaccacggggattctaggagtcatgaagagaaacttacttgattaataccggctgggtagcggcaatgcctgcgcccttgacgcgcacgatgtagcggcccttgggcatgtcggcgaggctgaatgcgctggtgcctgcggcgaggttgcccttgtagagcgttgccacgcgcttgccgttcataccgaacacttcgacggcaaccatgccagccttggcggtagtgagcgagacggtcttgcccgagacgccgagcttggcggaggcgctagccttggcgactaccggcttgatggcggcaggtgcgccagattcgtcgacgagctcgatctttgcgatgtgacccttgctctggtcggcggcggtgaagagttcggtcttcttgtcgaatgcggaaatcaccttaccgttgtcggcgacgagttcatcgaaaatcacggttccttcgaagcctactgctgcaaccatgagcgttacagagaagaggttgtcgagatcgatcgggtgttctaccttgtcatcgtcttcgtacttggtgatgtcgaattcgcaagtagcggaggcaccgtcgttgatccagcagccggtggaggtagacatttcccaagtccaaccgtcatctgccataccgttgcggacaaaggcgagaccaacccagatgccattgtctgcaccgccggaaccgttattcgtaatcttcaaggaaactgtcgttgcaccagtgaggttcggaacctttttgagttcgatgtttgcaccgctgtcgttcaaggcagtgtaggtcacagccatcatcaggttcttgtagtcttcaggagttgcttcgccggcaccatacttggcgttttcggtcgaggtcgggcatgcctttgttgcagaggctgcttcattatagttgtcccaacccggcatttcgtcgagcgtgatgattcgttcgtcggcgaggttcttctgccatacgcttgcggcggtttggctcacgtagcctgcggaccaggaatcataccacggcatccaccagctccacggggcgttttcttcgtacattttgtctacatcgggaatcgggccgttttcgctgagggcgataatcttgttggtgccgcccttgttggcaaagtcgatgaatgcagcgctgttgctctggtgatcgtttgccttgttgtaaatgtcaacgctaagaacgtcgtagtaggtttcgcccggagtccaggaaagcttggaggcatcttgcgggttaaagtcccaaatcaagttgttcacgccgttcttgaacaccatgcgttcatagagcaactggtagagggcgataaactgcttgcccgtattgatgctccaccagaaccagtttccgccggattcgtgcaacgggcggaagatggcggcaacgccttctttctggaggtccaagaaaatctgggaaacgtggtcgatatctccgacaattgccttgtaagcggcagaagtcgtatcccaagtggtggaacccttgatgaatgcttcggagaagtcgaattcggtgtaggtgtcatgagcacccttcacgtagaattcaacttcgtcacccgggcgccagtgccacgtgaaggccggaatgccgcccttcttccaggtggtttttgcgatatcgatagccttttcggtgtactgctggaaccagccttcgtccttgttggcgccggttgcgttcatgaggtctgcaccgatgagtgccgggtacttgccgccggccttgaaaactgcttgcacgtcttcgtgctgggtggcgtcgccaatggtgtaggcatccatgttgccggtcattacgccagaaatagtcttcttgccaaagttattgaccaggaagttgtaaagtttgattgcagacggggtagcgttcttggtaacgggagcgttgcaaagggtgaatgccttggcttcgaattccttgacttcgatgtagtctacatcgatccaaccccagctattggtaatggcgatcgtgtttgcgcctgctgcaagtgtaaggacggtttcgacatcgacaaacttgcctttgtctgtaaccgggaaggaaacctgagaggtagtactgccgacaccgacatagttgatcttgtcgccaccgtagttgttcatgtagtggaccactacgctgtattggccggctttctcgacggtaacagcggggaacgtgatgtcgccgccgttcatcttgacgtacttgccgcccgatgcttcggtattggaggcgacagctgcgtctttggtgagtgttccgtcttcggcttcgtactgcgccgcacttgcagatgctgcagcggcaaggccgaatgcgagaagggttttagtaaattccataacagactcctatattgtcgtcttggaaaataggttttaaaaaacgcaaatcaaagaatattttgaattgtgttgaataaatcgttgggtaattctcaacaaaaaaaatccgccaaaatggcggatttcgtagattgcagtttacaaaaaacttgcgtttttataactcgatgcccgttttttcgtggaatcggaacccgaatgtaaacgtgcgttcttcaccgggcgggatcacaatgagtccgcggtggtgattcaaggcgtcgggttctgccgtcatgggctcgatggcgatgctcatgcggtcaggcggagtgtaaatctgaatggcgttgtattgctcgacgccggctttctgccaaatatcaagcgaatagttgtcgctttcgagcgatacgtgagcgttgttgataaagtcagaaccgttggcctgcaattcggtgacgtctttttcgaggcagaagcaatcgttgatgaattcgtcgttgatcttgcggccgttttcgaaacgggtgtcttccttgaattctccagtcggaatgtcggccttgtccaacagggcaagcgagcagctgggcaatttcatggtcaagttgtcaatcttttcgcccaaagtaaagtaggggtgccagccttcggaatacggcatgtcggtgctgccgatgttcttgaccgtcgaagaaatcgaaacgctttcgcccgtgaaggtgatggcgttggtggcgcgataggggaacgggaaaccggcaaatgcgcccggccagtcacaagtgaaaatggcggtgcagctgtcgttttcgctttcaaaggattcgaattcccattccttgtcttgcaggaatccgtgcagggcgtgcggagcccagcttacgttgttcacaagttcgtaggtcttgccctgccaggtgaatttggcgtaggccgtgcggccggggaagggggtaagcctgcaaccggcgttggtgtctggcgaaatttttctaagggtaggttcgtccttgtagccgtagagcaaatcgagcatggtcgaggtgcgggtattttgctgattttctacggggactcgccaaccgttgagtccgcagccaaagccgttcaggatttcaaattcggctccgtcatcgcgttgtaaaacaaaacagggaatggcgcccagggggcggaaaattagtttgaactgactcataggctaataaatgtacaataaatcgcgagaaaatgccctattgcaataatcaaataagaaaatattaaaatacaatgtgtcaattttcgtacataaatgaaggtctcgggcgcttttgctatctttgccgccatggattcccagacgattgtagctccgatgacgcctgcaggcgtgagtgccgtggcggccctccgagtgagcggtacgcaggtgcgtctggtggtggaacgcctgtttggaacaaaggcggccaaggggttaaagccccgcatggcaaatctcggcacggcccgcgatcccgaatcgggcaaggtgctcgatagccttctgtacatttattttgaatcgccgaattcctacaccggcgaagacgtgctggaactttacccccacggaaacccgctgatcgtgcgcgacttgctgcaggcaattcgcagcatcgagggggtacgcctggccgaacccggcgaatacacgcgccgcgccttcttgaacggcaagatggacttgacgcaggccgaatcggtggccgacgtgattcacagcgcgaaccgcgcggaactggaaaatgcccaccgcctgctttcgggcgcgctttcgaaaaagattgcaacgctcacggcgcaggtgaaagatatctcggcccgcctcgagcttgatgtggactttgccgaagaagaagccgaccccgattttgcgggctggcaagaaaggtttgaaaacatccgcacgacaatcctgcagattttgaatagtttccgcggcaaggcgaacctgagcaggctcccgctggccgttctttacggcgctccgaatgcgggcaagtcaagcctggtgaatgcgctcctcggcgaagaccgcgtgctcgtgagcaatgttccgggcaccacgcgcgactttgtcgaagtccgcctgtttctagatggcggtgaaatccgactggtcgatactgcgggcatcgcagagcatgccaccgacgaactcgatgcgctcagcatgaaaaagtcccgcgagattctggaagaagcggacctcaagattttggtcctcgatggaaccgattcaagcgaaccggttgttccgcccgattttatagtccactccaagtgcgacgtgcgcgagtccctcccgaaaactggattctgcatttcttcgaaaacgggtgcgggccttgccgaactcaagagcgtcatgaacgccgccttgttcaaaaagtccgacaacgccgaagacctctggattaccagcgagcgcgaaaaggcttgcctcgaagacgcctacgccggcgtgaaccgcgtgctcgacctgctccgtagaaatccggcggtagaactgctcgcctttgaaatgcagcttgtccgtaggtcgctccagagcataacgggcgaaatttcgtccgaagacattttacaatctattttcgcggggttctgcattggaaagtagttacatcggtgctttgcttgccattttcatgttcggctcctacatggtgccccttaaaaaatggccgaattattccagctgggcctacctttcgatgatgaccttgggcgcgcttctgagtgcgcttgtcgttgcgttctatacgggaaccttcaatgtgcacccgattggcgtgctttgcggcctcatgtgggtcgtgggtggcgccttctgtttctgggcggtgcaggccgaagccgacctcgcgggcgccggcgtgcgttccatgggcgtgagtattctggcttcgttcctttcgggcgtgctcttgttcggcgaacagtccaaattcttcctctcgattccggccattgcgtgcttcttgattgggctttcgcgtttgtcgccgtcgcatggcggctccgtattcaagaactggcgttcccttttgggcggctttgccttcggtacctacctgattccctataagcttgcagttcagtcgggcctctcgatgaccgatgtcgaattcctctgcccgtttaccatcggcctttttattggcagccaggctctgattgccgtgcttgaaatccgccgcaaaaaaatgttcgaatacaaactcgtgccgagtctagtcaccattgtgatgggcgtgctctggatggtcggcatgcacggctgcttctgggctatcgatgtgaacggcgcgctcggctatgctatcggttacccgcttacgcagctgaacttgctggtgaacctcggctggggcgtcttcgtttttggcgaatacaaaacggcccgcgaacgaatcaagctgctcttggcgaccttcatcattctcgcgggcgctgtgttgctgaccctttcgaagggctagcggggcgtttgcccctcttttactttatcgcgatcttctttgcggcaaggccgttgactttgaccatgtagattccgctctgcacgttgtcgagcttgagcgttgccttgccggcggtcagcgggctgcttgcgattttggaaccgttcagcgtgaagagttctacgcttgaggctcgtacgcctgcggcgttaactgcgagtgtgcggccctgcaaacgaacatcgaatgactgcgcctttgcaatattggacttgggaatggcgcttccaaaggtgtcaatttcaatcgatttttcgtcataacgggtggcgagggccatcaggtaccaggtgctgtgcggcagccactgttccacccagcgccagttgtgccaaggttcgtcgtaagggaaacccacatattcaacgccgtcgtcatcccaagcgatttccgagccgtccttgttcttgccggtaatgccgtttgcgataccgccctcgagggtggcgtcgtaatcggaggtgccgtcgtacttggccgggttcttcttgccgatgccgtacatcatgctcacgccgtaggggttcttgcctaaaatccagtcgagctggtttgctgcatacttgtctccgccatcgtggccttcgattttgtgcatcgagtgggtggcgtatgctacagcggccgcaagacttgcgatacgggcgtcttcgccctgccaccagtagccactctcgttatcgtgcggaataaagaatccttccttgatctctccgccagtcttgtatgcctggcgagcgtaaccgaacgggttctcgaccttgtccgtaatgctgagtagccagtcgtagtgctttttgatggtgtcgccgacatccagggaattgcaacgtcctccggtacagaacagcaatccgacttcggcatatcggatgagggcgatgagcggaagtcccgcatcgctcgcgtgccagaacgggcgcgtcttgtcgtcgtcgctccagaaatagccatctttgctcaggcgtcccgagaggctttcggcgcgcttgtccgcgtcgagcaaatattcgctttttcccgttgtcgcatacagttcggttgccgcaaggagtgccgtgtagtcgtcgatgatattttccttgccgtcgtcacagtaggcacagtttccgccgatgctctgtttttcggacaggtgggcgtaggctttttcggctgcttcaaggtattgttcgctggtgtagtcgccatttactcggagagctgccacacgggcaaggcctgcaattgccatgccgccgccttcgcggaatgccgtctggtaattgctgctctttttgccgtcgtcgccgctaaaggcacacaggtagcggctccccatgccccagttgtcgaacaccgtcatgtagaagaatccctgttcgtccagcatgcgtaccaagaagtccgcgccgtaggcggcttcttctgcggtctttgccttggtgcttgtcgatgccagcagcgtcggaatgcgttctgctgcgaatgcgagcgaccacaccgtcaagggaatctgctgcgggttcaggtagtttgcgtaagaaaggtgactcaggtacttgctcacgtcgccgcttgcgtcataccaaccgccgtgaacatcgcgcgtgacgttgtctttgccgtaaacgggaaccttctggtcccattcgttaatgggggccttgtcggcgcgatcgttgtagaagtagtcgagcaccttgcccagcgtgttcttggcgagcgccttgtcgtcaacggtgaattctgccgaagtcgagggactgcccgcggtgaggctcaggtagaacttgccggtgtgggggagcgaatcccctaagttaaccgtgtagaacttgccgcttctggcccagttgtccgggttttcgcctttcttgaacgttccgctcttgaccgttgctccggtcgtgccgccgtcgggagcgtagaaaagcgtccattcggtgccttcgagttcctcagtgctctgcaccacaatcgaaatcggctggccctgatcgtagcccgcttcgttaaagaaaaacgtgttgtcagcgaatgcggaaaccgcaagcgcaaaggggagaagtttgcaaactgtattcataggcttgaatataatttattgccccccgaatatcaacaacccggcgtaaaagtgtgttttcagtcaaaacaacaccccctaggaacaccttgtgcgaaaagatatttttacgtgactgtacccatggcttgcggacaagctgtttttgtgatgggggaggcctccccctcggcaaagcctgtagtctttgccgaccccctcgcctaggggcactgcccctaaaaccctctttttaaaataaaaaggaacaagataaactattatgtcaatatttgtctctcaaaaaagtatatatttcaaagtatgggaaatgctgcgctgacatataaaacgagggttcccttgcgggaaccctatttagtgctagtttttcagcttattactggcgaaaaacctcatttcctaagtcactaatgaccatattataatatttttatttgcaaaagtcaatagaaggagcaaatataatggagaaaaaacgttatcgtttaggaatagatctcggaacggccagtattggaacggcccttgtcgaattagacggtcctgtagatcatccctatcccaaaagcatccttcatatgggcgttcgcatttttgatgatggtcgtgaccccaaaacaaaagttccgctcggtgtcgctcgtagaatggcgaaacagaaccgaaaaatgcttgatcgttatttaaggcgtcgcaaacgccttatcgatgcgcttatcaaatttaaaatttggccggcagacgaaactcagcgtaagtcgctctgtcttttaaatccgtacgatattaggactcgtgctctagatgaaaagatttctcttgctgaactcggaagagcaatttttcacctaaaccaaagacgcggttttaagagcaatagaaaaacagatggtggagaagatggaaaaatcaggcaagccgtagccaaactcgaagaagtcttccaaaaagaaggttgccgcacattaggcgaattttatcaaaaaagacttgaaaagggacaatctgttcgagcaaggctagaaggcgctggagcaaaagcgtcttatccgttttatccatctcgtcaaatgattgaatgtgaatttgataaaatatgggataaacaagtagaattttatccagatgttttgacggatgccgctaaaaaagaaattcgctcgacactcctttatcagcgtccgcttaaacccgccaaaccgggaaaatgcttcttagaacctagtgaagatcgcgcccccatagcaagtccttatttccaacgcttccggattttgcaaactgtaaatgaattaagaattattaatcgctatggagaccagagaccgctttcgcttgatgaaagaaatattcttttagaggttctgtctcaaaagaaagaactgaagttctctgctgcaaagaaattgctgtctttgtccaattatgaccgatttagcattcaagacgagcgacgcgacaaattccaaggagaccaaattgcggttttacttggcaacaagaaatatttcggcaagaattggaaattgctgccgctagaaaaccaaaatgcagtggttgcagaactcatcagccaagatgattctgaagaactcattaaaacattatgtgccttcgggctttccaaagaagccgcagcgcagttgtccgaagaaacgcttcctactggatatggtaggctttccgttgcagccttaaagaaaattgtcccctaccttgaagaatctgtcattacttattctgaagcggcaacaaaagcgggctataaccacagcgataattacacaggtgaaattttccattatttaccatactacggaaaagttcttgaaaatcgcgtaatgcgtggtagtggcaacgaagcagacaatgatgaagatcgatatggcaaagttggcaatcctacggttcacatcgcgttgaatcagcttcgccgtgttgtaaactgcgttataaaacattttggagcaccggaacagattgtcattgaagttgctcgcgatcttaagatgacgcaagatgagataaaagactataaaaaacatcttgctgaaaatgaagaacgtaatgcacgtatagacaaagaattggaaaaactaggtcaagccactaaccgcgaaaatcgcgaacgctataaattatgggaagagttggccgacaacccgatggatcgttgctgtccttatacaggagagcgcatcggtatcgaaagactctttactgaagaagtggaaattgaacacattctgccttttgcgcagacctatgacaattcgcttgcaaacaagaccctttcgatgcgattcgccaataggcttaagcaaaatagatccccgtatgaagcgtttgcagagcattcctacaatggcgttcttccatatcaagaaatgctggataggcttcctcaagataaagcttggatgaacaagcgttggcgatttgaaaagggcgctttagatagatacaacgaggacggtgatttccaagcaaggcagttaacagatactgcttatgcttctcgcttggcgcttgaatatctcaagtttgtatgtcccaaggattctgtttgggcgattccggggcgactgacatctatgcttaggcgccaatggggtttgaatgatattatcggcagggaattgcctgacggcacttttgaaaagagtcgcgaccatcatggacatcacgctatagatgcacttgtcgttgcaacgacagatagatctctattgcaaaaaatgtccaaagcgacacaagttaattgggaacatcaggaacgtgtcctatcgcatatagaaccgcccttcttcgacattttcgatcaagccagcgaaagactttcccgtttagttgtttcccataggaaagatcatgggttaggtggggccttgcacaatgatacagcctatggaattataggcgaatacaaggatggcgtagtttctacggtaaagcacaaggttccgataaccgctatcacgggttccaatattaaccaaatccaaaacgactttatccggaacagcattcaaaatttgattgccgaatcgtcttctaaatcttctttagaaaacgccatcaacgagtactctaacaaaactggtattcgtagggtaactcttgtagaaaagctttctgtcgtgcccataaaaaataaaaagggccaaatatataaggctttcaaacccgatggtaattactgctatgatatttgggctaacggagataagtgggacggtaaaattgtcagtaggtttgaggccaacaataatggcgcgaagaaacatgataatctgctaatgagaatttttgtaggggacactctttgctgtgaaatagagaataagaaaaagctgtaccatatccttgggataaccgatggaaaaatcacgatggttgaacattttgaagccggaaacttaagagaacgagaccgtgataagaaagattatctcaaatatgtctttaaaacaccaaatacattaaagcctctaaaagcccgaatcgttcatgtagatgaatgtggctttgtgtacgaccctggatttaaggaaaaatgattggcagaattctagaaataggaactccaggaaagtttttaaaactttttcgtgggttctgcattataccttagccagtggggcggtgcgacaacccaatatagaaacttaggaaaagaggtttcgccagaacatgttcggcaagtccgcacggtgggccgaaaatatagaaacttaggaaatgaggtttcgccagaaccagcgtcttgagcgtgcggtcaacggccttaatatagaaacttaggaaaagaggcttcgccagaacccgtgtgttcgcctgcaagggccgtggcaaaatatagaaacttaggaaaagaggtttcgccagaactccagcgtgttcttcctcggcgggggttctaatatagaaacttaggaaatgaggtttcgccagaacgaagtcttgccatttgtcatattcggctgcaatatagaaacttaggaaatgaggtttcgccagaaccctacttctcaaggtcgtatgactgtcaagaatatagaaacttaggaaatgaggtttcgccagaacaggtattccatcaccttgatggtttcaagcaatatagaaacttaggaaatgaggtttcgccagaacgacaatccgttccaatcgcagcgtgctattaatatagaaacttaggaaatgaggtttcgccagaacgttgtacattacgccacgtatgctatgccgaatatagaaacttaggaaataaagtttatttatatgcgacgaaattgtcggctattgtaaaatttcattacgccccttgccagctttttgaatgttaggtacattcatgcccgacgcgattctctgttgaatggagaaccgcgtcttttttattctgagatttcaggataataggacgcctctaacatcaatcagtcgcaaattgcggctaatggaggctgaaaatcctgattatgaaagaaaaaattgacaagtttgaaggcgaacagattcctgatttcgttttagggatgctcaagtacatgtttccgaaatgcgtcaaggtttacgatactccgaccaagaagcgtcatgataaggatgaagagtcggttgagcttgaaagctccgattggtacaagaagatgtctgcggagatgactccgggcaaggcaattcgtgccgatcgtggactccgcggctggacacagaatgtcctcgcgcaaaagctcggtatctctattcagaatctatcggcgatggaacatgaccgccgcccagtatctaagaaaatggctgcgaagctgtctctggttttcggagtcccgcccgaaacgtatttcaaattttgatttaatgaggtttattattccttaatgcatctgacggggacgtattcgccgttttcgcgggggtcgactttttcgtaatgagcgaagaagtcgctgttcattgcgtattcgccttcttcgacccagaacaggttgtagccagatagagtcatgtccatgccgtaggggtctacgccgccgttttttctgagcgacaggccgaattcatcggtgacgactctggtgttgccttgaatgtgggtgcctatcgcgtacagcttggggtagtatttatccgcttcggagtaagacatttctgtgatgtggttccagtcttctttggtgggtaagcgccagccggtggggcaaactttcttgattacgttgacggtgtagaatcggctggctccgtcgcaataggcgttttcgctggggtcgtgctttttgtgttctgcgaccttggcgcatttgctctggttcacgaaaagaggatcgtctttgtcgtagtagtcgatgtcttgcgcaagccaggttttgccttcgtacacggttgtcttgtacacatgcccgtcgcgagggtcttcgaaggtgccgtattcaaagtccgggttcaagaaatattctgcgggtaacgatgccgtgttcgatatggcgcgccagaaactgtcgaggcagatgtaggtcatgtcgttgttgtcgtttcccctgacgacgactcggtctccgttgttggtgcaaatcacgccgttcttttctttgccgagcatttcgagcgtgacccacgaaccttcctcgcatacaaaatggtctttgtccaaggtaatcatggtgtcgccgacgcttgcgttgcagtagggcatgccggcgcactttcgccagatgttgcgcatgatggccaaggggttgttgatttcgctcatgctgatggcgcagcccaggggcataaacaacattgggtaaccgtccaaggcggcgtatgggacttggttgatgcagtagttgtccgcttctagcgtgccgtcggcaaagtcgtcgaccaaatcttgattcagcgtgttctcgcttttgtttccgtaaaggaagaatagcgtgtattccagttgatattccgcgatgtaggggttctcctggaatagggtgtctaggccgagttcgcgctggagttcttcgatggcgatgtctcttgcggagtcgttgcttaagccttgctgtacgaggacctcgactcgtttctggataaaggcgtcgaccacgccgaaggtttcgctttctacgggggcggtgggcctacagcctctttcttgcggaaaactgattccgcctgctgggccggaacctgattgcgtggcgcttgaagatgatgtggttgacgcggcggcgcttgaagaagactgtgtgcctgtaactgtgccgcttgacagcggagcgtccgaagcggtgtcgctagattgtgtctcggctgcggagctcgacgacaaggcgcttttgccggacgatggcgattccttgtctggagttgcgttgctttcgctggaatatgagatttcggatgatgaaatctccgaaaccagtggttcggtttcgggcgagttggcgttactgccggaatcgtttccgcaggcgcacagaaagaatgaaactaatccccaaaaaattttcttcttcatagtgtataaaataactttaaattgcgggaatggcttggattttctttgattttatatacgcaaaatatgcgtaaaataaaaattgcgcgaacagccttcgcctgcttggttatgaagattcttattcaaatgtcgggcgtttttcgtttctggaggtctgtttttcggttttggggaatttctaacccattgattttgatagaattataaactttttgttaaaaataacgcaaaatatgcgttgaaaatgttcttttttgaacgaaatgttttaaggctcttgaccggtgtcttcgtagaacctatctttgcctgcgaaagaaaaacaatccgaaaaggtaaaacatgtactacgaaagcatcaaagttttggactgcaccatccgcgatggtggcttggtcaacaagcacgacttctctctcgaatttgtgcgtcgcctttacaccctcctgtctgccgccggtgtggactatatggaaatgggctacaagaactctccggatctctttgaccccaaggaatacggtccgtggaagttctgcgatgacgatctgctctggaaggtgaaagacggtatcgattccaagatcaagatggctgtgatggctgatgtgggccgcgtgaacatggatgccgtgaagcccgctagcgaaagcccgtaccagatgttccgcgtggctagctacgtgaagaacatcgacaagggtatcgaaatggtgaacgccttccacgaaatgggttacgaaaccaccctcaatatcatggctgtgagccgtgaccgtggtccggaactggacgaagccctgcaccaggtgaacgaagagtgcaaggccgacgtgctttacctcgtggacagcttcggcgccttctaccaggaagacatcgataaggaaattacccgctaccgcggtatcgtgaagggcaagaagttcggcttccatggtcacaacaaccagcagctcgccttctccaacacgattcaggctatcatcgaccacgtggattacctcgatggttccgtgtccggtatgggccgtggcgccggtaactgcaccaccgaactgttgctcggtttcttgaagaacccgaagtacgacctgcgtccggtactcgatgcctaccaggaactgttcttgccgctcaaggaaaagtacgaatggggttacatcattccgcagatgattacgggtatgctgaaccgccacccgcaagacgccatcgccgtccgcaagaccgaagaccgcgacaattacacgaaattctataaccacatgatgaacgattaggaggcgaatccagcacgaaagtgctcgcactttcgtattggtgagccgacgaatcgtggacttgagcccgtagggcgaaaggccaacgactaataagcctagcattgcgataagctatccaggtcttagggcggagccctaggagaaggggtagtggaaaacgcagcagggctgcgattgtaacgagggggattcttccccctttgtttttttactagcttatacatgtgcgttacttattcctgctgattgcatttgtgtttgggtggtctgcctcgtttgcggcagacgccgtagactcgcttgcgtcagagaataagttgtccgaaatcagtacggtccctttgccggggcagaccgcctacatggaacaggggctttcgttcggtatgggtttcggtgtttacgacccgctggacgagtgcgactgcatgggtgcctggcaggtgcagctggagtatttctattccgactggattagcggcggtgccgatgtccgctttttcgggggcgacctggaccgcgatgcgatgatcatgtaccagcgctaccgcttgaatgtgcgcctccataaggcttccgatgatttcgacctgtacgtggagccgttcctgggccttgaaaacacgagtatttcggccttcagaaagcaggtgcgcggcaaaaagaccccgtcgaaacagcaacattattggtgggacgacgatgacgagggtactgtcgaggcggattcccttgaagaaagggaaaatgacgactgccagaagcttttcaccttggacggtttttcgattggccttggccttggcggcggctataacctgacccggtatttctcggtgaccgccggtacccatgtggaatacaacttttcgaaggcctttttgctgaatatcgtgccgggggtggccttcaacctccgcgaagtgtggccgtgggccaagcgtacgctccgttcgacctgggtttccttcgaaatcggggctctaaagacgttcaataacgacattgacggctggtcgaacgtctttttcctgggaatccagttcggggcgtagggtagacctgcctccgaggattgacgtctaaatcccgtttttctatatttgctgcaccgatttttatcggaaccctcccggggccaatgtcggtttcccgggcgatagaccaaagggactcattatatgagacaatacgaaacgatggtgatcatcgacgctatgatctctgacgacgctatcaaggccgaaatcgagactatcgccgccaacatcaccaaaggcaacggcgaaatcctccgccgcgacgattggggcaagcgcaagctcgcttacaccatcaagaagcgccagcatggcttttatgtgatcttctactacaaggctgaagccgctacggtcgcctctgtggaagccgctcttaagctgaacgaaaacgttctccgctggatgactctcgctgattatccgatgagcgaaattgtttatgaccaaactcagacccagtccaccgaagatatcatcccggttgacgcagaagaaggggaggctgaataatggcttttgaagataagaagcaggcaacccgtatccgccgcaagaagacttgctggttcacggaaaacaacatcaagttcattgactataaggacgaaaagactcttcgtcgctttatctctgaacgtggtaagatcattcctcgccgcatttctggcacctccgccaagtatcagcgtatgctgaacgaagctatcaagcgtgcccgtcagatggctattctcccgttcgtttcggacagcttgcgctaataaggaggaactagactatggaaattattcttaaggctaatgtcccccatttgggcaagatgcttgacgtcgtgaaggttaaggacggctatgctcgtaactacctcttcccgcgcaagctcgctgttcgcgctactaaggaagccaagcttgaaatcgaaaacaaccgcgctgccgttgaagctcagttccagaaggaactcgctgccgctggcgatgtggctgccaagctttctcaggtttctgtcaacctcgaacgccgcgttgtggaaggcgaacgtctgtacggttctgtgaccgcttctgacatcgctgacgccatcaccaagcagggcgttaaggttacccgtgctcaggttgctctcgaagaaccgatcaagcagctcggtgtttacaccgtgacgatcaaggtcttcagcgacgttgaagctcaggtcaaggtttgggtggttgcagagaaggcataagtcttttctaaatcactagaaatcttaaaagccgctccttcgggggcggttcttttttttgcaagcgccgatcaagcgccgtcgggcgtcttgcgtttataacaaaaaatgcggacaaatgaatgtccgcacgcgattgaaattctggtggaaaattacttgttgatgaactgggggatgcccttgtacttttccatgttcttcatgatgctggccatttcccaatccttctccttgaagcggcggcggagcagggctacgaacacttccatgagcatcaggcagtcgtaaacggcgcggtgcatcttgtcggattcgatcttcatgctgatttcgtcgcggcgctggaacatgttggccaagatgccgagcttgtgggaactggcttcgggaagaatcgccttggaaatggcgagggagtcgatgaccgggttgccgggcacgagctgcgggttgttctgataggccacgcgcaagaagcttgcgtcgaagtttgcgttgtgggcgatgagaatggagctctgtccgcagaattccgtgaacttcttgatggcatcgccgacggcgggggcgtcttgcacgtcgctgtcgtaaatgtggttcacggcggaggcttcggccggaatcatcatgttcggcttcacgaaggtttcgagttcgccgagcagcttgggcacgactttgccgttcttggtttctacggtgaacttgacggcaccgatttcaatgatttcatctttctggttgttaagacctgtagtttcaaggtcgaaggcgacaaatttaggcggcattaaaatcacgattcattccttagttaatgagttatcaccttggtatatttgcaatcacaaagataatttaatttcgatgtcaatacgtgtcagcggcaggggtagaacaaatttatcccatgtttttagcgtgatgtgcgcgccgtacctggcgctgatttgccataggggagtgccgcttgttttggagagccagagcgagccttttttgactacgcctgccggtccgcgagggccgtcgagagccatgcctacaaagcggccttcgcggagcggtgtaagcaggtggcgcacgttggtggcgccgtgggtgctcgacccgcgtgtgacactgtaaccgagattttctacgatggtcgcgaaaaggtcgccgtcgttcgactgcgaaacgagcgtgtgcacgccccagtttttaaaggcggcggcactcgcgagtagatcttgatgccataccccaaggattcccggtgcgaatgattcgggcgttttgagcctgatgcgcaggcttttgatccagagggttacaagaaatgccttgaacctgaccttgaacggcggtttagtcatgcgtaaaagataaaaaaatgcaaaaaatgcccggtttgcccttgaaaaagggaataaatttacctatattgcgtttcactttggcgacgtacccaagttggtaaggggcggctctgcaaaagccttattcatcagttcgagtctgatcgttgcctctcaaaactccttctcaccccgagaaggagttttttgattttgtttgtaatcgctgtagaattgagcggtattcgtgagcaacaaagccccaggcgttaagctggggtggttgcgagagtgaggcaaagtcacattttaatgaaagtgatagagccgagcggtcttaccgtgagcaacaaagccccaggcgttaagctggggcggtgcgagagtgaggcgatgtcacgtttaatgaatgttatagagccgaacggtctataggattctttctcggtcttccacggccgcgctttacgggagtgccgtcaggcatggtcgttgcttccgggtgcttggccctaaagaagtcctggatcttcttggcgcgttcttcggccttttgcttggcgaggtccgcagccgacacgattacggccttgggcttgtcgccgcccttgaacccgaacgatgccttgagtacgcggcccgaggcgggcttcggggcttctgaaatcatggacttgggggcgctgttcaaggtcgcctctttaagcttgtagctcgaaaaactcgggctttcttgcgtgaaggcggtgttcagcattttctgcttttcggccgaaagttcgccgaacgcgggaattcccgggatggctgccttgggcttgaaatacaggtcgccctgcttgggaatcgaaccgaagatctcgttcgcgatgctctgggcttcttggtattccttttgctgcttctgggcgaggcggtctttcttggagggtctggcagccccgttcttgcgctttccgctaaaatccctctttttctcggaattctggatgatttcttcgtcagtgaggccgcggagttccggcggaacttcgatgatttgaagcgcgatattagacaaattctgatccataaaacccgatttttagccctttgcgggcttgtcaagagtgaaaaaagccaatttattgtaaaaaatgcgacccaaatttaaaaaaaattgaaaaaaatgcttgtcaagacctagaaaaaaaattttttttggactatttttgttatacatgcttcggtttactcaagaaatattacttgctctccgtgctatctctaatgaagaggaagcacatgaaatgtctaagaaggctcgagaacagttcgatttccttggaattcgccttgttccccgccgtgaggtgacctaccccatattcgacaagtatcctccgaaagatggtgacgaattggtggctagggttgaggacatgtgggcgcagccgtatcgtgaaatccagtatgcggcttgtgactacctgttccgccacagagttctgctcggtggacagcaccttgccttccttaaaaagttaatcaagacccgtgcctggcgcgataccgtcgatacgctcgccgcttgcgtcctgggtgacttggcactccgcctcccggcgctccgttccaagatcgcttcctggatccgcgacccgaacgtgtgggtgcgtcgcagtgcgatcattttccagattcagtacaaggatcgtaccgactggccgctgctcagacagttctgcctgacttgcgccaaggacgacgattactatatcaggaacggtatcggtcgtgccctttcggaatacgcccgaatcaacccgaccgaggtccgtcgtttcgtgcaagataacacctttgccgaacagaccgcccaggaaatcctccgcctgatctaaacgaaaaaagaaacaacttttaagcagccttcctgtaaatcttacgggaaggttttttttatgcaatttctttcgttgcctgtttgaggatttttgtcgaaaaactaaatttacgccatgcgttacggtgacatttcatttttccagagcggcgtggccgttcccctctttagcctttacagcaagcagagcatcggtatcggtgaattcttggacctgattccgtttgcccgttggaccgctttttgtgatttcaatattattc

SEQ ID NO: 876 - DNA, 23336 bp, synthetic construct
  misc_feature 1..23336: note = Synthetic
  source 1..23336: mol_type = other DNA
gcggatgaaacagaaaccccccagcccctcgccgatctggcaatggcgcgggcagaggtaacagtgcaccttgccgctgggtaaagtctcccaccagcgggcttcgtggagtttcggttgaaccgcagtagcgcccatcgaacttgccctgaaactattgtccccctgctttcacagcgtgtcaaccgcgaagactcggcacagcaatgaaggcggaaccgatatgagctaaaatgccggcagtctgccagcgccagaaggcgaggaaccatgcccagtccccaagcggaagaccactactaccggggagtcgatcattttggcgaaggcaggatggacgaggccatcgccgaatacctccaagccctcgagctcgatcccgccttggtggacgccctgcatgggctgacgcgggcctaccttcagaagggcgattaccagcaggccatccattacgcccggcggattgaagccgccgacccggacgacatcctggcccacaccaatctttcagtttgctaccagaagctggggatgatcaaggaagctgaagaagaagcgaacaaagccaagatcctgcgctggaagcagcagctccagaaataaaggcggtcaactaaccgcccctacattctcgcaacgcgcgccctcggaggttgcgcaagaattcgtcgccagcagacgctacgaggcctgcttctttaccggctcgcccacgatttgccggaaagtctcaagcgcctccggggcgcgcttcgcagaccactgttcaaacctttcggaaagcaattcgaggttcttccagacgaaaggattcttgcgcttgtcgcgccactccggcaccaacgccttgacccggaaccagacgagatagaactcagcggtattctcaaaaaagaaatcctcgttgatgaggccgcggttcacaagggaggccgccatgtcccagtaactgacgaccatgcggaagaaagcattctcctgcgttccagtcgggcatttcttgtaaaagtcctcgaccgattccgccttgaattcccgcgcgaaccactcgcgcgcctggcgcaacttctcttctcgccgcaggtcatagagccgcaacaacaactccgcatcgtgatggtctaagtgggtccgcatattctcctcccgaagattccattaggatcgccgcgccaggcgtggccgtgaagacgcttcctggtgcgaagcctcggcccttcaaccactcgctatcatagcactgctcccaacatgccattcgcccgacgccccgcgtaggctcacgccaggccgaatcactccgttgcgaaccaatgccctgaggcccgcgttcagtgccgccacgtccaggccgtgaaacaccgagagcaagtccttccaccgcgcgcaccgcgcaacctcaaaatacttcgtcaatattttcctgactgcgccttcgcgggaaatgcggcgcgaattgcggtgatggaagtgcgacgtacgaaccctcgccggatttcataattcagaattcataattcatacttcatctttcacacttcatactccgttcttcccagcctcttgctcatgactgatgtcggcgatcagcgccttgacctgcacttcgatcaggtcgcgcacgctgcggaagaattccaactcgctcccgaatgggtcagggatggtccattcgatgatgcggccctggaagcccgggggcacagggcaagccacttcgcagcccatccccactaccacatccatctcggagatggggacatcgtcaagccctttggaccagtgaccctcgagtgaataccccttctcagcaagcacttcttccgtcccgtcagcaatccagccagccggatacgacccggcgctccaggctcgcacctgcccctgcccgagatggttggcaatcgcttccgccatctggctgcggcaggcattgccgacacagacgaagagaatctggacgagtcgttccggcattgggcgattgcgtgattgagtcattgggtgattgagtgattgattcattgagcgacgactcggatgatcatccaatttcccgttttcttcaatcacccaatcgcccgatcactcaatcactcaattttttcaggaagtaccgatgaatggtttcgtccagggtaagctcaggatgaaaggtggccgccagcagattgccctgctcgaccaggacgggcaggccgtccgcacgccccagcacccgcaccgcttctcccacgcgccggatgatgggggcgcggatgaaaaccatctccaccgggcggtcggccaactccgggcactggcccaaacgcaccgagctgtcaatctgccggccgtagccgttgcgctcgatggtgatgtccagaagcgccagccgctcctgcggcggattcaacacgtccttggccagcaggatcgcacccgcgcaggttccgaagaccggcttacccgccgccgcgaacttcttgatcgcatcacccatgccttcgttggcaaagaacttcagcatggtggtgctctcgccgcccggcatgatgagcccgcttacttccgcaagttccgccgcgtgcttgatcagtcgccagggcgcgccaatgcgctccagcatcttcgcgtgcatggcgaagtcaccttggatggcgaggatgccaacgggtttgtttccgttgttcatagaaagagttcgttgtcagttgtcccgccgcggcgggtcagttgtcagttgctacccacggtgtaagaaatcgcctgctgcgcctatcatccaaacaagtttcgggccacaaagaagagattggcgggccgctcggcgagccgccgcatataccatggaaaccaaaagggcccgtaggcgatcagcacggtagaccgccaaccctcttttgccaatcgaatctgctctgcgcgctgtatgccgtacagcatctggaactgcagactgtccttacccaaacccaaagactctgccagttcttggacgcggcgaatcagcttgaggtcgtgtgtggcaatggctgttcgcaccccagcggtccgagcctcctcgctgaggagctgctggcacagaacaaagaaattcttgtccacatctttcctgcgcggaaacgcccgatccgggggctccttgtacgcgcccttcaccaaccggatggccgggccgagcggaatcaaggaagccaggtcggcggcagtccggtaaagatacgactgcaggcagacccccacgttcgggtaggcgaggcgcgcgcgacaatacagctcgagcgtcacatcgacgtagttgcttgcctccatgtcgatccaaactacacttttcaccccggcatgctcgatgattctctggagattcgcgtagcaaatcccgggactcaaatccagaccgagctgcgtgagcttgaccgagacttccgcgcgcaagcccagcgacctgatgcgatcgagcacctcgaggtaatgccgggtcacggagccggcctcacccgcctcggtgatattttcacccagatgcgtcagcaccatggcgataccattgccctgaagcacctgtgcggccgaaagcgcgtcgctgaggtcttcgccaggcatgaagcgtgagactgcgcggcgcacaaacccgtaccgcaggacgcgattccgcagccagacgttctgagaagcggacaggagaagacttcgcatcataggcgctgaacgatttcctccggaaagagcagatcgatacaatttgcccggcccgcttggacgcttcctgcgaacgtcactagtgttgtgcgtcgcacataactatacaatgcggctagattttgtcgtgaggatgaccgtcatcctcgccgtttcatctggaccgcaccggcttgcgagatcatgaagaacatcaaccattgtaaagaagcgttagacgcacaacactagtatcccatgcgctcacgcaatgacgtgatgtgcgccacgtgatggcagccgtgccaggcatacaaccctaaggacctgtccagattcacttcgcccaattcggggtgcttcagcgtccgttggaaatccgcggcacgcagggacttgagcagcatcacccagcgggcgtgaagagactcgagcaaggtgagcgagctttcgatgggcgccgtcttcgcgtccaccagttccgcccagcgatcctgttcataagtcttgacaagcggctggtcttcggtgagcgccagcttgaagcgcacgtaggcattcatatggctgtcggggaggtgatgaactacctgccgaaccgtccagccgccaacgcgatagggtgcgtcgagctgctgctccgtaagcccctgtacggcagcccgcagtttggccggggcttcctcgatttgttggatgaattcctcccggtcgcgttccgagacttgttccggccaagtaaacttgccaacggggtatcgcaggtccatgttctttctccttgaagcttgcgctgttacaggacggccaccctggaaagatggcattgatccattccttgccaccatgtaggggtgacccgctgggtcaccctctacccggggcgaggcaccgcctcgcccttacgacgtcgtcccgtaggggcaacccgatgggtcgccctgcacgcagggcgaggcaccacctcgcccctaccacatcgttatgttggggcgacctactgggtcaccctgcacccagggcaacgcaccgcctcgcccctaccaaccccgggtttgaagcaactccttcgggtcgagcttggcgacgtcgatgccgcgcatggccggcggagtcgctttcagacttgcacgtactcggtcgctgaggccggctccggcaccgggctgccctgctcacgcaggctggctatatgaagctctacggcctcccgaataagctgcaaggcttcctcgcgcgtttcccccacgacggcacagcccggtaaatccggaacataggccccgtagctgttcgctcctgtttccagaatcacaaggtatttcatcgcgcctgaggttcttcctgcctactgccttctgcctacagctttctaccagcctcgggtttgaagcaactccttcgggtcgagcttggccacgtcgatgccgcgcatggcctcgccgacttccgccgagcattccgccaccacctgtggctcgttgtagtgcgtggtggcgcgcacgatggccttagcgcgcttctcggggtccgacgacttgaagatgccggagccgacgaagaccgcttccgcgcccagttgcatgacgagcgaagcgtcggccggcgtcgcaatccctccggcgctgaagttcggcacggggagtttgccctgctggctcacccatttcaccaggtcgtaaggcgcgcccagctccttcgccttggccatcagttcctcttcgcgccgggtggtgagcaggcgcatctcgccggtaatggcgcgcaggtggcgcaccgcctcgacgatattgccggagccggcttcgcccttggtgcggatcatggccgcgccttcaccgatgcggcgcaacgcctcgcccaggttgcgcgcgccgcacacgaagggcgccttgaagggccacttgtggatgtggtgctcttcatcggcgggcgttagcacctcgctctcatcgatgtaatccacgccgacggcttccagcacctgggcctcggcaaagtggccgatgcgcgccttggccattacggggatggtcaccgcttccatgatgtcgcggatgatcttgatggaggccatgcgggccacgccgccttccttgcggatgtctgcgggcacgcgctcgagcgccatcaccgccaccgccccggcgtcctcagcaatcttggcctgctcgacgctggtgacgtccatgatgacgccacccttcagcatctcggccaggccgattttcagtttcatttgttgatcgtattcccacatggaaaatctccttgaagagcagtcaaaaagttgaaaggtctcaagttgaaagtctcaaagcgcaagcttctcaccttcgactttcaactttggacttttcgactttttctcacaccagcgccatgccggctcccaccgtggaggctttccttcccgccttcaccttgcgcatttcccctttgagcaattccccgaggatggcaattcccttctcgatctggtcatccgccaggcccgtgaagcagaggcgaagggcgttgtgtcggggattctgaaagtagaagtagcgcgcgggggcgaagatgacccggcggtcctgggctttcaccaggagttccgcggcgtccagttgtgccggcaaatccacccaggcggacattcccccttccggatagaagacccgggcggccggcgggaagtgtcgcgccacggcccggcccaggacccccagcttgcgcgcgtagaccttgcgagtgcggcggatgagcttgtcaagccagccgcgccgcccgaattcttccagcaccgcctggcccagcaggttggtgtgcaggtcggcgcgctgcttcgaccagcgcaggcgctccaccagccgccgcgaggcggcgatccatcctacccgaaaacccgcaaatcccaccttggaaaaactgttcaagtaaatcaccagccccgccgtgtcgaacgccttcaaggggggcagttcccggccactgtagcgcagggcgccgtagatatcgtcttccaccaggggcgtctgagagcgcgtggcgagttcgagcagccgctggcgggccgccaggggcatggtccgccccgtggggttctgaaagttcgggctggtcaagagcagcttgactttgttctgctcgagcacggcggcgaggaaatccaggtcgatgccttccgcgctgacgggggcgccaatcagccgcacccccggggagtcgaagaggtgccacagccccgtgtaggtgggattttcgcaaatcactacgtcccccgaagccaccagggagcggcgcaacaggtccagcgactgctggcagccgttggtgatgaggagctcgtcgaactccacgaggatgccgtcccgccgcaggcgcgcctgcaagtagcgcttgagaggcgggtagccgtcgctcgagccgtattggaagatcttcccgccttcccggcgcagcaccgcgtccgtggcgcgccgcacgaggtcggctggaaccagttcctccgaaccatgggcgctggcgaaggaaataacacccgaggccaaggcgctggccatcaggcgacccagagcatcctcgcgctgttcctcagggaaaaagctgtcccaaaaaacatcgttgctggcgcggcgggtgggcgtgcgggcagatttcaggctggccgcgagcggcgtgacgaaggttccccgccccaccgttccggcaatcaacccttccgcttgcaggtcggcgtaagcattgccgacggtggtgcgatgaacacccaaacgcttggcgagttcgcggctcgcttccaggcgctcgccgctggccaatgtcccggagaggatgcgcgcgcggatctgctcccaaatctggacgtaaagcggtttgtgcaagctggaatccagtgtcaggagcaccgcagccctagcctcccggtcataattgccagtccaatttatgccaagaggcgtggattgtaaagagccaagtagtccaaattggcggcaggccaaatcggcctctgtagcccgggtctccgagcaccacctggctcggcgctcccccacaagtcggggcaggcgcccagcgccgccagagcaacccgtacggctctttaccaagacccttcagggggaagcgcccgctgcttgctgcatcctcgcgcgcaagcgctcgcgcaggtcgggaggagtggaagggttacacgccaccaggaaccagaggggttcgctggcctcttcggccatccgccggaggaccgctggtggcgtgtgcgggtggcgagccgcgttctcgcgcaccgccgaataggtatgcgtggccaggtgttcgagcagctcgccgggggcttgcggatgctcggtcagaacacgcgccagaaggtagtcatgcggggataaagacccagccagccgcagcagttcctgggaggtggtctgggggttgcgcgcgattttgagtttacggtcccaggccgggctgaggcggttcagttcttgcgtgcgaacctggatgagcttcttgagttgcttcagctcggcgcgcttgcgggccggtggcaacttggctcgctgcacggagcgccaaacctcctggaggtgttgtctctccccgaagatcgcctgagttccgcgatggatcttgcgggctgtaaacttggttcggacatccgcgcctggcatcggccccctccgtctgaagcgaaatcgtggaaaaagccacggtcccatccccctctgcaggaggaccgtgaccacccctaagaaccctttataaccaagccggcgacgaaaggcaaaggcgaaggacaacgcgccacgggcggcgggcgtcattcctgctataatccctgcgcctattgcctgctgcaaggagaaccctcgtgaccaccaacctccatcccgatgcgcaacttttggatcgggaatcggccgcgctggtcgtcttagacctgcaagccaagatacttcctgccgtcgttgagccccagcggctgattcggaacacccagctcttgctgcgcctggcgcaagtcttgggactccccaccgtcttgacctcgcactacagcaagggcctggggagcatcgtcccggagatcacccagttcgcgccgggcatcgagcccctggagaaaaccagtttcgggtgtttcggcgagcccgatttcctgcggcacctgaagcaacgcgcgccccaggcaaggttcctgctggttacggggattgagtgccacgtttgcgtgacccaaaccgttctgggtgccctcgcggcgggctacctggtgcacgtggcggccgacgccacatcctcccgcacgccggagaactggcagatcggtttgaaacggatggagcgcgccggggccgtcatcagttccacggaaatggcggtttacgaattgcttggcaggagcggaacgccggaatttaaggaaatccttcccctgctcaaatagaagaccaaaactcgaaattcgaaactcgggctaaagctcttgcaggtagggattgtattcgcgttcctcgccgatggtggtttgggggccatgaccggggaacaccggcgtggcatcggggaaaatcatcagccgggtgtggagggaacggaggatctcctcgaacgacccgccccacaggtccgtgcggccaatgctgccctgaaagagcgtgtcgccgctgaagattctctgctggtcacccggcaggtggagagaaaggctgccgggcgaatgtcccggggtgtgcaggacttccagcgcgtaagggccgaagcgcagcgcctccccttccttcaggaattggtccacctcaaccgtgcctggggcagggacacccagcaactcagcctgcatccccatgttctggtaaaggggtaaatcaccttcgtgcatgaggagggcagctccggttgcctgcttcagcttctcgactccgcccacgtggtcgatgtgagcgtgcgtggcaatgatgtacttggcgcgtagcttgtgccgcgccaggatctcctgcacgcgctcgacctcatcgccgggatcgatcaccacggcttccccgctcgcctcgtcgcccacaatcgagcagttacaggcgagcattcccaccggaaggatttggtgaatcagcttcttctcgcccttctccacgctctattctagacccctgccgcgcccgaagagtttcgcctttgaggcgagccagacccttccgggaaaattaaaagccccgcactgggcggggcttaagggcgctattgctagcggagccttacgcagttgaacctacttactaagataagcaggaaccgctgctgagatacacgtgtgttataataacgccatctaacttcctgtcaagaggaaaacatgcccgaacagcccccacaagatttcatcctcggtattgatcttggttcaaactccctcggctgggcgctcattgagcgcgcgaacggcgggcccgccggactcttgcgcgccggcgtgcgcatcttcgaagctgccaccgaaggtgaccgcgaatccggccaggaagagtcgcgcaaccgagcacggcgcgaagcccgctcccatcgccgccagctctggcggcgtgcccgccgcctgcgcaagctattccacctgcttcagagctacggccttctacctgccggggtcgccaccgaaagggaacgacaggacctcctcaacgaactcgaccgctcgattctggcctcgtcctggttccgggcgaaggcggactcgggcctcttccctgaaccctctcaggctcttccttatatccttcgtgcagccgcgcttgatgaaccgctcgaacctcacttcctcgggcgggcgctttatcatctcgcccagcgccgcggcttcttgagcaaccgcctgaagcctgcaaagaaagacgatgacgaaggcgtagtcaagcaaggcatcagcgaactgcgccagaaaatggccgatgcaaacgcccacacgctgggtgaatacctcgctcatctttcaccgtcggagcagcgtctgcgcggccgctggactcaccgcgacatgtaccagcacgagttcgagaagatttgggacgcacaggcaaagcatcatcccgcgctgctgaccgacgagcgcaagaagccgctcttccaggccatcttcttccagcgtccgctcaagtttgaccctgccgtcatcggcaagtgcgaactcgagcctgactgccagcgcgcgcctgcctatctgctcgtctcgcagcgctttcggcttcttcaaacggtgaacaaccttaaagtcctccctcccggcgaggcggagagagacctcgcgccggaagaacacgcaaaactaatcgaggccttggaactccagggcgatctccatttccaaaaggaccgcaagtccaatggcaaaacacttccgagcgtccgcaagttgctcgatctgcgcaaaggctgcgccttcaatctcgagcgtggcggggaaaaatccctgaaaggcaatcgcacctttgccgatttctacgcggtctttggccagcgttggctcgatatgcccccccaggagcgtgatgccgccgtcgagtacgtttacgctttcgagaagctggacaagctcaaagaagcggcaaagaagcgatggagcctcgatcaagcagcggctgagaagctggccgagaccagcctcgaacccgactatatgaacctctcgcgccgggccatggagaagctgctgcccctcttggagcaaggtgtgacctacgcgaaggcccgccagcagctttaccctgagaagttccaggcacgcggcgagcttccgtccttgcctcccgtcgaggcagctagcgatccggccaaactccaggagtgggtgaaacgcgcgaaggcgttgccgcccggagcgcagttccccgatccgatcagtgggatccgcaacccggcagtcatgcgcagcctcaccgagttgcgcaaagtggtcaacgcgattgttcgccagcacggcaaaccttcggagatccacattgagctcgctcgcgaccttaggaagccgaaatggcaacgccaggaagcctctgaccgcatgcgcgccaacgagaaaggccgcaaggccgctgccaagcgcatcccggatgagacggaaattaaggaccccaagccggacgacatccgcaaggtgctcctcgctgaggagtgcggctggcaatgcccctacaccggccgcacgatttccatgcgcaagctcgtggggccggaatcggagttccagatcgagcacatcatccccttcagccgctcgctcgacaacacgttcgtcaatctcacgctctgctacgttgaagagaacaaaaccaaaagcaaccggaccccttacgaagcgtatagtggcgactcggatcgttatgcggcgatccttggccgcgtgaagaagtttatcgccagtcgcggcatggtggccgagaaactgaaacgcttccagatgacgcccgaacaggtcgagggcatgctgggggatttcagcgagcgtcaactgcgagacacggcttacgcctcaaagcttgcgtcccggtacctgggcctcctttacggcggcctgagtgacgctgagcatcagcgtcgcatccaggcgactcccggtcgggtgacagccttcctacgcaacgagtggggactgaatgccatcctcagagatggttcaacggataaagggggcgcggtcccaaaggagcgaacggaccatcgccaccacgccgtggacgccgtcgccattgccctcacgagtccgggcaccgtcaagcaactgagcgacgccgcccagcgcgcgcccatcgagcaccgtcgccggttcgcgtctctccaagccccctggcctgacttcgtcgattccgtccgcgacgtcatcaacagcatcatcgtctcccaccgcgtctcgaaaaaggtcagcggcgcgctgcacgaggagaccatctattcccaaccgacggctgtagcgccggtgtcctcaccggcgaagaagacacggcgctcagagaccgccactatagaagggaccgaggtccgtgtgcgcaggccgcttgagaagctcaccaaatccgaagtccaggacatcgcggatgaccgcgtcaagcagatggtcacggagaagctgggcgacggcgatccgaagaaggttttcagcaataaggataatctccccttctttgagaccaccgacgggcgccgcatcccgatcaagcgcgtgcggctcaacaaggccgtgcccacgttcgcactcggcgagggtcgcacggagcgtcatgtcacgagtgaatcaaaccatcacctcgaaatcttcgccgaactcgatgagaacgggaatgaactcgaatgggacggcgtggttgtctcaatggcggaagcctacctccgcctgcgccttcaccagcccgtcgtccagcgcgacttcggaccccaccggcagttcaagttctcgattggccaaggcgaagtcctcgaatgcgatgatcccggcgggaaccgacgcgtccttgtagtcagaggcgtgtggccgcaggtaaagggctcaccgcgactggccgccgtcgccatcaatgaagcacgaaaaaagcaggacatcatcagctctaagcagttcctgagccctgttgttaacacgctgatgaagtggcacgcccgcaagatggtcgtcagcccgctgggggaggtgagcgaagctcatgactgaacgcatcctcgacatcgccgaccgccccgcgttcttgagcgtgcgcaatgcgctgctggtaattcgcttccccgcaccctcacccccggcccctccccaagcggggaggggagtcaataactccgattccaaccctctccctgcgggagagggtggacccgcagagcggggccgggtgaggggtgacagcggtgaggacagcgccgcgacagagggccgtaacgacgcgccatacgtccatcgcggaaagcgccaggatgaaatcactatgcccctaaccgacattgccgcgctcatcgtttcacacccgcaggtcacttacactcatgccgtccttgcggggctcgccgaggcgggcgccatcttcgtcgcctgcaaccccaaacacatgcccgccgccatgttgctgccgctcgaaacccactccactcagaccgagcgctttgcgcagcaggcggcactatcgcagcccgcgcgcaagcaaatctggcagcagatcgttcgcgccaaaatccttgcccaggcccgccttctggtggatagaaccgccagcgattccgggcttctccccatggcttcccgcgtgcgctccggagaccccggcaatctcgaatcccaggcggcgcgaatctactggccggcgctctttggggatttccaccgcgaccccgagggcgaggggctgaacgcctgtctcaactatggctactcggtccttcgcgctgtcgttgctcgggctttatgcggcgcgggattgcatccctcgctcggcgttcaccatcacaatcgctacgacgccttttgcctcgctgacgatttgatggaaccctttcgcccgctggtggatcgcgtcgtggcgggtcttcgcgacgcgcacggcccggacgtgaccgtggataaggactcgaaggctgccatcattcaaggcctgctgcagcgctacaccggcgagggcgaatcgcgcaccttgttcgattgggcggcccgcgccgcctcttccctcaccgccgtcatcgaaggcagcgccgagaagttggaggtcccaggcctgacacctggcacctgaaacctgtcacctgacttgccatgcctcgccaagaattcgcactctcaggatatcgagccatgtggctatttgcgatgttcgatctgcccgtggataagcccgaactgcgccacgagtacgccaagttccggcggagactgctgcgcgagggcttcaccatgctgcaattctccgtgtatgcccactacgcggccagtgaggacgccgatcagtcctaccgcaagaaggtgcaggacgccctccccagccacgggcaagtgcgcctcatctccgtcaccgatcggcagttcgaaaagatggacgtttacgtgggaaaaaagcgcgagaaggtcgaggaaccacccctgcagatgatgcttttttaggactcagaaagaggataaccccccgtcccgcaaggcggaacagggggcatagtgtatctcagaagcggttcccggcaaaccatagcggtacctgagcgccgcgtacaactccgcgtagtgtatctcagaagcggttcccggcaaaccatagcccgcgtggcgatgtttgaggtcgagggcagagtgtatctcagaagcggttcccggcaaaccatagctctacttatgccacatccagggttgttggagtgtatctcagaagcggttcccggcaaaccatagctctggcgcggcgacgtctcccggcagaggaagtgtatctcagaagcggttcccggcaaaccatagcatagctgcaaccattgagaaggtatgccaaagtgtatctcagaagcggttcccggcaaaccatagcgtccgctgcttgcgcctgctgcccaattccagtgtatctcagaagcggttcccggcaaaccatagccaagggtgggcaattgcggcagtgccctcgagtgtatctcagaagcggttcccggcaaaccatagcccggctgcacggaccaagcggtcatcggcgagtgtatctcagaagcggttcccggcaaaccatagcgggggtcaaggcggaccgcttactggctaaagtgtatctcagaagcggttcccggcaaaccatagccaggccggtgagcgtatggctggcgccgaaagtgtatctcagaagcggttcccggcaaaccatagctgtaggagttgtgggacggcggcggcgatgagtgtatctcagaagcggttcccggcaaaccatagctgagagggaggcgagggcggcgcgcatggcagtgtatctcagaagcggttcccggcaaaccatagctagccagacgtaagcgcagcgggggttgaagtgtatctcagaagcggttcccggcaaaccatagcgataatcccgccgcaccaactgggtcagcaagtgtatctcagaagcggttcccggcaaaccatagcgtaatcgacccggtggtggtgcccgtgccgagtgtatctcagaagcggttcccggcaaaccatagctcgctaccgggatggtcacgcccacggaatagtgtatctcagaagcggttcccggcaaaccatagccttggggagctccgccaccatggcgccgtgagtgtatctcagaagcggttcccggcaaaccatagccatcaccgcgcggtcgagtttggattcagaagtgtatctcagaagcggttcccggcaaaccatagcgccacgccttggccgtaccgactcgcgcccagtgtatctcagaagcggttcccggcaaaccatagctcgcggaccttcgagatcccccggttcagcagtgtatctcagaagcggttcccggcaaaccatagcctcttcctcacgctcccccgctatcagccgagtgtatctcagaagcggttcccggcaaaccatagcgcaaacactcgccgccaacttcccgccgggagtgtatctcagaagcggttcccggcaaaccatagcttcatcgaccgggtgttcatccacgcgcggagtgtatctcagaagcggttcccggcaaaccatagcgcggggggcgcggatacacgtatatccagaagtgtatctcagaagcggttcccggcaaaccatagcggagatcgaccaagtgagggcggaacatggagtgtatctcagaagcggttcccggcaaaccatagcggttgcgatcgcggcatctcactccaccggagtgtatctcagaagcggttcccggcaaaccatagccgacgcccagccgctcgccatcctctgcgaagtgtatctcagaagcggttcccggcaaaccatagcccaacttccaacggcgacttgatgcggcatagtgtatctcagaagcggttcccggcaaaccatagcgtatcggtccccggcatcacggccaggcccagtgtatctcagaagcggttcccggcaaaccatagcttgtagctagagcttgaaacgaggacgatagtgtatctcagaagcggttcccggcaaaccatagcgcgccgtaaggcacaatcgcgccagacgtaagtgtatctcagaagcggttcccggcaaaccatagcagtcatctgtttcatcccactccacgccaagtgtatctcagaagcggttcccggcaaaccatagcccacggagcgaggtagaggcgactcgcctgagtgtatctcagaagcggttcccggcaaaccatagcccaccgctggcggcgtcttgaatgcgtttcagtgtatctcagaagcggttcccggcaaaccatagcacgcgggcgtagatggcgactctcatttttagtgtatctcagaagcggttcccggcaaaccatagcgaatgattcgcaaagcatccatgcggcaaaagtgtatctcagaagcggttcccggcaaaccatagcgatttaagcgcaaccgcaattgagaatggagtgtatctcagaagcggttcccggcaaaccatagcacttgttgcgtctctgcgcactcaatgtgcagtgtatctcagaagcggttcccggcaaaccatagcttggcagcgtatcttcccgccgcttggaccagtgtatctcagaagcggttcccggcaaaccatagccgtaacccacgcggtccgcaacttccctaaagtgtatctcagaagcggttcccggcaaaccatagcgtgaccgtggcgatcaacgcgagttcgcgcagtgtatctcagaagcggttcccggcaaaccatagcgagttgtccgctgggcccgccgagaaccttagtgtatctcagaagcggttcccggcaaaccatagccatagccgcgcacgttgatgtgcgagccgagtgtatctcagaagcggttcccggcaaaccatagcggcgtggagctcgtggcggactgcgagttcagtgtatctaagaagcggttcccggcaaaccatagcagcgtcgccgaagtcaccagacccacgaaaagtgtatctcagaagcggttcccggcaaaccatagcggcagggacgtggcctcgggcttcgggctcagtgtatctcagaagcggttcccggcaaaccatagcatgcaagccctgatcgtgcaaggccagcagagtgtatctcagaagcggttcccggcaaaccatagcaaggagggatcgttgatctctgctggtgtcagtgtatctcagaagcggttcccggcaaaccatagcgctgtgatggcgagtccttggggctgtgtgagtgtatctcagaagcggttcccggcaaaccatagcatatcatgcaggttcggcgccggcgtctggagtgtatctcagaagcggttcccggcaaaccatagcagtttcacggggacatactcgggcctacagagtgtatctcagaagcggttcccggcaaaccatagcgcctcagctttcttggcttccgcaagcgcaagtgtatctcagaagcggttcccggcaaaccatagcgtgaacgagggcgggtcgggcttcacctcgagtgtatctcagaagcggttcccggcaaaccatagctgctcttccgactgcacgaagacctgcaaagtgtatctcagaagcggttcccggcaaaccatagcgcgcggggaccgagttcgcgggcggacaacagtgtatctcagaagcggttcccggcaaaccatagcggaggaccgccggatctggtggtctctcacagtgtatctcagaagcggttcccggcaaaccatagccaaactcgatccggtccttctcgacgtgcgagtgtatctcagaagcggttcccggcaaaccatagccctcgagttggagacgttcggcgcgagtgtagtgtatctcagaagcggttcccggcaaaccatagcaactcggataacctcgccccacggcggagtagtgtatctcagcagcggttcccggcaaaccatagccgctggcagcaaaccctcaccgaagcgcaaagtgtatctcagaagtggttcccggcaaaccatagcagcgcctacatcgggccgtgacgggcgcagcgtgtatctcagaagcggttcccggcaaaccatagcagcgcctacatcgggccgtgacgggcgcagcgtgtatctcagaagcggttcccggcaaaccatagctgccgtgctcaccgccggctccccacggccaacgcacaatgcgttacaatgctttgcttcttgggtgagaggttgtcgaattccgtcccgggaggttttcgtgcgcaagcgactgctgatcgtcaccatcctgaccgccatcttccttcttctggctcttcctgggccgggcacgaggggcgccccgcaaatcgacaaccagcagttcccccgccggcccaagttggtcctggtgctggtgattgaccagttccgatacgactacctggtgcgcttccgccagcagtttgtcgagcacggcttcaatctacttctgaagggtggggccaacttcgtggattgtcggtacgactacgccaccacggagaccgggcctgggcacgccacgcttttcaccggcgcgtacgggaacatccacgggattatccagaatgaatggtacgaccgcgctctgcgtcgggaggtttactgcgtcgaggaccgcggcgcgaaactcctgggcgagccggagggcgtggcggagcaagccgggtcttccccgcgcaacctgatgggaagcactatcggcgatgagttgcgggcagcgaccaacttccaggccaaggtcgtcgctatttccctcaaagatcgggcggccattcttcccggaggccacaccgccaacgccgcctactggtacgactcgaagacaggccgctttgttacgagcacttactacatgccctcgcttccctcttgggtgagccagttcaatgagcagggaccgacgaagagcttctgcggcaaggcctggcaggccttgccggaaaccccaggcgcggatggcaaaacgctcaaagaggcggccacttcgccggctgagccctgccccggccccaaattgctctcctggatgatgagtacacctttcatgaacgaagtcgaactgaactttgcccgcgaggccatccagaatgagcgcctcggccagggatcggcgaccgacctgctctccatctccctgagcatcaacgactacattgggcacgggtatgggccttacagcccccaggtggctgacaccacgctgcgaaccgaccgctacctggaggctttcttcggcgatttggacaagctggtcgggttggaaaacgtctggattgctctctccgctgaccatggagtggcccccaccccacggttcgtccaggaacatcgactgggcatgggccaattcaagccggaaactgtcaaggcaacggtggagcaggccctctccagggccttcggtgaggacaagtgggtggagtccgccaccggggcctacatctacctggacctggcgacgctcgagaagcaccaggtggaccgggcccgtgccgagaatgtagcagccgaagcggcggtttcagtgccgggcatccgggcggccttcacccgaacccatttcctgaccggaaccctacccgggaaccctctggctcgcaaggctgccaacagcttccaccgccaaaggagcggcgacgtcttcgtggtcgagagcccttacgccgtggcggcccacactgagaccagcaccactcacggcagcccttggaactatgactcccaggtgccactcgtcctatgggggagtgccttcaagccgggagtctatgctactccctgccagcccattgacctggcggccaccctggcggcagccctgggtttgactcagccctcggggacacagggccagccgcttgctcaggccctgaaatagcggggctgggaactcgggaaccggggctcgggactcgggaaatcgccgggcaagctactctttggggtgggtgaacgggtccgcttttcgccgaaaacgcccctctgaaggccgcctctacctcgcttgtgtgcccacgtgagggccgcctctgctttgcccatagggccgaaaaccacctccacctgcgctgcctgccagctggcaggctgcctccccgaaaaccgaccaaccggacggtaatcacctaccgaccagacggtagatgactccgcagatagaacttgacaaattctacaagaatttgtaggataggagacactttataccttccctaacgcctggagattcaaaagaaagactgagctgtgggagtgggtataaggaaactgaatggaggttgaatgaggaaactggtcatgggctgtgcggtggcaggattgattgccctgtcacccaagtctgaggctagactgccggcttccctgacgacgcttcccttatcggtgcgacaggcaagaatggagattggcgtggcaagttggtacggtgaggaatgtcacggaaaccccacggcaagcggtgaaatatttgatatgaatagacttacagcagctcaccgcgaacttccattaggcaccaaggtcaaggtaacaaaccttcgaaacaagcgcaccatcgtcctacgggtcaatgaccgcggccccaacattggccaacggatcattgacgtttccatggtagcagccaagctgctgggattccttcgggcagggctgacgccggtcgaggtcgaggtcatcagctacccgaaaggttacgccgaccagcaagttcgactgggaatcccgttccaagcaagcaaccaaaactagccagggacgccggcaagaaataccggagtagattagaccgattggacggtcggggcatcagtgtctgccaatactggcctcccccaccactgaatgaacctcgggcgtaacccaaagccgagaggcaagctgagtggatcgccggctgttcccgggcaggaagtggtagcgacccgcccgtgccgcgaaggagttgcccgagacgggcgtgccactggccgccagcaaccctgatggcccttccctcgatcatcttgaaggatggttccacgccaggggccgtgcttgcctacttttccgcggggcgcggcgccttgctgtcggattcaaagatggcgatggcctcaatctccaccaggaggtccgatcggcagaggatagcctgaacgccggtagaggcgggcagaggattcaggccctgctcccggaagaactcggtgcggatctcgttgaagacctcgtaatctcgctcaatatcccgcaagtagcaggtggtgcgaaccacatccttccaggtcgccccttctgattccagcaagccggtgatattgcggtaagtccgccaagtctgcgcgcggaagtcaccgggatggacggtccggccaccctcgtccacgctggccgtgccggagatcaacaagatcgtaacccctttaatatcaagccggatgccgcgcgagaaagaggaggggtgttggtagttgtacgcctcgttcaagacctgtggcgcgctgatggccttcttgagcaggggcgcggattttctctccgccgcaggatccgttgcacgatttctttccgatttgctcataaaggcggactctcctcacgattcacgccggggcggcccggctaagcaatacgcatggctaagaagctccctgataacgggttccggatggagcaggctccccaccagacacagagagagcctaccacgggcaggaggtcaagatcaacgggcggtccttcccccgctgccgtcaagctgcttgtgcaagaaattcgcggctgcgccttggcccatcctggttgaaacggctgaagatggcgcccatgcttagctcaacgctttggcatgaccttttggcttttgcgtcgtctaattcggtcgagggggcgcaagaggccggttgctgattggggagccgggagccgtcgcgctggagaacgagaatcgctggccagttcccccatgcatggcgccgacgaaggttggtaggaagccggaaggacactcgaagactcaccattcaggtctggcagggggggcttccagcgcctgcgaaggaagagggggacaaatagtgtctcgtttgtctcctcgcagtgcggcggcgggattaaaacctcgccctgccgcggtcaccccagccagtccttcagcttcccgcgaggccgcaaccgacggcgttaacctcccacaagcaccattcctggaacatattactgcgcgtagtcgtactggaagtaaagaggcaagggggcagttatggtagagataaaaaccggagcaaacagtcataaatcccgccgccggcgtcggctgtggatcattgcgggggtcgtcggactactgctggtcccgaccatctggggaattgccaaggtgctacgaccgaaccacgagattgacccttcgaagttagccaaggtggagaagggtgacctggcccgctcggtggtggccaccggcaagatcgagccactggcgaaagtcgaagtcaaatccaaggccagcgggattgtgaaacagatctttgccgattacggcgaccg

SEQ ID NO: 877 - DNA, 23330 bp, synthetic construct
  source 1..23330: mol_type = other DNA
  misc_feature 1..23330: note = Synthetic
gtgtacgtgggcaacgtccccggccatcccggcgagagcacatattgccccaaatgtcggcgcgtcgtggtcgagcgcgtgggctatactgtagccgccgtcaagattcgcaaaggcaagtgccagtattgccaggaacccatcgccggcgtgtggggagcgtagggctggttgcgtgcttgctggctgattcggggaactgcccccttttgtgaccccaagatgcggactagagccatgaaaaaacaatctgtttatcggcctatcgctctcgccactttctgcagtgctttgctccttggtctggtcgtacccgcttgtgcgcaggcgccgaaagtccggccagccttcaacgccggaggtttctacccggcggacgcgaaggtgctcaccaagatggtggatgactttctggcacgggcggcggttgagcccttgagcgagccgccggtggctctggtttcaccgcacgcaggttatgaatattccggccaggtggcggcgcactcctatgcgctgctcaagggccggaagtttgcgcgggtagtggttatcgcgccgtgccacgtggagaacttccccttcagctcggtgtatgatggagatgcttacgctacgccgctgggcaatatcccggttgataaggaattcgccaagaagttagtgggcctgagccgggacatcaaactctccgagcgcgggcacgtgcaggtcgagggtcgcggagaacacgcgctcgaagtggagttgccgttcttgcagcgggtactcggcggcttcaagctggtgcccatcgtgatgggcaaccagaactacgacctggagcgcgcgctgggagtggcgctggccaagctcagccaggacggtgacacccttattgtcgccagttccgatctttcccactttcacccttatgacgaagccgtgcagcttgaccacaaagtcctgcgggccatcgaggagtgggactacttcaacatgtcccgcaactttgagagtcgcacctgggaagcctgcggcggtgggccgattgtagcggccatgattgcggctgaacggctgggcgcgcagcaggcgaaaatcctgaagtacgccaattccggcgacgtgaccggcgacaaaagtcgcgtggtgggctatggcgccgcggcgttgatcaaagagaaggccggacgcggcggcaagacccaagccttttcccttgggcagaaggaaaagaatgaactgttgaagattgccaggaaatctgtggagacttccgtgcgagagagaaccctgtactacccggcgctcgaagggtttgcgtctctcgagcaggagcgcggcgccttcgtcacgctgaaggaacacgggcaattgcgtgggtgcatcggctacatcgcacccatcaagccgctctatatgacggtgcgcgatgtggcggcgcacgcggcgttgcgcgattcgcgcttcacgccggtgaccgtcgatgagcttggcaagttggagtacgagatttccgtgctttcgccgttgcatcgggtcgcggacatcaagcagattcgcgtgggccaggacggattggtgctatggaagggcgagtacgagggagtttttctgccccaagtgcccacagagcaaagatggaacctgatgacttacctcgagcagctctgttacaaagccgggcttcccaaggatgcctggcgcgacgaagacgccgacctcttctcgtttaccgccattgtgtttggcgaccgccatatttctgacaccatcacccctgaggagcctcggtccccggcgcagagaaaaacgccaggactgccggagccaggttcaccaacgccaccagcaccgcagttctgaggaatccaaacaccggcacaagataagcgctcagggcgactgcgcccaggcaggaacccaccaggtccagaccgtaaagtgctcccggattgccaaccttgcccactgaacttgagaagtaaatccggctggccagcgggaattgaaagccccccagaaaccccaccagcatcgacaggataggaaacaacccttggcttatcacgaagagttcccaaccacttccgactcgcgcaaaagttctaaacaacccgtacaacagcagcggtgaaatcgcggccacaagctgcagcgcgccgagcaggcgcaactggccgggtttgacggcgccggaagcggcgcgctccgcccccagtctgcgcaatgccccccaactacccagggctatccccagcatgaaagccgcgatgagcagcgccagttgctggtacacgtagccgtagatcgcctgaaaacccaggagcagcagcagttcgagccccaggagcgtgaaccccatggcagccaccgagaagccagccatccccctgtagcggcgctctatgagcgccgaggccttgccgtcggagacacctgccacaatctgcggccaccagcggatcaagcccgcgagcaaaaagagcaccgcggctatcgcggccagcaatttgccgaatttgatcgccgcgagcgtcgcgaaccagggagtcgaagcgggatgaaagcgcgtgctccacagcgccatatcgaaatagtaggcgatcggcgcgaagtcgcggttgatgggagtatccgcttgcggggagatttgcagctcgagatcgagcagacggtcgggtgtcaggcggaacgggatgtagtattcgcgcacatagagcgttcgcagttggcgcgcgcgcaggcgctctacgaacaccgccgggttggtggtcagggttccgggccggttggcggcaaagaagtggacctcgctgccggggatggcggtcacctccgggaacacggtgcgcagagtcttgttcaagcagcgcaggaaatcggccagccccgggctgatgtagtcctccgcgcccgtgacctgaaaggagaacagtccgtcgggctcgagtttccgcgctgcttcgcgaaagaattcttcggtgtaaaagcggttcagatgggccgtctgcgggtcaggcaggttgacgatgatgacatcgaacttgctggtgcaggtctttagaaacagccgtccgtccgtgcgatgcagacggacgcgaggatcgctggcgatgggggaccacgcttcagggaaatattgctgggcaaggttcaggatcgccggatcgagttcggcgtagtccacctgcgccacgcttggatgctgaagaatctgggccacactgccgctcacgcccccgccgatcagcaggacgcttctgggggatggatgctggagcagggcatagtggacggcctcttcggccgcggcgggatcgggaacggtgaacacaaccaagccgttttcgtaaaggcttcggctggattccgtctggatcaccgccaggttgccgtagagcgagtttttggtcgcgacgacatggaatcctcgccacaggcgagcgagcgagaccgattccagtcggcgagaaccgaaaggaatgaccgcaagcataaacaccaccagcaacgcgcccaaggcgaagcggcgacgcgcgggtgtccgtaccgcgagcgcggttgcagccatcaaattcagcaggctcaggaggagcgcaatctgcgaggcgtcgaggtaacggatcaacacgaggctggccaagatgccgcctagaccagcgccgacggcctccagcagataaacggagctagaagctgcggcggtcggggcgcccaccgtatcggcataaaggcggctgcctgccgcgaagagcaggccggaaatcaggcaaaagaagctcagcgtaagcagcgaagtgagcaacatcggtcccggtccgaggagttcacccgggatcggttgcagcaaggtcttgctcgcccggacggccaggatggtaagcggaaaggccagcgcgacaagtacctgcagggccgccatgagctttcgcggatcgcacccacgcccggcgcggcggcccagggcgctcgaacccagcgcggtccacaggagccagttggcgagcatcagcccgagggagacctcgttgccgtagaagacgaccacgagttcgcgcatcaggacgatctgcgcgatgacggccgtaaagccgatgagagccaggaccgaccgcaaaaatagcgggacgtgggcgcttcctgccgccggaccttcggattccttttgcgccagcacaagaatagaattaaacttactgagggcaggaaagcaaagcaattctggcaggttgctgtaagcggattgaggggtgtgatcctgaggagctgcaggcgacaaaggatctcgtagataattgattcgctacggcgagattcttcgcttcgctcagaatgacagtagggcggcctttctcgacaacctgccaggggagtattgacggtggagaaggagaaggctctggcggatcgccgtgaactgctgatcagcttgttgcgcgtcggaggattgggcgcggcgagcgccgccttgggcttctggctgcacgggcggagccgccggccggaagaagcgagcgcgctgacggtgaagaagaacttcactgtgccgccggaccccaatctgccggaaatggtagtggcgcagggagacgatccccggcaactggtggcgcgggcgatccaggagttgggcggcatcaagcggttcatctcacggggcgatgtggtagtgattaaacccaacatggcttgggaccgcacccccgagcaggcggccaataccaaccccgacgtggtggcggccatggttcggctctgccaggaagccggcgccaagaaggtgatcgtcaccgacgtgagtacgcatgaaccgcggcgcgtttaccagcgcagcggcattgcggccgccgcgcgcgcggaaggcgcgcaggtgattcttcccgaggagagaatgttcaaggaagttaacatgcgcggagaggtgctggaactctggcccgtattcgagccttttgttacggcagacaagataatcaacatcccgatcgccaagcaccacagccttaccggcgccacgctcggcatgaagaactggtacggcattctgggcggacaacggcaccggctgcaccagcgcatccatgagagcctcgccgacctggccgattttatgcggcccaccttgacgattatcgacgcctaccgggtgctgatccgcaacggccccgtgggcgggaacctcggcgatgtcgagttgaaaaagaccttgatcgcagggaccgacccggtggcgctcgatgcttacgccggcaaagcctattggaatctagaccccgcgaaagtgctttacctcaagctcgcccagggccgtggccttggcaagctggcctttgagcaggtgcgaacgcaagtggtgcaagtgtagcagcggatatatcccgccaaagcaatggcggcgtgaagccgccgctacattttcagaccggaatttccttggcccaccccgaccgagcaagcttgaccttcaacgggtcgctggtgccgggatggtgggccatatcggcggcgggcttctgccagggaagcgcaagaacacgcaatcgctcccgtgcttgttggttcgaactccgccggcatacttacgggcaccggaacatccagctaactccttgattcgtaaatggcgcaggtgctgtgaagcttggtcggataattgctgacaactgacaagttaaggctataaactaatcggcttatgcgtccgcagacacttcgaaagcttcggctttggtctcaaatcattttctttgggctatttgttttcctgctggtcaaaacggaattccgcggttcgctgcgctcggcggccacggagattcggttgccgtacccggttggcatattcctggaagctgatccgctcgtggccatcgccaacgcgctttccacccacgcgctctatcgccgactgatctggtgcctggtgatcctgatccccacgcttttcctggggaggtttttctgcggctggatctgcccgctgggttcgctgaaccacttcttcagcaatttcaaatctgagcgcaagcggggattgcaacgcattgcgtcgaaccggtacaagaaatggcagacgctgaagtactacatcctggtggcgctgctggtctcggcggtcttcggaggtctgatcgtcggggtgatggacccgatttccctgatggtgcgttcgttggggctggcggttctgccgggaatcaactacgggctcaacgcgttcctggacgtgctctacaactcgaagttgggagccctccgcaccgcgtcgactattcttcaattcattttgcaggccctgattctaggttttaagcagccatacttccgccaggccttttccctggggttcctgttcatcaccatcatggtgttgaacttccgcatcacgcgcttctggtgccgggcgctctgtccgctgggcgcgttgctgggtttcttttcccgctggacgattttcggtctggagaagcacaccgagaagtgccacgactgcaaccggtgtgcgctccactgccagggcggagatgatcccgtcccggacgttccctggcgcaaagccgaatgtcatctctgcttcaactgcgtgggggattgcccggaagatggtgtcaagttcaagttctttcccggcacgccgaccaccgtggatgtaccgcaactccagcgccgccgcgttttcgccggcgtggccgccggggtgggcctgcttccgcttttccgcagcacgaccgggtttgcggtggagagtgacccgcggctgattcgtcctcctgggtccctggctgaaaaggaatttctggcgcgctgcatccgctgcggcgaatgcatgaaagtgtgccctaacaatgccctgcatccgaccttgctcgaagctggcctggagggcatctggacgccggtgctggtgtcacgtatcggctattgcgaaccaacttgtgttttgtgcacccaggtgtgcccgaccggcgccatctgggaaatcagtcaggcggagaagattggttcatcacagggtgatgaaaaaaagaagaagcccgtgaagctggggaccgctttctatgaccggggtcggtgcctgccgtgggcgatggcgacggagtgcattgtgtgcgaggaatggtgcccgacctcgccaaaggctatctatctgcgccccgctgacatggtggacgggcaaggcgccgtcaaggcggttcgacaaccctacgtggacccggaacgctgcaccggctgcggggcctgtgaatatgcgtgtccggtgaaagatcgtccggccgtctacgttaccagcatcggggaaacccggtccaagaccaaccaaatcttacttcgacaaggtgggagggggaagggatgatgaagttcacgaacggaaatttgggattgaatttgcctaatccagttcaggtgtatcggctgaagagaatcagtcaagcggtgttcgttatcgcgatcgccagtctgaccctgggctgcaaaaccaagtcaggctccgcgcctgtcagcctgtttccggaaagtggtgaggtctcaggatggaccaggtccggtgacgtccgaaccttcgatgccaagagtttgtgggagtacatcgacggcgatgccgagcggtacatccaggcgggtgtgagcaagaccctgacatcagactatcgctatcaggataaagtcgatgccgtcgccgacatctatcagatgtccgccccggcgggtgcgcagaagatattttccatggagtcgtcaacggacagccaaccggttcaagtgggagacgaaggcaggttctacaagagcagtctggttttcaggaagggttcctaccttgtgcgcctgacggcttatgaggagtcaccggaagtgagcaagggcttggttgagttggcgcgaggcatcgagagcaagctcggaaaggctggagcctgaggagctgaggtttgatcctcgttttggcttcggactgcaattattaggggtggactgctggtgcgcgacggactgccctccagaccgtcgtagctaccaattccaggaggtgtactgcgatgtcaaagaactattacgtggaccggcgcgagttcattcgcgggacgacgggagccgttgcggcgggactcggggtttccgcagccctggaggccctcggccaaggggcttcgaggatgagtatcgaggaggccgcgcataaggtgggtcgggtgccgcgtcgcagactgggcaggagcggccgccagatttcggtccttgtcggcgccgcagattgggtgcccgaggtgatcgaggcaggaattctatccggcgtcaactactggcacaaggccgaggagtgggaaaagggcagcggcggcccggggaccacgccgcaggcgattctcaagaatcgcgaggcgttctattgcgagatctgcgtggaccgggtgcggggaaaccatgaaacgggccagatcgacgcggaagcgcattatcaattggtgaaacaggccgtggcgcgcaccgggcttcgttacttcgacgatatgaagtttcacttcggctatcacacggtcgccgagttgaaaactgaccggggccccatccaggtgttcgagcggctgaagaaggaaggtctggtgcgccacctctgcctttcgcagcacagctacaagggcaacccgaaagtgccgggcggggagggcgctctcgatattctgcacgcggtcctggcggatggcgtctatgaacacgcgcagttcttctttacctacggtgacagtgcggaagtgtacgaatttgtcaaagcggcccggcgcaagggtttcggaactattggcatgaagaccacgcgcggcgcggcacgcatgaaggaggacgctgccttcatgaaggatttcccggcgggcaccacgccccatcacgcacttgcctgctggctgaccacgaagaccgatctcgatgccgcggttgtcgcgatcgccaacctcgatcagtttgtcgatacgttctccggggccggcaaggcgccgcgtgccgctgatactcgcgccctggaagtgatgacggcttacgccaatcgcgaggtttgccgcctctgccaggagtgcgtcagctattgcccaaacggtgtggagattgcggacatcctgcggtacgaacgttacgccaccgattatcatgagaaagggcgcgcccgcaccctgtatgcgcaattggataagcgggctgatgcttgcgtcgcgtgcggcacctgcctgctacactgtccccagggactgcccattcccgacaagctggcccgtgcccatcgcatcctgggttagcttggtgttgcggctaggcgggaaatcagacgagtccgcgccgaatggccccgccgctacggcctcgtcggcgtcgcgtcggagtttctcatctgtcgcacggggcgcgtttcgcccagggtgattttcgggcgccggacatctcgggcataatgtccgattcaagcccaaaaatcccctccggtgcccgcgcccatcccaccggcacgcaaataagtggctttttacctgctttgagggcctcaaatgccccattctgacccctcttttgccgaaaaaacccccgaaaatcaccccttttgcgcacctttccgagccctcgtgttcggacaaattgcccttgttcatcccggtcgccagttgtcagccatcagccttccgccaatgactcaatcactcaatcgcccgatcactcaatcacccaattcttcaatcacccaatcacccgatcactcaatcactcaattcttctcgcgcgcgcccgtccccgccgcgacgattttggatttttgattttggattggcgatttgcgccgccacgcagggagtgtccccaaaaaatgaaagcgccgtggggctcgtcgccacgcacggcgctcaaggtcgctattgctagcgtagccttacgtagttgaacccacttactaagataagcgggaaccgctactgaggtacactggtgttatcataacgccgactattctcttgtcaagggggaaaacatggctgagcaacccgcaggaaactacatcctcggcatcgatctgggttcgaactcgctcggctgggcgctcatcgcccgcgagaacggcgaacctaagggactcatccgcgccggggtgcgtgtctttgaggcggcgacggagggcgaccgcgaatcgggacaggaagaatcgcgcaacaaagcgcgtcgcgaggcgcggctacatcggcgtcaactgtggcgccgcgcgcgacgactgaagaaggttttcgatctgcttcagcaatacgcgcttttgccgcgagccaaaggctccactcccgaacaacgccaggacttcttgaatgacctcgacaagcagattctcacctcgccgtggttcgccaccaagaagacctccggtctctaccctgaacctgaacaagtgatgccgtacattctgcgcgcgggttcgctcgatgaacgctttgaaccttacttcctcggacgtgcgctttaccacctcgctcagcggcgcggcttcctctccaatcggaaagccgcaccgaaaaaagacgaaaagccgggagaggttgacaagggcatcaacgagctgcgcgacggaatggcgcagacgggcgcgcgcacgctaggggagtactttgcgcggctcgatcccttcgaccgccgcattcgccaacggtggacgcaccgcggcatgtacaaagacgaattcgaccgaatctggaaggcgcaggaggcctatcacgcggaaatactcaccacggatcggcgccaagagctttcccgggccatcttctttcagcgcccgctcaagtttcctcgcagcctggtaggccactgcgagctcgatccggaagagccgcgcgcgccgcgttacctattcatcgcgcagcgttttcgtttgctgcaagtggtgaacaacctcaaagtggagttcgatggagccgaaagactactgaccccggaggagcgggagaaactggttgaaactttggaacttgaaggcgatcgaaccttcgcccaagcccggaaattgctcaagttatcgaaagcttcccgcttcaacctggagcgtggtggggagaagaacttgcgcggcaaccgcacgaccagcgctctctacaaggtgttcggcgcacgctggctggaaatgacggcggcggagcacgacgcagccctgcacgacgtgcagagcatccagaatgaagaggtgctcaagcgccgggccgtgggccactggaacctggatgaggccgctgccagtgcgtttgccaagatctccccggagccgggctacttcaatctttcccggaaggccatggagaggttgctgccgttgctcgaaacaggcgtggagtatgcgaaggcgcgccatcagctttaccctgagaagttccaggcacgcggcgagctcgcatccttgcctccggtggaggtcgctgccgatccggccaaactccaggagtggattaaacgccgaaaggccttgcggcccggagcgcagtctccggacccgattaccgccatccgcaaccccgcggtgatgcgcagcctcagcgaactccgcaaggtggtcaatgccatcgtccggcagtacggcaagcctgcggaaatccacgtcgagctggcccgcgaccttaggaagccgaaatggcaacggcaagaaacctctggccggatgcgggaaaacgaacgcgcccgcaaggccgccgcccagcgcatcttggcagaaaccggcatcaaggagccctcgccggaagacattcgcaaggtgctgctggccgaagagtgccgctgggagtgcccctatacatatacaggcaagaccatttccatgcgcaagctcgtcgggcacgactcggagtttcagatcgagcacatccttcctttcagccggtcgctggacaattccttcgtcaacctcaccctctgccacgtcgccgaaaatgccgtgaagggcaaccgcaccccgcacgaggcctatagcggcgacccggatcggtacgatcggattctgacccgcgtgcgcgcgttcagcggtaaccggggcatcgtcgccgaaaaactgcgccgctttcaaatgaccccggagcaactgcaagagttcctgagtgacttcagcgcccgccagctcaccgacacggcctacgcttccaagctggcggcccgttacctcggactactctacggcggcgagattgacgacgcccaccaacggcgcgtgcaggctacttccggccaggtcacggcctatctgcgcaacctttggctcctgaacagaatcctgaacgacggccctacgacccatggtggtgcggttcccaagttgcgagaggatcaccggcaccatgccgtggatgccgtcaccattgccctcaccagcccggccaccatcaaaacgctcagcgacgcggcccagcgcgcgccgctcgagcatcgtcgccgatttgcgtctatccaatctccctggccggatttcgtcgataccgtgcgcgacgcagttaaccatatcgtggtctcccatcgcgtctccaaaaaagtcagcggggcgctgcatgaagagacgatttattctccgccgatggtcgcggctgtttctgcaccgcgtagcgccggcagcctgccggctcgtttgcgtgccaccggggacgggggcgctaccagggagaccgtgcgccacgtccgcaagccggtaaagtcgctcaccaagccggagcttgcggagatcgtcgatcccgtggttcgtcagcgggtgcaggcgaagctggaggaactgggcggcgacctgaagaaattcgccaaagaggagaacctgccgtatctcgaaaccaaagacgggcggcacattcccatcaagcgcgtacgcatcaagaagaagctgtctacttttgccttgggctcgggtcggacggcccgcgaagtcacccacgaatccaaccaccatctcgaagtttttgccgaactggacgaggacgggcgggagatcgagtgggacggtgttgtggtccccatgcttgaggcttaccggcggaaccggcaaggtcaagccatcgtgcaacgtgagcacggcccgcagcggcgattcaagttttcgcttgcgcctggagaggtcgtggaatgcgatgatgggccggagaagcggagacagcttgtggtaagggcggttagtcagtacagtgcaggtgccattgtcataagccttgttcggttgaatgacgcgcggaagaagaaggacattcaagagagtaaggcttggctatccatcgtgcccaacaagttgcggcaactgcacccacggaaactagttgtcagtccgctgggggaggtgggggaagcgggcgactgagggcatttgcaattttagatttcaaatctgagatctcaaatgggaggacgcaatgaaatacgagcgcttcgagcagctcccggtctggcaggcgggcattgcgctggccacgcaggtctatgcgctgacggccaaacctgctttccggcggcagcgcagtctgcgggaccagctcgagcgggcggcggtttctgtctcgaacaacattgccgaagggttcgagcgcgggaccacgcaggagttgctgacctttctttacatcgcccgcggttcggccggggaggtgcgctccatgctctatttgttcgatggccttcccaccttgggcgatctcaaatctgaaatttcaaatttgaaatccgccgccgaaggaatcagccggcaactgcgggcctgggcggacgccctccagaactcagacatcaagggccagcggtatttgaatgacaagggccgccgcgcggcccaggcccagcaagaccgtcaggaattcctcaatgaacttcgccggatccgggagggggccggaccggagccgtctgccggcaagacgaacgaagagggataacacctcatgaccgaccgaattctcgatttgtccgaacgtccggcgcacttgagcgtgcggaatgacctgctggtgatccgctttggcagtagcgccggcgtcccgccggcacaacccggggctaccccggaagccgccgggacgccgccgctaccggaaacgcataccatccccctggcggatattgccgtggtcatcgcttcgcacccccagatttcctacacgcacgcggtgctcgcggggctggccgccgccggtggcatgtttgtcgtctgcgaccagaagcatctgcccgcggccatgctcttgcccctggtgacacactcgacccagaccgaacgctttgcggcgcaggccaagctttctctgcccaccggcaagcgcctgtggcggcagattgcgcaggcgaagattcgggcgcaggcccgtctgctcgaagaaaggacgggcaaggattggggcttgggtgggctggctggccgcgtgcgttccggagaccctgaaaacatggagggccaggccgcccgtatctactggcgcgctttgtttgcggacgaggacttccgccgcgaccccgagggggagggtgtgaactcgtgcctgaattacggctacgcagtgctgcgggcggcggtggcgcgcgccatctgcgggacgggactgcatccctcgctcggcctccatcaccacaaccgttatgacgctttctgcctggcggatgacctgatggaaccgttccgcccggtggtggaccgtgtggtggccaagctgcgggacgcgcgcgggagcaatatcccgctcgataaggaagcgaagcgcgccctgctggcggcgctgctggaccggttcacggcggagaacgaatcccgcaccttgtttgattgggtcagccggatggcctgctcgctcgccgctgtcatcgagggcagcgcggaaaaactggagattccgcgattgtagcgccgggcccctgacacctgacacctgtaacctgcacttctatgcctcgacacgaacttgcactctcaggataccgggctatgtggctcttggcgatgtttgaccttcccgtcgataaacccgagttgcgccgtgaggccgcgcaattccgtcataaactgctgcggcagggcttcaccatgattcaatactccgtctatgtccactatgtgcggagcgaggagtccgaggaagtctttcgcaaacggatccaggccgtgctgcccagccacggccaggtgcgggtcgtctccattaccgaccggcagttcgaaaagatggaagtttatgtggggaaaaaacgggagcgagtcgaggacccgccccaccaacttatgcttttttgagtctcaaaaggggagtatccccccggaaatcaggcgtttccggggggaatagtgtacctcagaagcgattcccggcaaaccatagccagcttgttaagtctctcggcaagttcttcagtgtacctcagaagcgattcccggcaaaccatagctacttttctctgccggacggcgcaacagccagtgtacctcagaagcgattcccggcaaaccatagcgagaagataacgcggcctcccgttttgcctagtgtacctcagaagcgattcccggcaaaccatagcccgctggcgcgacgcaccgcgaacgtctggcagtgtacctcagaagcgattcccggcaaaccatagccgatgggccgtataggaagcagtggcattgagtgtacctcagaagcgattcccggcaaaccatagcatatgaaacacccgcgttgaccagggccgcagtgtacctcagaagcgattcccggcaaaccatagcccagaactgctaggatggcagcgccttaatttagtgtacctcagaagcgattcccggcaaaccatagcaccttcaacgggaaggcggctacgggaactagtgtacctcagaagcgattcccggcaaaccatagcttaatctccctcagggatggcctgagggttagtgtacctcagaagcgattcccggcaaaccatagccaccgcgaagggcaaggtcatatccctctcagtgtacctcagaagcgattcccggcaaaccatagccggaattggagcagatgcaagccaggtactagtgtacctcagaagcgattcccggcaaaccatagcgaacctttggtcaaccgagcaatcacgagagtgtacctcagaagcgattcccggcaaaccatagccctgccgcctcgcactgatcgcgtaccagcagtgtacctcagaagcgattcccggcaaaccatagcgcgcgccgcgcccgtgcttccggcccccagagtgtacctcagaagcgattcccggcaaaccatagcgttccgccgaccgcgcgggcggggtgccaaagtgtacctcagaagcgattcccggcaaaccatagcccgcgatcgcggcggcgccgaattaggggtagtgtacctcagaagcgattcccggcaaaccatagccttcttcttgctcggattggcaacaaacaagtgtacctcagaagcgattcccggcaaaccatagcgcttcgatgatcttcttctcatccagcacagtgtacctcagaagcgattcccggcaaaccatagcgccgatgaccatttactttcgctggcctcagtgtacctcagaagcgattcccggcaaaccatagcctaccctctccttcatgcgcccggccggctagtgtacctcagaagcgattcccggcaaaccatagcccgatgtcaaggctccaaaagcaccgagtaagtgtacctcagaagcgattcccggcaaaccatagccttcacccttgagctctgcggctacgtcaagtgtacctcagaagcgattcccggcaaaccatagcgttggaaggggggactggaactccccttttagtgtacctcagaagcgattcccggcaaaccatagccaacagagcgtggacctggccctcgagccaagtgtacctcagaagcgattcccggcaaaccatagccataaccaggcggtgaaaagactccgcaaagtgtacctcagaagcgattcccggcaaaccatagcttcagtcctgctgcccactcacccgcttaatgggtgtgggggcgcacggcttacgacttgacgggcgaaagtcgtgcgcccccacgggcttcgcccaccaccccctcacccaccccggcacgccggggcaccctctccccaggggagcgggcaggggtttgggggggcgtttttcggcacggataaagccgtgcccttccaccttcccttatttcgacgcgaatgcggtttgtcgttcaccccctcagccgccgcgccgcgccaccgaagcacaagatgacggccccccgtgtgcgtgtcttgcattcccgcctgacgagagttcacaaccccttcgcctgacgaatctgctcggtgattatatccaagacctcaggaaagaggcgcaggcaggtctcgatcaatcggtgcaggtcctccgggctggacccttcgatgcgcatggtgacaatcggttcggtgaccgactcccgggccaagaccgacccctccggcatttccagccggagtccatcgagggtggtttccttggccgcgccgaaggcgtggcgcaagcgtcgcgcgatttcgccaaaaggaagcgcggccgcgggaacccgcaagtcgggcgtcgcaaaaacaggggcgacggattctcgcatggcatgcagcgacccggagcgattcaccatatcagccagaaagagggcggcgaagacgccatcgtcgcctccccgcagctcacggaaaaagtagtgcccgcttacctcgcacccaaacaagcaactgtccgtgatcatccttcgcttcaggaaagtgtggccgctgcgttccaggatcggaacacccccggactcgaggaccgtccggcgcacgatgtctgacatcttgatgtcatagacaactttcgcgccggcgtcatggcgcagcaggtggcgcacccagagcacggcgatggcatcggacggaacgacggagccggtctcgtccacaaaggccacgcggtcgccgtcgccatcccaggcgatgcccagggcggcgtgggtttccttcaccttttttctgagcgccgacagattcacgggccgcgcacaatcaggagaacgatggggaaagcggccgtcgatttcacagaacaggcgatgaacacgaaagcccaaggcctcgaaaatctgcggggccaactcagcccaggcgccgttgccggcatccagcaccacccgcagggggttgtcggcggtggccttgccccaccggccctggatccaattccgatacgcgggcaccgggtcaagggcctcgaccgttcccgctaatttccgaaagtcgcctcggtccacgcgccggtgcagctccgccagctcggtgggggttggcggcaggtcacccagcatcagcttcagaccgttataggtggccggattgtgcgaggcggtgaccatcagcacggcatcggttttccactgcgcatgcgcgaagtaagcgacgggggtaggcaactggcccgcatccacaacgtgcgcacccgccccgagtaagcccgcggcgagcgccgctttcaagcgcggcgtgctttcgcggaagtccccggcgatcaagatgcgggcgtgaagcggaaacgtcgaagccacccccgcgcccacccggcgcagcaggtccggtgagacctcatcgggaaagacgccccgaatgtcgcaagccttccagggattcatacgccgtatcctcgccgggtgcaggcctggcggaattgcgcgtagatttcgtcataccgcttcgctgatgcgggcgatggctcgaaggattctgcgaccttcgtcatggcctggattgcgccggtgacatccccggcatagatcgtcccactggcggcgaggatcgctgccccgaacgcggccgtgccatgctgcgcgcgaacgacgacccggttcaagatgttcgaccgcatttgcgacaggccgctgctggccgccgccgcgccggtcgagaagaccttgtcacctacttcgacgccgcaacccctcagcacttcataaccccaacgttcagcgaaccctatcgactgtaattcagcggcgtgctgttcggcgggctcgcgcgcatccccttccagaaacgtttcggcctgggagttgagaaatggaaagcgctcgccccggcccgcgagaaggtagcagatgataggactgggaaggtaggcggcggccaggtggtccattcccgcgaccgatacgccgggttggcgcacgcgcaggcttcccatgccggtattgctggcggcgccgggtgcccacaggccggagggatgcagatgacagtaaactccgccggtaatccggggcctgtttgtggcgagcgccttccagacgatggtggtcccgagcgtggtgttggcgtcgcctggctggctggcgcccgatgcgatcaggctggcgatcccatccgtggctcctgctaggaccggtgttcccggcggcaggttcgtctcgagcgccgcggcggaactgaccgtgccgacttgctcgccgggacgatagatgcgcggcaagagctccgaaggtaagccggcgcgggcgacggcttcactccaggtgccatactctggctcatagcccagcttcagcgagtctgagtagtccgagatgccaaactcacctgttagttttccggtcagccagtcggcgggatgcagcaggtaacgcgtgcgggcccacacttccggctccgtttgctgaacccacgcggccttcacgagtgactgagaggcattcaggcgaggcgttcccggcgcggcctggcggttgagcgtcgcggcaatttctccgcctcggctgtcatcatacagaagggcgggccggagcgggcggccggtggggccggtgacgaccagcgtcccggatgtcgaggtcaccgccactcccgcgatgggggtcgcgctgccggattcattcaggctcttgatgatcttctgggtgctctggcagacagcattccaccagtcttccgggctctgttcatggactccgccggggtcgcggcggtccgaggagagcggatgttccgcctcggcgtctacctttcccgcggcgctggcggccacggcccttacgccactcgttcccacgtcaacgccgatcacaagtgtccgtcgttctttggccatagtgttcacgatttccgaagcctgggtttgtacagcgagcatcgatacaggtctccgaaacgactccagagtatcaaaacctaaaaggtcagattggtcaaatattattcggcgcgtcggcgcgcgccgctgcccgcgccgtgcccggcgaatatcgcagactcgcaccaagcgcgaacctgcgccagccttcggtgcttttcggagccgagtacagcgccgctccagaaaaaggctgttaccatgattggtgaatctccatatgacaagcaaggtagcgcagagttgtcccgccctgcgggattactctgcggcccttccttgggatgattgcgaccgccaggagatatgaccattgatatagtccatatttcacaaatgtgaaaccgttctcaagccaggtagcgcagagtttggatgtttcaaactctgcggcttgtaagagaaagaaccgcagagtaatgcgctgccgcgcacaactctgcgctacccgcttggccgccaggatggcggcgctacaagaacagtgccgtaacataatttagtgcgtttgtattagtgaagctacggacttgtcgacaatcgagggcaaagtaaccgaggtcgtctacttgcccggagcgacacctgacagcggcatggtggaggtgcggctgcagtctgccgggcaaaccaaactgatccgcttggcgccttcgggattcctgaagcaacgcggtctgcttctcagcgaaggagacaccgtaacggtaaaaggatttcctgtcgcgggcatggagggtgacctcatcgttgcgaccgaagtccataaaggcgacaagggattgtctctacgggacatgcgcggacgtccggcatggtagccgcgggcgaaccgctccccatagagtttcaagcacagtcacttggaatcgcccaagagagaaggaggaacgaggagatcatgaatatctataaactgcatttctcgacaatggcggcagtcctattgatcattctgcccgccggggcacaggggcccgggggcaacggaaaaagggctccaatgtacaatccaagcacggagatgaccgtaaccggaacggtcgaggaggtcgcgcatcccggcggttggggcggcacgcatctgaccttgaagaccgagaaggggacgctggatgtgcatctggggccctcccgcttccttgcggagaagcaattcacttttgccaaaggagaccgcatcgaggtgacgaactccaaggtagcgtacgccgggggagacgcactcgcggcgcgcgtggtgaagagaggcgataagaccctgacgttacgggactcttcgggtatcccccggtggtctcgcggccggcgccattctctttaagtagtcgcgggtacgctttcttcctcaattccacatcagacgcgacgtttgatttgggggcttccgggcccacccgcgggtggcgcctacatcccgctgggcgggatgtgcgcgttcagggaaaactggtacgcctggcaggattcgaacctgcgaccttttgctccggaggccaccacatgataatagcagcgaattgcagataaccgccgcagccgcatgaatactggctgaaacggcgttcattctccggccaagcaacttgtgcggatagctgcttaccacggcgtatgagatgagttacgtcacaaagtacgtcacaaagcgccgtcccgctcgctcttggcttgccgtgcttttcccgtcacgccgttctctgttctcaggcggttgtgcttccgggttacgggacgcgagagttcgtgtctcgccattttgtcccaggataataccgcggacggtgttgctcaggttgtgaaggtgaaaacgcgctaggatgccccaggacgcgtcggcggttgcggttggtacgttgccataggccgggctccggcgaagcgtcctggggccacctagagagaacgagcgaagggtggacaaccttatcagcaaaagtctacccgtagtggcgcacgacaggtagaaccgagtctcaaggaaatggctcctcgggggaaaggaaagcgattgcttacggaaaaatttccggaagcaatcgctagctggggcggacccgtgaaattccagttttccggaaaatgacgtgctaggccgtggcggttggacgacgccacggcccacgacggcgggtacaattcaccgtcggcgcacgtcctcgtcccctacgtctcggtatacgctggggacaagcctttggcaaactttttaccgtaagtgcgagaacccatcctgcctatatcgggcgtagaggtcggggcgcagtttgaaagtttgcgcgatggcgtcatccatatccgaggcggcagacgttgctattaactgcttggctataccttccgccgccatctcgccaaccgttttattgacggttggccgggccgccgcctcttcgcggggcttccgcgctaaactttcttcacggtacttatggtacaggtcaggccggccggcgaaaacctgttcgagtgcctcgtcgaaggtcatcgacttttcgctttttttgataagttcgtttgccatttcggcagcgcgttctgtgtcggtcatttcgtttctccttaatcacttgctttgagttgagaatctaaactttcaaggtcgtttagcaggctgctccacggtcggggcaccacaggcttcgcaccacccgggaataaacttggcagcaacacccgcactcggtccggcgcccacccaccggcgaccagtaaacctcgaaggttccacggtcgctgatattctcgacgcccggtggccgccgcgagatcatggccgagactcgaaacctgccgcgatagcacatctacctcgcccagtattgacggatctgtaccgccctcggaaatttccgcaagtaatttttcgtacgcgcggtcaaaatcttcaagcatctctgccagcttccgaaccgccgcttcgcgggccgcgacggccgccgcctggtccttttcgagggcggccgcccgcgccagttccaactcttccagggcccgtgccgcttcggcgatctcgccgcggacctgggccaattcgggctccactgccgggttcgtgcgggcgtcaagggccaactcgccgcgccgctgatttaatgccgccaaccgctcgcgggccttttgaatttccgcttcgatgtccgtcgcttcacttatcatttccgtcatg

SEQ ID NO: 878 - DNA, 20583 bp, synthetic construct
  source 1..20583: mol_type = other DNA
  misc_feature 1..20583: note = Synthetic
gcaaaactgcccggccccaacgggatgatctgataataatcgccgcctacttcctgcgccggaacgaaccgttgagcagcttgataaccgggcaaggagggcagttctggcggcaataagctcatttgctgttcccgcgcgagcgtcaagatttcctgaagcctctcatgctgctgctcgcgatcaccaaagaaccggatcagccgtcccagtacctggaagtcagcttcgcgctgctggccctccttaccagccatggagggagtgatcaggccaagcacgtgacgcaactcgcggtccactgcaatgaagatcaggtcgtaccagtcttcgcgaccctcggcctgtcggcgcaacccccgctggatccaccaaaactggcccgacagacggcgttgcactttgcgataagacaatccacggtccaacagatcccaaaggggttcgccttgtgaccttgtgatttcatagcggctgccctcccggcggaactcagcagtcgccagcaggtggagggagtttccgaactcgcgcagcatgctctccagcaacgctcggacgaagcctcccgcctctcgctcggtccgagagacgccttcaatcagatcgaaaattctgcgctccagcatgccgtaatcaccgggttcttgatcgaaccctttgcagatggttggttcttgcttcacccaggcgtatgggttaggactccgaacgccgcgtcaggttccgaaaggggctcctcgtgccgcaggtaggcatttctcccattcccgctgtccgagttactatgatgcacaattagcgcctgaggatgccgcccgcggcgaccactctcccggcgcaaatgcgtacgaccgccaccaactcaggtccaaacgagaaactggttgactgcctcccagggcacgggtatcttcttgccatggtgctagggccagcctacttcttgacgtcaaggtggcagatgatgcgcatacaaaagcttgttttcggcattctgatcgccggcctgttgttggtttcgccgctcatggcggcagaggcagacctttacgggcccgagggcatccgcccggagggggtgcgccagggaaagcttgggagctgctatttccacgcggtgatcgccgccctggcgcaatcgaatccggatttgttcaaaaagatgatccaggccaacgcggatggcacctacacggtgcagtttgcggacggcgtcaaggagaacgcttacccggacgatattcgctattcgcgggacaccggctatgacctctcggaaggcctgtgggtggcggcggtctttcgcgcctatgcccagcgggtcttgcgggcggcgctggtggaggccatcgacaagagcgagcttttccccttgctcaagccctatgtccgaaacttcgtggcttcgaatgatccgttgctgctggcgtacgaccgtgccatccgcgccgaggtggaccagtatgggaacgtcgatcgcgagcggctcgaagccaatctgaaagagcaaatgaagccgctgggcgtgcctgatgatatgcagagctcggtcatcaaactcctggactccggaggcttctttggaacggtggtcacgatgatccggcagaatggcgagcttttcggcgcctatcgggcggtgggacaggggggcatcgcggagcgcgtcatgcagactctggccggaagtgtcgcgaccgcaaagaatgaatcggagagcgagatcggttccgcactgcagcagcttgcgtccagtcaccgtccgatagttgcctgcacggccggcagccgcttctaccagcaagtggcgggcggccagccgctgccggcgggcgcggagaactggtacgtcaacgcccactgctacaccgtactgggatacgacgcaggcacgggaaacgtaacgctccggaacccgtgggcgcgccagcccgacccggatggcatctttacactgccgctcgggactttcgtgcctgcttatcggggcattattacttcagggcgcgagcgctgaggaagtcccggttgccgtggccggcttgccgggtggagtggctggggggctgtggcggtggcaaatgccagcctgaaggctggcgttacggctgtcgagggcagtgacgattctgagcctgaggatgctctatggataccaattcactctgccgccgaaacgtgattcgcggatgccggcggcatcggacgccggcgctgtcattgctggcggcagttctgttcattctgcctccttccgcctgctgggggacggaggccgaactatacgggtcggcgggcgtccgcccggaggcggttcgtcagggtgggctggggagttgctatttctttgccacgctgtcggcgctggcgcaggcaagcccgcaggttatccagaggctcattcaggacaacaacgatggctcttacaccgtccagtttccggacggcaagaaggagaccgcttacccggaggaccttcgctatgcgcgcgcgagtggctttgaccgctcggacggcctctggccgatcgtcctcttccgcgcctatgcccagcgggtcctgcgcgaatcactccttacggccatcgagggcagcaatgtgtttcccttgcttaagagctcggtgcgcgagctcatcgccagcaaggatttcctgcttctggcttatgaccgcgccatccgcgccggggtcgaccagtcagggaacgttgaccagggcaaactcgaagccaagctcaaagaacacatgaagccgctggggattcccgagacaatccagaactcgctggtggagatgctccggtcgaaagctttcttcgactcaattgtggaaatggtcaagcagaacggcgagctgttcggggcataccgcgcggtgggacagggcgggctgccggagagagccatcctgaccttgacggggaagaaggcgcgttacctggaaacccactcgcggctggtggccggtccggcgctggcgctggccgtcaagtcccatcagccaatcatcgcgagcagccgggaagactccggcgaaggcctcatttccgccggccgggtgggtgcggacgcgaaggactggtacgccccctcgcatgcctacacggtgctcggctacgagacgttatcaggacatgttaagttgcggaatccctggggtaatcaccctgacccggacggtatcttcacccttcctttagccacttttgtggccgccttcgacggcatcacgaccgcaagtcgctagggtcgcgttaccgaagcgagtgacccacgtgggcgctcgggagcccgccatcctgcgcccgccgcggcgggcgcaggatcggattctcaagaagatgcttctcccgcgctgcgggatcagcatgacgccgttagcttggttgtgccaccaattttagttacgcgacactacccttcgctgccgttcccggcgtttttgcctcgcgcatcgacgacatccgccccagcagaggttgcctgccggctatccgctcttgcggggcggttccccgccggtccaaaacgttgtcagccgcacactgaaccacatgggcgagatcgaaggaggcgaagggcggcacaatgaagtcaaaagcgcctccttccagcgcctcgatatatagcttctcatccatgaaccgggcgaccacgatcacgttgacgggctcgattgccccttcggccatcagcaccacgtcctgccacttgccgtcgtggagatcagtgtccgtgaaaaccagttggggcggattggcacacgccagctcgcaccttgcagcttggcagctgtgcacatgatgcacgcagatctcctggtgccgcaacatggatgccagcgcccacatatgctcggtctggtcgtgaaccagcaaagccgtgatctcttttctcatcactcactctgcctttcgctaagtcagccttggtgcgcaaccaccttcgggcccggtttcgcgcggcccccctccccgccattgcggccggtcagcttctccctgccgtgcgagacgattccccagcgccgccgtgggcggggttatgcgcgctgccttggacatcgaaaaatccgcccagacctgccggcctgcgcaatctaccgcctggatacataaatcgcctttaatcatcggccaaagcaggcttgggcttaagcggtgatgggtcgcccaatattcacgggagacgacccaggtaccccggcagcttcttggtcgcgtggtcgaaggcgcagaggccacctctggcatagccggttctccttcgcgggagatccatcctcgctttctatttaagttgatctaagacctacggccctgccccgtcaatagtacgtaagtcctatcctgccctgaggaataaccatagcctgcgcccgccagggcggggaagtaagaaatatttatgaccaagacaaggggcaatagtaggcggagcaagttagggagccaggtttccccttggagtctggggtctgggtcagccccgcggtctcgaccggcgatacaggaacgcggctgactctagcagtccgtataccaccaagcaaaaccagaaatcgatgagcaggcccagatcgagcgcgtaaggccggtgtcgcgcgggcggtgggaagtgaggcatcagggaaaagtaaagcccgttgccgagaaggatggccacgaggtaacgaagccacttcgatggagttggcatggttcaacccgctcctggcaatcggcgaatcgccttctccgttcgcgtcattggcggccggaggattccgcggcgcaagcaaggcctgcggttataatagcaaacggtaacgacgatggcgacttcgcacttgaccctgaccgcggaagtgaaatacctgaaaggagtcggccccgcgcgggcggcgatcctggccgagcgcggcattcacacggtcgaagacctgctttactatgcccccttccgttacgaagaccgccggcagctcacccgcatccgcgatctggttcccgggcagacggctaccattctcgccaaagtccttaccagcggcctgatgaaaacccgccgcggggtctacatctacgacttggcggccacggattccacccgcatgatccggtgcaagtggttcaacgccatctatctcgagaagcagaaggtctttcggcccgggcagcgggttttcttctacggcaaagtcgagcacgatccctacggcaccggaaacctccagatcattcaaccgcaattcgaaattctgcccgaggatgaaagcgaggaggttatttcgctggcggtcgggcgcgtcgtgcccatctacgaatcgatgggcaaacttggcccgcgcgtgctccgcggcctgatctggcgcgcccttggttccttcgaaggtgagatcgcggaccggttgccgccttcggtgcggcagaagaacaacctgccggaccgcgccgcagccctgcggcaaacccactttccggacaacgctgttccttatgaggaggtggcgcgctttcgcagcccggcccaggtgcggatgatctttgaggagttctttgtggtcggcgccgggctggccctcaagcgccgcaaggccaaggccgcgccgggggtcgagttcaaggtcacggacaccgtccgccaggcaatcaagcggatactccctttccatcccacggcggcgcagaagcgcgtcttgaaagagattgtggacgacatgcgctcgccccggcccatgaaccgcctgctccagggcgatgtgggttcggggaagaccatcgtggccattcaggcggcgattctggccatggagaacggttaccaggtggcgctcatggcccccacggaaatcctggccgtgcagcattacctctacgtgaagcaactgctcgcgcccctgccttacaacgtcgatctgctcatcagcgcgcgtaaggctggcgagaaagcggaactgaaacgccaactggaaagaggcgaagtccacctggtggtgggcacgcatgcgctgctcgaaaaagacgttgagttggcgcggctgggcttcgtcattgtggacgaacagcaccgcttcggcgtcctgcaacgttaccggctgatccgcaaaggcctggcggcggatgttctggtgatgacggccacgcccatcccgcgcacgttggcgctgacgatttacggcgacctggatttctcggtgatcgacgaactgcctccgaaccgcgcgcccatccagacgcgcctgctcgaggaggaaggccgcgtgcaggctttcgagttcatccgggagaaggtgcggcgcggcgaacaagcctacgtcgtctatcctctggttgaggatacgggcaaactcgatctccggcccgccgtgcgcatgcacgcacatctcgcgcacaacgtcttcccggagttcgaggtgggcctgctgcacgggcgcctgccgagcgaggaaaaagaacgggtcatgcagcagttcaagcagggtgaagttcaggtcctggtctcgaccacggtagttgaggtgggcgtggacgttcccaacgccacggtgatgctcatcgagcacgccgagcgtttcggcctcgcccagttgcaccagcttcgcggacgcatcggccgcggcagccagcagtcgttctgcctgctgctcgccgccgccgagcgctccgaagaggccgaggagcgcctgcgcaccctcaccgaaaccacggacggcttccgcatcgccgagatcgacttgaagctgcgcggccccggcgagttcttcggcacgcgccagtggggcatccccgccttccgcattgccaacctgctccgcgaccaggaaatcctcgagtgggccaagcgcgaggctacgcgcttcgtcgagcagccggactcccgcgaggaactggtcgccttcgcgagctacctccgcaccgaatggccccgccgttacggcctcgccaccgtggcgtaggagtttctcatctctcgcacgggacgcatcacgcccagggtgattttggggctctggaaatctcgggcatgatgtccgattttggtgcgaaaacccctctctacacgccaaccatccctcccgcacgcaaaaaagcgcctttcttcctgcttccggagccccaaattcgcccttccgacccctcttttcccgcccaaaccccccgaaaatcacccattctcggcccatttccgcgccctctttttcggacaaattgcccctcttcggttttcggctcttgggttttcggatttgtgattttggccccacgcaggaacttcccaaaaatcaaagcggcccactgggggccgcttaaggtcgctattgctagcgtagccttacgtagttgaacccacttactaagataagcgggaaccgctactgaggtacactggtgttataataccgccaactattctcttgtcaagggggaaaacatgcctgagcaacccgccgcagatcatatcctcggcatcgacctgggctccaattcccttgggtgggccatgattggtttggaagaagctaaacctgcgaaagtgttgcgcgctggcgtgcgcgtctttgaggcggctacggagggcgaccgtgagtcggggcaggaagaatcccgcaacaaagctcgccgcgaggcacgcttgcaccgccgccagctttggcgccgcgggcggcggcttaggaagattttcaagctgctccagacttacggcttactgccgcccggcaacggagcggaccctgaagagcgccagaagcttctcaacgaactggacaagcagattgtggcgtcaccctggttcgccgccaagaaagcctccggcctctaccccgaatccgaacagaccatgccctacatcctccgcgccgccgcgctggacgagcggcttgagcctcacttcttgggcaggccgctctaccaccttgcccaaaggagaggctttctctccaaccgactcaggcccgccaaaaaaggtgacgacgtgggcgaagtcaagaagggcattagcgaacttcgcaaagcgatggaggaagcaaaggcgcggagtttaggtgagtacttctcccgcctcgctccctcggaaacgcgcattcgaggccggtggactcaccgcgacatgtatcgggcggagtttaatcaagtttgggaggctcaggcaaaacaccatcctggcttattgacggatgagcgtaggaaggaactctcaagtgccatcttctaccagcgacccttacgcttcgaccccgacgtgatcggcatgtgccaactcgagcccggcgagcgccgcgcacccgcgcacctgcttatctcgcaacgcttccgcctgcttcagaccgtgaacaatctccacattctgccgccgggtgggacggagatggaactaaacccggaaggccgccagaagctgattgacagactggagcaggaaggtgacctgactttcgccaaggcccgcaagctgttcggctggtcgaaagcgtatgccttcaatctcgaaagcggtggcgaaaaatccatcaagggcaatcggacatttgctgatttttacgccgttttcggtccgcgctggctgggcatgtcagctcaggagcgcgatcaggtggtcgagtacgttcacgctttcgagaagccggacaaactcaaaggagcggccaggaaacgatgggccctggatgacacggcggctgaaaacctggctgacatcagccttgagcccgaccacatgaacctctcccgccgggccatggaaaaggttttgcccctgttggagcaaggcctgacctacgcgaaggcccgccaggagctttaccccgaaaagtctgaggccaaggagcctgagccctaccttccgcctgcggagaaggccctcctcgaaattcggaaccccgccgtactgcgcagcctcactgaattgcggaaggttgtcaacgccatcgtccgccagtacggcaagccggtggaggtccacattgaactagcccgcgacctgaagaaaccgaagaaggccagaaagaacatttccgacgacatcgccgagaaccggaaggctcgtgtgcaagccgccaagaagataatcgcggaggttgacatctctgagccgagcgggcgggatattctgaaagcacagctttggcaggagtgcggcgggcattgcccgtacacagggaagcctatcgctttcagggacctctttagcggtgagccgcagtttgatatcgagcacatcattcccaggcacctgtccttcgacaataccttccgcaacgtcacgctttgcgaagtgcacgagaaccgtgaaaagaaggcgggcaggactccttttcaggcttacagcgggaatcctggagagtaccgtgacgttctggaccgtgtgagaaagttccaaggaaaaggtgcgcgcggaaagctgcgccgtttcctcatgaacgacgaagagttggaggagttcctgaacaagttcaccgagcgccaattgcgcgataccgcctatgcctcgcgcacggcggcgaattatctcggtgtattgtatggaggcgtcaacgatcaggcagggaatcagcgcattgtttccacgtcgggtgaggccacctttgagttacgcaaggcttggcagttgaatagcgtgctcggcgatggcccgaccagcaagggaggcacggtcgagaagaagcgcaccgaccaccggcaccacgctgtcgatgccgttgcgattgcccttactagtcagtccgcgatgaaacagctaagcgacgccgctcgccggggtcgtgagagagggagccgcgccctgtccatggaagggccgtggccggatttcgtcgataccgtgcgagaagcaatcgaccgaatcgtcgtctcccatcgcgtctcgaagaaagtcagcggggcgctgcatgaggagacgctttactctgccaagggagacgcggaaggcgaacggcgcgtccggaagctcctctcacaacttaccaaatccgaagctggggacattgcggatgaagaagtcaagcggcgggtgctggaaaaactcgccgacggcgatcccaaaagggtgttcagcaatcctgaaaatactccgttcttcgaaaccgaggagggccgccgcatccccatcaagcgcgtaagaatcaagaaggccgtgccgacattcgcattaggcgacgggaaaaccgcccgccacgttaccagtgagtccaatcatcatctcgaagtgtttgcggaactcgacgagaatgggaacgaagtcgaatgggacggcgtcgtcgtccccatggccgaagcctataggcggaagaagctccgcctagctgtcgtccagcgtgaccatggcccgcagcggcgattcaggttttcgctcggccagggagaggttgttgaatgcgacgacaaacagggggaccggtctttgttcgtatttcgaaaggtaacgcaattcagcgttggcgggattcagatcgggtttgctccgctcaacgacgccaggaaagctcgtgaaatgcaggtttctcgcgcttggctctggacgactccgaacacgcttggcgagcggcacgcccgcaaagttgtcgtcagtccgctgggggaggtttccgaagcccatgactgagcgcatccttgacctttcggaacgtccggcgcacctgagcgtgcggaatgagttgctggtgatccgcttcggccctgtagcggcggtctatgaccgccgaacgacaggcgatgcggaagtcgccgctagggaggctgccgaggcggcgctaccggaaacgcataccatcccgctggctgatattgccgtggttatcgcatcgcacccgcagatttcctacacgcacgcggtactcgcggggctggccgccgccggtggaatgtttgtggtttgcgaccaaaagcatctgcctgctgccatgctcttgccgctggtcacccactcgacccagaccgaacgcttcgccgcacaggcgaagcttgctttgcccacgggcaagcgcctgtggcagcagattgtgcaggccaaactccgggcgcaggcccgtctgcttgaagaaaggacgggcaaggattggggcttgggtgcgctggctggccgagtgcgctccggcgatcccgaaaacatggagggccaagccgcccgcgtctactggcgcgctttgtttgcggatgacgatttccgccgcgatcccgaaggggagggtgtgaactcgtgcctgaattacgggtacgcggtgctgcgggcggcggtggcgcgcgccatctgcgggacgggactccatccttcgctcggcatccatcaccacaaccgctatgacgccttctgcctcgccgacgacttgatggagcccttccgcccggtggtggactgcgtggtggccaagctgcgggacgctcgcgggaacgacatccccctcgataaagaagcgaagcgcgccttgctggaggcgctgctgggccgattcacggcggataacgaatcccgcaccttgtttgattgggtcagccggacggcctgttcgctgtccgccgttatcgaaggcagcgcggagaaactggaaattccgcgcctgtagcacgggcatcttgcccgtggtcaatcactgtcgcggcctgatccctgacccctgtaacctgtacttccatgcctcgacacgaacttgcactctcaggataccgggctatgtggctctttgcgatgttcgaccttcccgtcgataaacccgagttgcgccgtgagtatgcgcaattccgccatagactgctgcggcagggcttcaccatgattcaatactccgtgtatgtccactacgtgcggagtgaggagtccgaagaggtctttcgcaaacgggttcatgcggtccttcccagccacggtcaggtgcggctcgtctccattaccgaccggcagttcgaaaagatggaagtttatgtggggaaaaagcgggaacgggtcgaggacccgccgcaccaactcatgcttttttgattctcaaaaggggagtatccccccggaaatcaggcgattccggggggaatagtgtacctcagaagcgattcccggcaaaccatagcctcaccgctcgagcggttccaatgagagggagtgtacctcagaagcgattcccggcaaaccatagctttggcgatggtgaaggccgctagacgataagtgtacctcagaagcgattcccggcaaaccatagctctatccggtgggcgaatcatcggtcagccagtgtacctcagaagcgattcccggcaaaccatagctgggtcgatatactttccaggcgaatcggtagtgtacctcagaagcgattcccggcaaaccatagcgacgatctgccgatctcccgatcatacctagtgtacctcagaagcgattcccggcaaaccatagccttgacaagcgcgaatacgagaagcgaatcagtgtacctcagaagcgattcccggcaaaccatagctcaccatccagcagattgccgcgcgattatagtgtacctcagaagcgattcccggcaaaccatagcgcggcgaacgtttggcacgcggccgttttagtgtacctcagaagcgattcccggcaaaccatagcgtggcgtcctgctgcccattcacccgctcagcgggtgtgggggcgcacggcttacgacttggggcggaagtcgtgcgcccctacgcgcggggacgaaatcaccaatccaaaatcgtcgtgttttcgtagcgtccgccttgagcgggttgctgaaaaacgatgtagcggcggctttacgccgccaccactgaaaaacgatgtagcggcggctttacgccgccaccactcactgaaaacattgggctcttggcgggataaacccgccgctacacactgggtgggtcagtgacctacccctacgggttccggattgcaaatcggaaatcgcaaatccaaaatcgtcatagcggcgctctatgagcgccgcagtatttgaagaatcaagcccggcggtcccgcatggcgggaccgccgccacaaatcaagttttgagacagactccggtggaacgtctcgttactgactcacatgccgttctggtgagaaggcccgccggtccgtcccaacgatgtgggcgcacaccacccgcccccgccgcgaaggcttggcacgcaaaaacctggctcgagcgttgcatcctgaggcggtcaagtatacattatcggttggccggaaactccaaaggggaattccggtcaaattcataacggaggggagaatgatcaggagggtcttggtgacggccttatctctacctttgtgggcgtgcttcgcctcctccgcccacgcccagttggggatgctctccacgcaaggacgcatcgaactgacgcgggagtggaaaggtgaacgctttgaggacggccgccctaaggttcccgacgcattgctcgaggaactcaagaccgtaagcgccgaagaggcgtggggcgtccttcagaagcacggctacaggaaccagttcgagtcgggctggcacgtaatcaatccgggtgggcgattggtgggccgggtggttacgaccgtgttcatgcccctgcggcccgatgtgaacgcggtaatcgaggagcgcggccagcaggaacgccgcagcggcgcgcaaaactcctggccgatcgaaattcttcagcccaacgacgtcctggtcgtggacctcttcgggaaaatcaaagacggtgtgtatgctggtgacaatctctgcacatccatttacgccaaaagtcacaccggcctgattgtggacggggcggtgcgtgacgtaaccggcatttccgagatcaagggcatgcgcgtttttgtgcggggcgtggacccttcggtgatacgcgacgtcacactcatgggcatcaacgtccccattcgcatcggccaggtcaccgtgatgccgggtgatgtagcggtgagtgaccccgaagggatcacgttcattcccccgtcgctcgtccaggaaatagttgatgaagcccaaatgactcacctggtggacgagtgggggcacctgatgctgcgcgaaggcaagtacacccccgggcaaatcgaccgcaagtggactagtgagatggtggaagagttcaacaaatggctcgagcaaaagggagcaaaattgcgcatgaagaaaccgtgatcgatcgagggtaacccgattgggcctatcaacgtgattgccttcccgcgtggcgctttaacaggttgctgaaaaacgtccccagcatgtcatcctgatcccgtcccgccatgcgggaggagaaggatctgcttttctgtgatatcaacaacttgcgagattcttcgtcgcctccggctcctcagaatgacagccatcgcgagtttttcagcaacctgttgaatcgggaccgagaggctgaaactcaagcgattctcagtcggacagggagatttagtgaagcctgataacattgtccttgaacaggaggaagagatgaccaagatcacccgtcgggattgcatccagggaacattggcagggctggccgcagcggtcgttagcagggcgccacgcgttcgagctgcctcgcgcgcccctagcactgagaggcctgatcgaggcagcatcaaactggcggaggtgttgggtctcggccaggaatcgcagtggaggctggcgcgtcaggtcggaatcaaccatgcgatcgtgggcgtcgagggcgcattgaggaaggtcggccgggaccaatacgaagagacgctcgcgaagatcaaaggggattacacggtggcggggctgaagattgccggtgtggagagccatccggtgccggcggagaagatcaagctggggctgccggggcgcgatgaagaaatcgaggattactgcgcggcgatcaaggcgctcggcaaccttggcgttcccatggtctgttacaacttcatggccggcctggggccgtaccgcacgcgcgtggatgttcccgaccgcggcggcgccctcgttatggaattcgacaatcaagcggcgatccggcaggggctgacgccgtggggggaggtcagtgaagacaagatctggagcaacctcgagtactttctgaaggcggttatccccgtggcggaaaaggccggggtgcagatggcgctgcacccggacgatccgcccctttcgcccttacgtggaatcggacgcatcctgaccagcgccaagaactaccggcgagtgttagacgtcgtgcccagccccatgaacggcatcaccttctgccaggcgaacttcaagctcatgggggaggacatcgcggcgctggcccgcgaatggtgcgcgcaaaagaaaatcttcttcgtgcacttccgcgacgtcgaagggacgcgggagcactttcgcgagacctttcacgacaacggccccaccgacatggtccagatgctgcggatctacggagagagcggtttccacgggccgatgcggcccgaccacgcgccgacgctcgagggagaggccaacgatcgccccggttacgccatgctgggaaaacttttcgcctttggctacatgaaggggatcatgaaggcgattggagtttcctacgagtgaaggcctgcagacactatcgcgggggccttcacaagagagcggatctccccactggaagtcacgctggagtcgcggtacacttaccaccgcttccgagcaagttgcaccaaaagacctgcagacgggtgcctgtgatgcaaagacacatcaatcgccgtgagtttcttaagggtttgggggttgctgcggccggttattacttccgcccgccggaccttcttgccgtcaccagcgcgccgacggctcccgtcgccgtcgcgaagtgttcaacgtacgggccggaagtgcgcgcgaccctcgctacgatgttcgaccagctcggcggcttgcagcgcctggtgaagggaaaaacggtagcggtgaagcttaacctgaccgggaccatcgcgatgcgcatgagcggaatgccattggaacgtacccattgggtccatcccgaagtcgtcggttccaccatcagcctgctcgacagggcaggagcgcggcggatcagaattctcgaaagcacattgaccccggcggagtctttcgaagagttcctgctggaagccaaatggaacccgcgtgaccttttgggcgccgcctccggcgtggagcttgagaacaccaactacccgggacggaccggaaagtacatacggctgccagtgcctggcggcgggatggtgttcaaggcttacgatgtgaaccgttcctacctggactgcgacgtctacgtctctcttggcaagctgaaggagcactcccaggggggagtaacgctctcgatgaagaattcctcctttggcattcccccctgcacaatctatggagacggtgcgggaaccgacgagccgtcaaaaattgtgaagggtgcgcgcgtgatgctccatgacggcaaacggcaaccctcaaagacggccttgcccgaaatcgatcccacgtctccgagggatcatggatatcgtgtgccccgggtgacggtcgagctggtggcggcgcgtcccatccatctggccattatcgatgggatcgaaaccgtggcaggcggagaagggccttggattcgtgggactcggcccgtccggccaggcctgttggtcgccggtacgaattgcgtcaccacggatgccgtcgccaccgccctcatgggatttgaccctatggcggaccgaggtacgcctccctttgaaatctgtgacagtacgctgcggctggccgagaagcttggcatcggcacccgagaccttcgccggattgaagtgctgggaacacccattgcaaaggggcgatttgactttcggcgttcgtaatccactatctgtagtccgacgttcccgtctttgcgcccaccacacggaccttcattgagccaggtaccgcagagtttgggggtttcaaactctgcggcttgccagaggaagaaccgcagagtagtgcgctgccgcgcatgactctgcgctggcgaactggcccctcacccgtcccgcgctgcgggacaccctctcccctgcggagagggtggggtttatgcgggcgcacgccgtgcgccgccctatgagcgccggaatcgtcgatcatagatcgacgttacagccgaagggcgaacacgcagttccgcccgacaacatgggcgcacgccatgcgccccgactagaaattctccaggatttcggtgacgagggtatgggcgaagtcgcgggcgaggcgttcgagggcgggctggtcttcctcgaactgagcgctgggcgtctggctgatctggtattgctcgcggaaaatgtacttggggttcttgaagagcaccttcttggtgtgcaggtccacgagttcgacttcagcggtgacctggacctgcgaggtggtggcgcggccggtggcaaggtcgaaggccaccacgccggagcgcacgtccgtgatggtgccgcgcaagacggcgtcggcctgggtggggttggcggtgatttgatacgaggtgcgttcgaggaactcgcgcgtgaccgccgccgccaccttctgctcgatgcggaagcgcgtgctcgcgttcacgaaggccgggagggcgatcgtcttgatagtgggcggcagattgctgcccttgcccgccacgtgatagccgcaggccggggccagcgccgccagcaaaaccaaacctgcgaggcaggggcgggtttgcaaacccgctcctactggagacttcattcgtttcatcgtcagtcccaccacgatctacgctgctctgaatccaatgcggcgacgcttgggtgccggcggcgccatcaactgccggatcgcgtcgaagacccccttgaactgtgcgtcgtatttcttctccaattcatcgagtcggcccgccaattctttatgcgccgccagcatctgtcggagccgtacgaacgcccgcatgatttcaatattgacctgcacggcgcgctggcttcgcagcacgctcgatagcatcgctacgccttgctcggtgaaagcccgcgggcgataccgtctgccgccccaacttgaggtcacaaattgtgacctcaaacttgaggcgccaaattggagcctcaagttctcggactcttccggggtcagttggaacatgaagtcctcaggaaacctatcgaggttgcgtttgacggcttggttgaagaccttcgtcggcacgccgtaaagccctgccaagtcggcgtccagcatgaccttatggcctcggatcagcagaattgcgtcttcgattcgttcgcggggaacaatcgcttgcgccgtgggcaaagcccaactcctccaggttaccctgaatcgctgcttccaacctatggtgatctgacaactaccactgtacccttgccggagaacgtgttccccgcagactctccgcgatttcgacggcgttcaccgcggccaggcgcaggttatcggctgtggcccaaatccagactccgtggctggacgcggcatcgcgcgccagcgcgtcgatcaggatatcattgctcccggcggcttcgacctgcgacggcgcgggctgcgaagccttccgcacccggatgtgttcaccctgcagcgcctgggagacggcctccagggccgccgcctccgccatttggacatagagcgagaaggccagcgaatagaagaccggaacctgcacgagccgcaaggccggcggcggcacgcggtccgctagataatgccgcgtctggacgcgaatgcgcttctcaagctccgtgagcgccgaagtccgggcgtgtccccaccggggcagcacgttgaacgccagttgcgcgccgaagacggtctgcggcggcttctgaaagctcatcaggttgacgctctgtttctgcaattcctcgaccgcccgcgaacccatctcggacaccggcgcaaaaatgtgcgcagtggcgctccgcaacctgaatcgcgcggccaggcgcaacaacaggctgctgatgaccatcgcggccggatgcgccgaaaggaagaccctggcgctcgccgggctcggacgatgcacgaccggcgcggccagtcccgcgcgctcgagggagggaatacgcaagaccggcgcgggggcttcgccggacgaatccgcggcggctggctcgccggtagaaatcaggtcgatgaccgcgcaattgccttcggccgcccggcgcagcaggttggttgccgctgcggccgacggcggggcggcggccaggaagataaagtcgaactgagtcccgctcacctcgtcggcaggttccgaagcctgggagtcctgttgcaggtccagaatggggaggtcgggttcttccgcctcggtctcgaacttcaccaggcgcgccatcgggaattggcgttcttccaggacggttattagttcctggccaagcagcgacgaggctccgaccacggcgacccggaagcccggcgaggtcggcttcatgcggcatgtacctctttgggcgcggggggctgcggccgcaaccgggagatgatccggccgataggtccggagagaaggtaagtgagcgccaaggtcagcagcacgggctccgagaaggcgaaaatcgaccagatgatcacgccgaaaaggatcacgagcacgtaagggcgccgccgccgcaagtcgagcgtcttgaagctgtaatagcggacccggctcaccatcaggaaagccagcagggccatcaccgccaggccggccgcgccgtggatccagttgtccaagggattcttggcccagtggacgatggacgcgaccacgccggcggcggcagggatgggcagaccgataaagaaccggcggtcctgtgtgcccttcgtgctatcgatattgaaccgggccagacgcgccgcgccgcagatggcgtaagcaaaggtcacaatccagccaacttggcgaagattcttgactgcctccgcgccgtaggtcagatccagggcgcgaataccccaggcatacgcgagcaaggccggggcgatgccgaaggtgacgacgtcggcaagcgaatcgaactcgcgcccgaactcggaagcggaattggtaaggcgggcgatgcggccgtccaagccgtcgaagacgatggcccagccgatggctttggcggcattgtcgaaggcggccagggccagtgcggcctctgtcccggcggccaggagcatgcttccgcggaacgtggacaggatggcatagtacccgcagatcagcgtgccgatcgtaaacatgctgggcaggatgtagatgccccgccgcaaacgccccttcttttttaccgcctcaggatttggttgttccaaggatgctgctccctgcgcgcacggaatcccccatcttgacctgcaattccaccccggggtccagcaagacgtccacgcgcgagccgaattttatcatgcccacccgttcgccgcgggccagttggtcgccagccttcttccagaagacgatgcggcgcgccagggccccggctatctggctgaccacgaccgttccctgcgcgccctcgatggtaaaggtgttttgctcgttttccaccgaggcgcgcgtctgcgaggcgacgtgaaacgcccctt

SEQ ID NO: 879 - DNA, 14840 bp, synthetic construct
  source 1..14840: mol_type = other DNA
  misc_feature 1..14840: note = Synthetic
cgcggtcaacttcaaccgtgaggttcttgccgtaggccgcagcggcactgcgatcgcaatacttcgtcatcaaccgcactaagttttcgtcccgcgcggtggtcatgaagtcgccgggcgcctgcgtgttgcgtaatcggagggtcgcggcgtattcgttcaatttttgcgcgtctccatttgcagcgcgtcgcgccgcctgctctacaagttcggccccgatcatcgcatcgaccgcgacatcctgcccggcttcgatcttcttgataaaccctcttcgccatgattcaaagtgatcgacccatgcctgcaaagtgtattcatactgtccgacctcgaggaccgtaaaactgccgagccaccggtcgttcacctcttcctgcatcggcgcttcatgccacgatggttcgccggcccggcggaagagcagcacagcagcaaccgcatcatgtccgtcagcgaagatatccgcgcttacaacaacacgttcgcctgcgatcctcttgatgggaaaacgtccgccctgaatttccggatgcacattttcaatcaccactcgaggaggactcgcagaagattcaaatgtgtgtgacccagtcactggactcacttttcgcgcctcgaattctattggaggaacaaccgacaactgccatctgtggcagcggtcctttttggaagatcgcaaaagcggttgccccggccagccgtcggcctgaggattggtgaatcagtcgaacgaaagcccgcaagacttctttattctacctctgcactccaccttgagcaaccgcaccgcgacaattctccgaactcctggcgattgacgatcaaccgaagagcatgtaacttaagaaaacagatcgcggagggatgggtgagcggttgaaaccggcggtcttgaaaaccgttagccccgaaaggggctcgggggttcgaatccctctccctccgccaggctacaagagcacaggttctgccaagatgggaaattctacgcggtgtgcgagcagaagacaaacattgttttcccgcgaaactcgcgacagcctgtagtttttataaagtattgataatattattgttataaattttttgcaggaatttaatgaaaatcccacctgtcccaccgcgttcgatttccggcatatgtagcctacattgcgaggatggccgcgcccgtcgccctgcccaccctgccgagctttacgcctccgctcctcacctttgcaaacccgacccccggcacggcccctccaagccctgctgagtctcccgcgcgactcaagttgcgcgcactcccgatcagagtccgacttgcggagtcacaacccgcaacggtgtcgcaacaggagtccctccggtgccgctgcatccacgtcctggaacaatttcctgcggaagcaccgagcccgcgtttttccgcgaatgagtgtggattgcggtccaggatcccggcgtcctcggaggcggggtcaaaaagcaaaagccccgcactgggcggggctgaaggtcgctgtttccaacgttgcctacgcaggtagaacctacttactaagataagcaggaaccgctgctgagatacacaggtgtataataccgccaatttattctttgtcaagaggtgacttgtgtctgaacatctggattatgttctcggaattgatttaggcagcaactctctcggatgggctgttatcggtctcatcgatggcgagccggcgcaacttgtccgggccggcgtgcgcgtctttgacgccggcatggaaggcgacctggaatccgggcgcgaagaatcacgaaacctgaagcggcgcgaagcccggctccatcgccgcctgctgtggcgccgccaacgcaggctgacaaagctcttcaatctgctccagcgcttgacctgctcccgcccgcaccgagtatttccgaacacttgccgaacggccaccggcggccgatcactcctgagcagcgccaggacctcctcaatcaactcgacaggcggattttgtcatcggcctggttccagaccaaagtgaactccggcgcatttcccgagcccgaacacaccatgccttacatcctccgcgctgcggcccttgacgagcccctcgaaccgcacatgttcgggcgggcgctttaccaccttggccagcgccgcggcttcctgagcaaccgaaagcaggcgccaaagaaaaatgacgacgagggcgccgtcaaggagggcatcgctgaattgcgcaaggccatgcagacatccggcgcccggaccctcggcgaatacttttcacgcctcaacccctccacggaacgcatccgctgccgctggaccgcccgcgatatgtatgagaaagagttcaacgctatctgggacgcccaggccccgcatcatgccgatttactgaccccggagaggaagaagcaaatttacgacgccatctttttccagcgcccgctctggcttgatccgggcacagtcgggaactgtgaactcgaaccgggcgagaagcgtgctccggcttatctcctggtgtcccagcgcttccgtctgctgcagacggtcaataatctcagggtccttccgcccgacgatgttgacatgcccttgacgccgacggaccgcaaaaaactggttgatgcattggaaatgaagggcgacctgacgttcaaggaaatctcgaaacttctcaaactggaaaaagggtacaaattcaatctggagagcggcggcgaaaaacgaatcaagggcaatcgaaccaatgcggacttttacgccgtcttcggcgagcgctggcttgccatgtcgcccgaggagcgggaccgcgcggtcgagtatgtccattcattccagaaagccgaaaagctgaaggatgccgcccgcaaaaaatacgacttgaccgaagagcaggccgagcagctggcgggcatatcgctcgaagcggactacataaacctttcccgcaaggccattgaaaagttccttcccctgctcgaggagggcgtcacctacggcgaagcgcgcaagaagctctatccggaatcgtttgaagctcgtgaagccatgccgctgctgcctcctgtagagacggccctggcgcagattcgaaatcctgcggtcatgcgcagcctcacggaactccgcaaggtcgtcaacgcgctggttcgccgttacggtaagccttcctgtgtgcatctggaactggcgcgcgacctgaagaaatccaagaaacagcgccaggccatttccgaaaacaaccggcggaatgagagcgcccgcgccaaggccgctgaagccatcatcaaggctgatgtcggcatcagcgcgccaagccccgatgacattcgcaaggtcctgctggccgaggagtgccactggacctgcccctacaccggcaggagcatctccatgcgctccctgctcggtcctgagccgcaattcgacatcgagcacatcgtccccttcagccgctcgatggacaactccttccagaacctcacgctctgctacgtacccgagaaccgcagcgtgaagggcaacaggaccccttggcaggcttaccacggcgacccggaacggtatcaggccatccttgatcgcgtcagaaaattcgccggcgaccgccagacggtagcggccaaactcaggcgctttaccatgaccgacgatgaactcgaaggtttcctcgaggatttccgcaaccgccaattgaatgacaccgcctacgcaacctcgctagccgcaaagtatctcggactcctttacggcggggtcaacgacgcggacggccgaaagcgggtgcaggctacttccgggcaggcgacggcctacttccgcagcttgtggaagctgaactccatcctgaacgacggccccacaagcgacggcggcgccgttccgaaatcgcgcgacgaccaccgccaccatgccgtggatgccgtcgtcatcggcctgacggacgccgccatgatcaagcgcctgtcagacgccgcgcagcgggcacagcttgagcaccgccgacgctttgcttcgcttgaagcgccctggcccaacttcgtggattccgtccgcacagaaattgacagaatcatcgtctcacatcgcgtctcgaaaaaggtttccggcgcgctgcatgaagaaaccatctattcgcgccccatgggcaaggatggagaggtccgcgtccgcaagccgctggattcactgtcccggccggaagtcgagaaaatcgctgatgaaggcgtcaggaaactggtgcagcaaaagctcgaacaacttggcggcatcgagccgaaaaaggcgtttcccaatcctgaaaaccttccacgcttcccttccagcggcgtggtcatcaaaaacgtgcgaatcaccaagccattgcccatcttcaccctcagcgaggggaggcgtgcgcgtcatgtcacgagcgaatcgaaccatcatgtcgaaatctatgctgagcttgacgaacacggtaatgagaagaaatggggtggcgaggtcgtttcaatggctgaggcctatcagcgcctcaagactggaaagcccatcgtccagcgcgatcacgggccgctcgtgaagttcaagttttcactcgcgccgggagaggttgttgaatgcgaaggaaaagatggaatgcggggactcttcgtaatgcgaaaagccagccaactgacatcaggccagttgcagattggatttgccccgcttgcggacgccagaaaggcgagggaaattcaaacgtccagggcctggctctgggccagcccgaacacgctaggcgaaagaaatccacgcaaggttgtcgtgagcccgattggggaggtcaccgaaacgcatgattgatcaggagttcaaatttcaattctcagagaaaatcagcgggaatcccggattgcagatttcagggccgggtgacggcgaaatatgtctgaaatctgcaatttcaaatttcaaatggaaggagcggccccatgaagtacgagcgcttcgagcagttgcccgtctggcaggcggcggttgaccttgcgcggggagtttacgtgctgacaaaaaagcgcgaattccgtggccagcacagcctgcgcgaccagatcgagcgggcatccgtctcggtttccaacaacatcgcggaaggctttgagcgcggcacaacgcaggaactgttcacgtttctctacattgcgcgaggctcggcgggtgaagtccggtccatgctgtgcctgctggaaggactgccggggttcggcgatctcaaatctgaaatttcagatttgaaaatgcgcgcagaaggagtttcaaggcaactgcgcggctgggccgactcactgcagaactccagaatcaccggccagcgctatctgaatgagaaagtccgccaggcggagaaaagccgcaaagaccgggaggaatttcttgaggaacttgaacgaattcgcaggggcggcgccagggaagaaggctgagagctgcaaatttgaaatctcagattggaaatttcaaagcgtggaaacgcggatttgaaatctcaaggcgcggaaatgtgaacttgatatctccgatttgaaatttcagagtgcggaaaaatgggcatttgaaatctcagattggaaatttcaaagcgtggaaacgcggatatgacatctcaactttgaaatttcaaatcggcggagcggcgctaatctgaaaccgaaaaaaaaagagagaaccccatgaacgaacgcatcctcgatctctcagagcgtccggcacgcctgagcgtccgcaatggcctgctggtcatcgattttgccccttctccaacggcatcacccgataaccgcgacccgcagtccggcctccggacccgcgcagcagaggagcagaccgtcccccttgccgacattgccgtggtgattgccgcgcatccgcagatttccttcacgcaagctgtgctcgcgggcctggcggaagcgggcgggatcttcatcgcctgcaacgagaagcggacgccctgcgccatgctgctgccgcttgaaaatcattccacgcagacagagcgcttccgggcgcaggcggacctgccgctgccgaaccgcaagcgcctatggcagcagattgttaaagctaaggtccttgcacaggcaaagctgctgaaggaacgcaccggggaggactgggggcttgaaatgctggccgcaggcgtgcgctccggggacccgcagaatatcgaggctcgcgccgcccgcatttactggaagaacctttttggagaagaagatttccgacgcaatccggagggcgagggtctgaatcctgtcctcaattacggctacgccgtgctgcgcgccatctgcgcccgcgctctctgcgccgcagggctgcatccttcgctcggcatccaccaccacaaccgctacgatgccttctgcctggccgacgatctgatggagccgtttcgccccgtggtggaccgggccgtcgccgcgctccgcgatatgcgcgaaggcgaaccggaactcgaccgcgaaaccaaacgcgccctgcttgaggcgctgctcgcaaggttcgaggccaatggcgaatccagaacgcttttcgactgggtcagcaggaccgcatcgtcactggccgctgccattgagaacggggacaggaaactcgatattccgctgctgtagcggtgtcacgggaatcaagacagtggctcacaggccgcccgcaggtgttttaagctatgccgcgccatcaattcgcgctttcaggataccgagccatgtggttgttcgccatgttcgaccttccggtcgataagcccgaactgcgcaaggagtacgcacaattccgtgccgcgctgctgaagcagggctttaccatgctgcagtattccgtttatgtccactacgtcgccagcgaggacagcgaagaagtgttgcggaagaaagtgcacggcgccctgcccagccacggccaggtgcgcatgctctccgtgaccgaccgccagtttgaaaaaatggaggtctatgtcggaaaaaagcgcgagaaggccgaagacccgccgatgcagctcatgcttttttgatttttttgggggattatccccccggattacagcaggttccggggggatatagtgtatctcagcagcggttcccggcaaaccatagcgcctagtgaaaacgatacaaatagctacatagtgtatctcagcagcggttcccggcaaaccatagcttacgctgctgttttcgctcttcctcttccagtgtatctcagcagcggttcccggcaaaccatagcgagaagggacgggcggggttcattgtccgagtgtatctcagcagcggttcccggcaaaccatagcgaaaaggtaaagtcgctgccagctggacaaagtgtatctcagcagcggttcccggcaaaccatagcatgaaggatagagacaattatcttaaacttagtgtatctcagcagcggttcccggcaaaccatagcgcaaactcacccagcatacacagttgacttagtgtatctcagcagcggttcccggcaaaccatagcgagatcgtggagcctcctttagttatctttagtgtatctcagcagcggttcccggcaaaccatagcttcaagcttcatcaccgccccgcatccccagtgtatctcagcagcggttcccggcaaaccatagctccacatccttgaggaggcttacgagcagagtgtatctcagcagcggttcccggcaaaccatagcccagttttcggatttgtaacggtaaccacgagtgtatctcagcagcggttcccggcaaaccatagctccgccgaccacggagcgccgtcgagcggcaagtgtatctcagcagcggttcccggcaaaccatagctgaactcaatttgacactcaacacaaagttagtgtatctcagcagcggttcccggcaaaccatagcgtccgccgctaggcaggcggggcagagcgagtgtatctcagcagcggttcccggcaaaccatagcacgtcaaggcatatggagcgaagggtgatgagtgtatctcagcagcggttcccggcaaaccatagcttatcaatgtgtcacggcggattgtacctgagtgtatctcagcagcggttcccggcaaaccatagcttggaccatcaaatagctacgctcagcttagtgtatctcagcagcggttcccggcaaaccatagcgaaccagatttgtcaaaggcttggtgcgcgagtgtatctcagcagcggttcccggcaaaccatagcagtcccagctaattcttcctcttcctcaaagtgtatctcagcagcggttcccggcaaaccatagcattggatgctatggggatataactcgtttgagtgtatctcagcagcggttcccggcaaaccatagccggcggcggtggttcttccggcggcagtggagtgtatctcagcagcggttcccggcaaaccatagcggcaggcattgtgaactccggcggcggagtagtgtatctcagcagcggttcccggcaaaccatagcttcaacttcgcaggtacatctgagccatgaagtgtatctcagcagcggttcccggcaaaccatagcgtgccaagctaacggttgaacgcctacacaagtgtatctcagcagcggttcccggcaaaccatagcgagatggtaatcgaaatggaccttccaagaagtgtatctcagcagcggttcccggcaaaccatagccactcaatcgtgcttaaccatgaatcaaagagtgtatctcagcagcggttcccggcaaaccatagcctcactcacataatgtgtcatgcaaaaacgagtgtatctcagcagcggttcccggcaaaccatagcacggcgactgcagggaaatactgccgatgcagtgtatctcagcagcggttcccggcaaaccatagcagcgggtagagttgagccagtcgcactggcagtgtatctcagcagcggttcccggcaaaccatagccggctccgtcaacggtgggactggcgggcgagtgtatctcagcagcggttcccggcaaaccatagcgacatcacaacataccgcttcgccaaaccgagtgtatctcagcagcggttcccggcaaaccgtagcgatgcaggaagcgacgagtgaaatgggcgttttggggacgaaggcaacggagttcggggattgctgcatcgaaaaacagccacactctttgccggcgatttgcatcagaataatatcggggaaagaaaacagggggcgcagaattgaggacgcgaatgcaatccgcgcgaggggcgttttggcgggcctggcggttggggcgcgcgcagggctgggcgtggcggctgggaattctgatctgcatgggcgcatttcttccggcgcgtggggcggctgctccggcgcaggcggcggttgcgggggcaggttccagcgccgcggccgcacaggctacggcgccttcgtccgccggccaggctgcaatcgggcaatccgcgggcagcatcagcggcagcgtgacggacccgaacggcggcccggtcagcgctgcgctcgtgactctttcgagcggcggccggaccgtgcagcaggtgcgggcggctgacaacggagaattcgcgtttgccggcgtcgctcccgggaactatcaactcagcgtttccgcggcgggttttgaatcgcagtctgcgtttgtggcgctccatccaggcgaaacctacacggcgccgcggatcgtgctggccctcgcgccggtagtgacatccatcaaggtgacgccttcccgcgccgaaatcgccaagtatcaactgcaacacgaagaaaagcagcttgtgctcggatttattccgaattacctggtgacttattacccgcacaccgcgccgctcagttcccggcagaaattccaactgatgttcaagaccgtcttcaatccgttcacgctggggctgacgacggcgttcgtgggcggcgagcaggcggccggcatgtacagcggctatggcaacgaagagaagggcttcgcaaagcggtttggcgcagcttacgccacgctgggcatcggcgccttcatgagcgacgctctgctgccctcgatcctgaaacaggacccgcgtttttactacaaggcggacggcagcgtcccttcacgattgctctacgcgatcacgcgttcggtgatctgcaagggcgataatgggcactgggaaccggatttctcgtccgtgctggggcacttcgccgcgggcggcatcgccaacctctacctcccgccgcaaaaccgcagaggatggggaacaacgctcgagaacggcatgatcgggatcgggttcgacgcgttcgccaatatccttcaggaatttttgcttcccaaactcaccccgagcctttcccatcgccgtcacggcaggccctgaacagcccctcagaacatcaactggagcgacagcataatcacgcgcggattattggtctgattgttgaaaggcgcgtactggccgaacgtcccggagctggcgttgttattgacgctggtgtacgcccaatcgggatgattgaaggcgttggtgaagtcggcgcggaactcgagcttgtagcgctccttgatcgccgtgtctttcaccgcagaaatgtcggtctggaagctgctcgggccgcgcaggttcggcagatacggcgaccattcgatcaactggaacggctgcaagacaacccaggcagggtcttcgcccggaaggcacttggtgccgacaatgcacgtgttgaaccagtgtgaaagagtctggtgcgcagccttcacggaagcgccggtgggcgcaacgccgagcgggaacggaatcggaaatcccgcctgccagcgcgacactccgctgaccgaccagcctcccacgacgcggctgatgaagggattgctgctgcttgcgaaggcgcggccgggcccgaagggcaggtcccacacgccggagaacttcaactgctccggagaatcgtacggcgagaggaaccacacaggggccggatccgtcgggttcaaaaaattcacggcctgcatcgtcttggaccacgtgaaattcacgtcaaagtcgaggccgtgggacatgcgtttgaccagatccatccaaaggccgttgtatttgttcttgccgatgggaatgaagttttccgtgacgccgttcaccggatactgcgggtacgggaccatcaactgctgctgtttaaccgtcggcgagttcagataagttcccttgagcagactgtaatacggggcgttggcctgcacaaactgcgcctggtaaagcgggttcgtgacgctggcgttcaacactgaagccccaagagccagcgccgaaagcggaaggtaattcaggttccttgtaacgggcaggcgattgatgtagctgcctacataagagacgctcgccagccagttctggcgaaactgatgctggatgctcagcgaatattgctgggtgcgaggaatgttggtcgccggatctgtgaagctgacaccctgcccgatcgccgtggccaggccgaacgaactgcctgacggcgccagaatgccgttcgggaaaggattggtcagaagggtagccggaattccctcctgaaccggcgaaagaatattggtggtctggctgaagccgggcgcggcaccggggttctgccatgcctgggcataaatgatcccatagccgccgcgaaccacggtgctctgccggaagcgataggcaaagctgaagcgcggaccgatgttgccgtaatgcgggtcctgaatgccgcggggattgtcgccaacgcctgcaaactcaagccctccatgcaggttcatggccggatagtccacgccgttgatggtcattccgggcacctggatggggctcgcacaggtaacgcagaagccgcgcgtaagagcgttgaagcggtccgtcagcgggccctgatagtcccatcgcaggccgacggtgagcgtcagtctggacgtcatgcgaatgtcatcctggccgaagacagaccacagatgcatcatcagcgcgggcgcgctgttgacttggatgaagccggaactcgggtagcccagcagaaaatccgcgatggagtttcctgaggtcgggctgggtgcggaattaggatcagcggccgtgaacgccccgttgaagctgaagttccctgctgaaaatcccggctgctcaacgttctcaccgacttccatattctggaagccgaacttcatgttgtgccggttgtagattttcgccagcacggcctcattcgtaatcgtcagatccgaaggcgtgatgcccagcgggctggaacctgcgccttcgtaatcagaccagttgaatttgggaaaccaacggctggcttccgcgataaacgtctgggaaaaattcaggctggagacgttgaacccctggctgatgctgctgccgctgattgatcggaaacggtccagcccggtccgaacctgcagcacggttgtgggattgaacgtgtgagtcacctctaacgtgaagtcatcattctgcctgccgaaaggtgagttgccgctggtctcggcaagattgtacggttcgccgttaaaggagtatttgtaactgcgggtctcggccaacgaattccagccgtaccggaaaaacatgtgggtcttgtctgagatgttgtagtcgagccgcccatcatattccggaaagtcgtcgataaatttcctctgcttcgatgtgggaaaccagttgttcagatgtgtgttgggatcaccggcattcggcggcggatccgggatatatttcagcacggcctgcgccaccgggttgatgcggtcgggaggaataatattgccggcaaagggggtccgggtgcaggtcccgccgctgcaggacgtcgtgagtggatcgtagatcaccttcaggctgccgtcggtattgcgcaggtcggaaaaatcgccgttcttttcagcgggagtcggaacggaagtcgagaagtaatccggctgcacctgcttgatcttctggtatgcaaagaagaacagcagcttgtttctcacaatgggaccgcccacgctgccgccgtaatagttctggtgccacgcgcctttgggttgatgggtatagttctcctgccaggttgcggcgttcagcaccgtgttctggagatattcataagcgtggccgtgccaggtgttcgttccgcctttggtgatcgtgttaattacgccgcccgtcgtccagccatattgcgcgtcgtacatcgtgctttgcacgtgcacttcctgcaccgtatcggaaatcgggttataaccgacgcccaccgcatgcgtgttcgccgatactccatccacaagcaccaggttgccgctgccgcccgcctgccccggctggcccccaaaaccaccctgcgaagaaatgccgccgccgatgttttcgccctggctccctgccgtatcaaacggccgcaggtttttcgcgccggtgctgaccgtgacgccgggagcgaaccacgtgctcatgatggtgttcaggttgcgcacgggaatggctgagattcgctccgaggagatcgtccaactgttttcgccggagttcatctggagcagcggagcgttgccggtcacctggacagtctgggtcacctccccgatctgcaatttgaaatccagtgtgacttgcgccgcaacggtcagcgtgaccccgcgctgaatatactgcttgaagccctgcttggacactgagaactcgtaattcccgggattcaggaatggaaactgataaaggccgatggcgttggatgtggtggtactgatcgctcccgtggatgtctgtcgggccttaatggtcgcgcccgggatcggcgcgcccgaaggatcataaacatggcccgtgacggccgcactgttgcgttgcgcggcaagaggaagaggcaaaagcattaaaagcgcaaccaaggccaggactttggttctcatctttctcctccttcatccaagctcacattccgcctcgggaggcatcaagagcgaaggggccggcgcaccatgagcgcggttgaggcttccctcccgtgaaagttaccctgcgttgctttgccctcgaatggccgagggaccgttcatgttatgaaatggccgacaggccagatggcccgccccgacgcctgggggattgtaccgctacctggaatttgcctaacgggaaacggtatagaccaagatggaataaatgtcaacaaaaatatattgtgatcattttttaagaacatattgcagaaacatgaaattctgcatacactcatgaaactccatttctggggagcttttgagcgtccttcagggtgcaaaaggtcatgctgaaacccgttccgcctgaactttctggagtattcgcggccgtgcctacgccattccgttcagacggctcgccggacgcggagaaattccgccaccttctcgaattccttttgcgcaagggcatccgcggcttctgcctgggcggggtcacgggcgagtacgcagccctgggagtcgaagaacggctctcgcttttccaggacgccgcgcgccatatcgccgacagggccgcgctggtcatcggcgttggggctgagcattgcggccaggtccagcggctcgggcaaggagcggcggagatgggcgcgacggctgcactgctgccgccgccatttttctttccgcatctttccaacgatgttctggattttcttctgagcgttgcgcccgggctgcccctgcccgtcatcttctacaacattccgcaattcaccagcgcggtgtcaatgcatgatatcgtgcaattcatcgggtccgttcccaacgccgtgggaatcaaggac

SEQ ID NO: 880 - DNA, 7022 bp, synthetic construct
  source 1..7022: mol_type = other DNA
  misc_feature 1..7022: note = Synthetic
gggcggtctggagcaggggcaggaagtccagctaagattttccctgcccccggttcaggaggcgctgaatccgcgcgcccaggtcgtgcgccgagcacctccggaccgcatggcggtccacttcaccacgctcgcccccgaagagcgtaaagccatccaagcctacatcgccgggatcgtcaaagggtagggaagagactccgcgggcggcgctggcccagcgcaagctgtcaccctgagcgaagcgaagggtcttgcctccaccgcttctgtagcggcggcgtccacggcggggtttgcggtgtgtgcgctgtcatcctgagtccgtcacttgcctgcctgcttgccgcaggcaagctgcaagcccgccgcggcgggcaagcagggctgacggacgaaggatctcggtagccacggttaattcgcggtttgaattaaccgtgggcttttactgaaggacgacgagacttttggagtgcggaagctctgcttccgctttgctgtttgggagctttgctcccggattctgggtgcgggggactcggccgcacttcgcgcagccgaggcatcccaaccgcatacatcctggacaacgggatgtatgcgccacccgcgccagccagcggctcccttgacgcctgccctgaatcccacaaccgcagacctaaaatgaaaggtctgtgccagccagcgctttgcgccatgtccagccgactagggaaaacttgcggggaaaaatgaaaagccccgcactgggcggggcttaagggcgctattgctagcggagccttacgtagttgaacccacttactaagataagcgggaaccgctactgagatacaccgagaggtagtataattactcccagaccattgtcaaggggaaaatatggacacgcaaccctcacgcgactacgttctcggtattgatctcggctctaacagcctcggctgggcgatgatcggtctcgaagacggccagcccgcgaagctcctccgcgccggcgtgcgcgtcttcgaagctggcatggaaggcaacatcgaatccggacaggaagagtcccggaacctcaagcgccgcgaagcgcgcctgcatcggcgtcaactctggcgccgcgcccgccgactaaagaaggtctttcgactgcttcagacctatggcttgctccccgctgtaccgccgcccttcagggcggcaccggctttcgtagcgctggccttcaggccagcagatggcgggctaaagcccaccgctacacccgaccagcggcaggacttcctcaacgaactcgaccggcagattctcacctcggcgtggtttgccgccaagaaagcctcgggcgtgtaccctgagcccgagcaaacgctgccctacatcctgcgctctgccgcattggacgaacgccttgaaccgcaccttctcgggcgcgccctctatcaccttgcccagcgtcggggcttcctgagcactcgcaagcaggcgcgagctgcaaagaaaaaggaagaagagggcgtcgtcaagcaaggcatcagcgacctgcgtcgcaaaatggaggaggccaaggcccgcaccctcggcgactacttctcccgcattcccccttccgaggaacgcatccgcggccgctggacggcgcgcgcgatgtacgaagaggaattccagcaaatctggaacgcgcaggccaaattccacggtgaactgccgactgacgaacgcaagaagctccttttccaggccatcttctaccagcgcccactcaaggaccaaccggagctcatcggccattgcgaactcgagccggaggaacgccgcgccgccgcctacctcgtcacctctcagcgcttccggctgcttcagaccgtcaacaacctcacaattctgccgcccggcgaaccggaaaagaagctcacgcccgccgaccgcgccaaactgatcgaggctcttgaactccacggcgagcagaccttcccgcacattcgcaagctcctcggtctgaccaggaactacggcttcaacctggaacgcggcggcgagaaatccatcaagggcaaccgcaccaacgccgatttctacgccgtcttcggcgaccgctggtcccggatgtcgcccgaggagaggcagcgcgccatcctcgatgttcacagcattcaaaagcccgaaacactcgtgcgccgcgcccgcgaatattggaagcttgacgaagaggctgcccaacgcttctgcgacatctccctcgaacccgattacctgaacctttcacgccgggcgatggagaagttgctgccgttgcttgaggacggcatcacttacggcgaagcgcgtcggctactctatccggggcgttttcaggcagtcgagcccctgcccctcctcccacctgtccaggacgcgctcacagaaattcgcaacccagcggtcacgcggtgtctcacagagctgcgcaaggtcaccaatgcgatagtaaggcagtacggaaagcccgcagaaatccatatcgaactgacgcgcgacctgaagcagcccaagaagcgacggcaagatcgtgccgaccggatgcgggcaaacgagaaagcccgcaaggccgccgccaagcgcattgtggaggaagccggaatctcggacccttcacccgacgacatccgcaaggtgcttcttgccgatgagtgccgctgggagtgtccttacaccggcaagtccatctccatgcgcgccctggtgggtcacgagtcgcagtttcagatcgaacacaccattcccttcacccgctcgctcgacaactccttcctcaacctcacgctctgccatgtggaagagaataaggtcaaggccaacaaaacgccctacgaggcttacagcggcgatccggagcgctacgagcggatccttgagcgcgtgaaacggtttcaaggcgacaaagggattgtggctcagaaactgcagcggttcctgatgacgcccgaacaagtcgaggaattcctggcaggcttcaccgcccgccaactcaccgatacggcttacgcctcacggttggcggctgattacttgggcctgctctacgggggtgtggttgatcaggcgcacgcgcgccgcgtccaggccacttcggggcaagtgaccgcctacctccgcaacctgtggctgctgaacaccatcctcagggacggcgagaccacccacggcgggtacgcaaccaaaccccgcgacgaccaccgccatcatgctgtggatgccgtcgccattgccctgaccagcccggcaacagtcaagcagcttagtgacgccgcccagcgtgctccgctcgaacatcgccggcgctttgcggcgctgcaagcaccctggcctgacttcgtggactcggtccgccaggaaatcaaccgcctcatcgtctcccaccgcgtctcgaaaaaagtcagcggggcgctgcacgaggagaccatctactccgcccctgtagcggcgggcgggacctgtcccgatctaatcgggagcccgccaggtgccgccctgaagggcggcgctacggacgtccgccacgtccgtaagcccctggcctccctcaccaaaaccgaagtcgaggatatcgtcgaccccggcgtccggcggcgcgtgctcgaaaagctcgaagaggtgggcggcgacatcaagaaattcaccaaagaggagaatctgcctttcttactcgccaaggacggccggcgcatccccatcaagcgcgtgcgaatcaagaagaggctccccacgttcgaattgggctcagggcgcacgcttcggcacgtcacccccgagtccaatcaccacttggaggtcttcgccgaactcgacgagcaaggcaacgaggccgaatgggacggcgtggtcgtctccatggccgaagcctaccaccacaagaagctcggcctgcccgtcgtccaacgcgaccacggcccagcccgccagttcaagttctcgctagcccaaggggaagtcgtggagtgcgatcttgctccgggcgagcgccggctcttcatctttcggaaagtcagccagctcagctccgggtccatcacgatagggtttgccccgattactgacgcccgccaggccaaggaaatgcagacttcccgggcctggctatggagcacgcccggcaaacttcgagagcggcacgctcgcaaggtggtagtgagtccgctcggggaggtaagcgaagcccatgactgagcgtatccttgatatttctgatcggcctgcgtatctgagtgtgcggtatgcgctgctggtgattcgcttcgccgctcccccacccctggcccctccccaagcggggaggggagtcaacaactcagcttccagccctctccccgagggagagggtgatcccgcagagcgggaacgggtgagggccaacggcggcgaggacagcctgtcccgacctctcgggaccgccgctacagagagcgctggggagcacgacgctccttacgtccatcggggcaaacgccgggacgaaatcacaatgcctcttaccgacctcgccgccctgattgtttctcacccccaggtcacctatacgcacgccgtgctttcgggcctcgcggcggcgggcgccatcttcgtcgcctgcaacgaaaagcatctgcccgccgccatgctcttgcccctagtcagccactccacgcagaccgagagattcgccaagcaagccgcgcttcccctgcccacgcgcaagcgcctctggcagcaaatcgtccgggcgaagctgctggcccagggccggctgctggaggaacgcaccgggcgggactggggactccggctcatggccggacgcgttcgctccggcgatgcggggaatctcgagtcccaggccgcgcgcacctactggcaggccctcttctccgaaaacttccggcgcgatcccgagggcgagggcgtgaaccccttgttaaactacggttacgcggtggtccgggccattgtgactcgcgctttgtgcggtgcggggctgcatccctccttcggcgttcaccatcacaatcgctacgacgcgttttgcctggccgacgacttgatggagcccttccggcctctggtggaccgcgtggtggcccggctgggagatgagcgcggaagccaactcccgctcgataaggatgccaaacacgcgattctggaagcgctgctcgggcggttcaccgccggaaacgaatcaaggactctcttcgattgggccagccgcgccgcctgctcgctcgccgcggtcatcgagggccgggaggagaagttgaatcttcccgacctgacccctgacacctgtaacctgtaacctgttccctgtaacctggtttccgtgccgaaacacgaacttgcactctcggggtatcgcgccatgtggctattcgccatgtttgaccttcccgtggataagcccgaattgcgccgcgagtacgccaaattccgcaagcgcctcttgaaacaaggcttcaccatgctccagtactcggtctatgcccagtatgtaccgagcgatgaagccgacgaggcctatcgcaagaaggtctctgaaggcttgcccagtcacgggcaagtgcggctggtctcggtcaccgatcgccagttcgagaagatggaagtttacgtgggaaaaaagcggaagcccgtggaggaacctccactccaactcatgcttttctgactctgaaaggggagctaaccccccgtcccgcaaggcgggacggggggcatagtgtatctcagaagcggttcccggcaaaccatagcccaccgtcgaactggcgcaggattggtcaagtgtatctcagaagcggttcccggcaaaccatagctgtgtggcgggagaggacttcgaggagttagtgtatctcagaagcggttcccggcaaaccatagctcggcgatcgcggtggaaacgcgccgcgcgagtgtatctcagaagcggttcccggcaaaccatagcccaatagcccgctggcttgtccacgttaaagtgtatctcagaagcggttcccggcaaaccatagcggatatcttcgagcgtcccctggccgggagagtgtatctcagaagcggttcccggcaaaccatagcaccggctattaagtgccggtacggactcggaagtgtatctcagaagcggttcccggcaaaccatagcgaagcaggaagattaccgggaggaggaaggagtgtatctcagaagcggttcccggcaaaccatagccggcctcgagaatccctccgccgggagctccgggcgcaggccgccctaccgggcggcctgcgccccgtccgcccctacaatcgcgtctgcgggccgaaccttgacggggacagccgggccacggcgtgcagcaggggtcgcggcagcaggcggaggaagagcacaaccagtttgtaacgccagccggggacgacgagcaggcgcccgcgcgtcaagccgcgccgcgaggcttcgaccacctcctcggccgacatccacaaacttgccgggaccagcttccgatcgaatcccatgacgtcgtgaaactccgtcacggtgtagcccgggcaaagcgcttgcacccgcacgggcgaccgcgcggccttcagttccagataaagtccctcggtgaagaagttgatccacgccttgctggcgtaatagctggtattgccgggccgcgtgatgaacgccgcgaccgaggaaacattcaccacggctcccttgccgcgcgcggtcatctggcgcagcgccgcgtgggtcagccgcagcgtggccagcacgtgcaggcgatgcatcgccacctggctttcgagcgaagcctcatagaacagtcctgaggcgccaaagccggcgttgttcagcaggaactcgaggttgtccgcgcgagcgatccggtcttcgaccgccttcagttcagcatcctgcgtgaggtccgcaggcagcgcttccgcgcgcacgccatggcgggtgcgcagttcgttggccaaggcctccaggcggtctcggcgtcgcgccaccagcaccaagtcataaccgtccg

SEQ ID NO: 881 - DNA, 5230 bp, synthetic construct
  source 1..5230: mol_type = other DNA
  misc_feature 1..5230: note = Synthetic
agacgttccaggggaacgtgtctacgccagcttgacagtggcgccccgcctgggcacgcaactacgcactgatgacctacaaacccgcaggcaagaaccccggtgagctggaactcgcgccgccccgcgccggctcggaccagttcaagccggttccaggaggtcgcaagtgcgcgtcctgaccgttcttcgtggtcgcgtaagagagagagaaaagattcgggcggacttcgagggtaattccaggctttccgcgccgctggtatcgcgagagaagttcatgtcctggatggccagctcgaaatcctcgcgttcgagcttgagcaaggcttccgccagcgaggctgtgtactactctaaccaatggaaaatgcagggttagaaaatctgtctcacggttctcactgttctcactattctcattctgatgattagggggcgggccggtgcagtcccggcgtcgccgttcagagcctatatatcaaggctagctgacttgaccccacaagaatctctcgcccgccccttgggagctggacgggcgattcatgaatcgccgtgccctcacaccgcttttgctgcaatccggcaggaatccccctgaaaagcaaaagccccgccctgggcggggcttaaggtcgctattgctagcggagccttacgtagttgaacccacttactaagataagcgggaaccgctactgagatacactgccacggagtataatgctccccaaacaattgtcaaggggaaaatgtatggacacacagccctcccaggatttcgtcttagggattgacttgggttccaactccctcggctgggcgatgatcggcctccaagacggccagcccgccaagctcctgcgtgccggcgtgcgcgtcttcgaagccggcatggacggcgacatcgaatcgggccaggaagaatcccgcaacctcaagcgccgcgaagcacgcctgcatcgccgccaactctggcgtcgcgcccgccgtctgacgaaggttttcaagcttctccaaagctacggcttgctcccccctgtagcgccgcccttcagggcggcacctgctgacagtgcagatggcgggctaaagcccaccgctacgcccgaacagcgccaggactccctcaacgaactcgaccggcagattctcgcctcggtgtggttcgccgccaagaaagcctcggggggttaccctgagcccgagcaaacgctgccctacatcctgcgcgctgccgcattggacgaacaccttgaaccgcactgcctcggccgagccctttaccacctcgcccagcgccgcggcttcttgagcacgcgcaagaaggccaaggccgcaaaggaagaagaagagagcgtcgtcaagcaaggcatcagcgaactccgtcagaaaatggccgaggccggcgcccgcaccctcggcgagttctttgcgcgcatcccgccctcggaggaacgcattcgcgaccgctggacggcgcgcgcgatgtacgaagaggaattccagcaaatctggaacgcgcaggccaaattccaccccgaactgctgactgacgaacggaagaagctccttttccaggccatcttctaccagcgcccactcaaggaccaacccgagctcatcggccattgcgaacttgagccggaggaacgccgaacccctgcctacctcctcgtctcccagcacttccggctgcttcagaccgtgaacaacctcacaattctgccgcccggcgaaccggaaaaggagctcacgcccgccgaccgcgctaaactgatcgaagctcttgaactccacggcgaccagaccttcgcccagattcgaaagctccttgggcggcttccgagggcctacaccttcaacctggagcgcggtggcgagaaatccattaggggcaaccgaacgaacagtgatttctacgccgtcttcggcgagcgctggcacgagatgtcgcccgaggagaggcagcgcgccatcctcgacgttcgcagcatccagaagcccgagacgctcctgcgccgcgcccgcgaatattggaagcttgacgaagaggctgcccagggcttctgcgacatctccctcgaacccgattacctgaacctttcacgtcgggcgatcgagaagttgctgccgctgcttgaggacggcgccacgtatggcgaagcgcgtcggctactctatcctgagcgttttcaggcagtcgagcccctaccgctcgtcccacccgtccaggacgcgctcacagagattcgcaacccagcggtcacgcggtgtctcacagagctgcgcaaggtcaccaatgcgatagtaaggcagtacggaaagcccgcagaaatccatatcgaactgacgcgcgacctcaagcagcccaagaagcgacggcaagatcgtgccgaccggatgcgggcaaacgaaaaagcccgtaaggccgccgccaagcgcattgtggaagaagccggaatctcggacccttcacccgacgacatccgcaaagtgcttcttgccgatgagtgccgctgggagtgtccttacactggcaagtccatctccatgcgcggcctggtggggcgcgattcccagttccagatcgaacacatcatccccttcacccgctcgctcgacaactccttcctcaacctcacgctctgttacgtagaagagaacaaggtcaaggccaacaagacgccctacgaggcttacagcggcgatccggagggctacgagcggatccgtgagcgcgtgaaacggtttcaaggcgacaaagggattgtcgctcagaaactgcgccgcttccttatgacgccggaacaagtcgaggaattcctggcaggcttcaccgcccgccaactcaccgatacggcttacgcctcacggttggccgctgattacctgggcctgctttacggcggtgtggttgatcaggcgcacacccgccgcgtccaggccacttcggggcaagtgaccgcctacctccgcaacctgtggctcctgaacaccatcctcaaggacggcgaaaccacccacggtgggtacgcaaccaaaccccgcgaagatcatcgccatcacgccgtggacgccgtggccatcgccttgaccagcccggcaacagttaagcagcttagtgacgctgcccagcgcgcccccttcgagcgccgccgcttcgcctccctccaagcgccctggcccaacttcgtggattctgtccgccaggaaatcaaccgcatcgtcgtctcccaccgcgtctcgaagaagatcagcggggcgctgcacgaggagaccatctattccgcccctgtagcggcgggcttcagcccgccaggtgccgccctgaagggcggcgctacggacgtccgccacgtgcgcaagccgctcgcctcgctcactaagaccgaaatcgaggacatcgtcgaccccggcgtccgccaacgcgtgctcgaaaagctcgaagaggtgggcggcgacatcaagaaattcaccaaagaggagaatctgcctttcttactcgccaaggacggccgccgcattcccatcaaacgcgtccggctcaggaagaaaaccccaaccgtcacgttgggtgaaggccgccgcgctcgggaagtcacgcccggctcgaaccaccatatcgagatctttgctgaattcgacgagcacggcgaagaggtcgaatgggacggccaggtggtttcgatgttcgaagctcaccagcgcatgaaggcgggacagcccatcgtgcaaaaaaaccacggcccggaccacgtgtttaagttttcgctagctcaaggagaggtcgtggagtgcgacgacaagcagcagggacgctccttgttcgtattccgaaaggtgacacagttgacggccggcggaattcagatcgggttcgctcccctaaacgacgcaaggaaagctcgtgaaatgcaggtttcccgcgcttggctctggacgaccccgaacacgcttggggaacggcacgcccgtaaggttctcgtcagccccctgggggaggtttccgaagcccatgactgagcgcattcttgatatttctgatcggccggcgtatctgagtgtgcggaatgagctgctggtgattcgcttcccctctgtagcggcggttttagatcgccagccaaacggcggcgaggacgccgccgctacagagagcgctggggaacacgacgcgccgtacgtgcagcgcggcaagcgccaggacgaagtcaccatgcctctcacggatatcgccgcgctcatcgtctcgcatccccaggccacttacactcatgccgtgctgccgggcctagccgccgccggcgcgattttcgtcgcctgcaacgaaaagcatctgcccgccgccatgctcttgcccctggtcagccactccacgcagaccgagagattcgccaagcaagccgcgctttccttgcccacgcgcaaacgcctctggcaggaaatcgtccgggccaagctgcttgcccagggccggttgctggaggaacgcaccgggcgggactggggactccggctcatggccggacgtgttcgctccggcgatgcggggaattccgaatcccgggccgcgcgcgtttactggcaggccctcctctcaggaaacttccgccgcgatcccgagggcgaaggtctgaatgccccgttgaactacggttacgccgtggtccgtgccattgtgactcgcgctttgtgcggcgcagggctgcatccctccttcggcgttcaccaccacaaccgctacgacgccttttgcctggccgacgacctgatggaaccctaccgacctctggtggaccgcgtggtggcccggctgggagaggagcgcggaagccaactcccgctcgataaggacgccaaacacgcgattcttgaagcgctgctggggaggttcacggcggaaaacgaagcaagaactcttttcgattgggccagccgcgccgcctcctcgctggccgccgtgatcaagggaagaaataccaggctggaaatccccttggtctggccaaccgggggggatgaagaggacgggcggacgccctaaatcatcaatcggcaatcggcaattcccttcatgcctaaacacgaacttgcactctcggggtatcgcgccatgtggcttttcgccatgtttgaccttcccgtggataagcccgaattgcgccacgagtacgccaaatttcgcaagggcctcttgcggcaaggtttcaccatgctccagaac

SEQ ID NO: 882 - DNA, 3977 bp, synthetic construct
  source 1..3977: mol_type = other DNA
  misc_feature 1..3977: note = Synthetic
ttggagtgcggaagctctgcttccgctttgctgtttgggagctttgctcccggattctgggtgcgggggactcggccgtactttgcgcgccacaggcatcccaaccgcatacatcctggacaacaagacacatgcgccaaccgcgccagccagcgggtcccttgacgcctgccctgaatcccacaaccgcagacctaaaatgaaaggtctgcgccagccagcgcatccccggcaagccgggacacgcagatcgcgctttgcgccgtgtcgacatgaccagggagaagattgcggggaaaaatgaaaagccccgcactgggcggggcttaagggcgctattgctagcggagccttacgtagttgaacccacttactaagataagcgggaaccgctactgagatacaccgagaggtagtataattacccccaaaccattgtcaaggggaaaatatggacacgcaaccctcacccgactacgttctcggtattgatctcggctctaacagcctcggctgggcgatgatcggtctcgaagacggccagcccgccaagctcctccgcgccggcgtgcgcgtcttcgaagctggcatggaaggcaacatcgaatccggacaggaagagtcccggaacctcaagcggcgcgaagcgcgcctgcatcggcgtcaactctggcggcgtgcgcggcggctgcgcagagtctttaatctccttcagcgcttcgggttgctcccccccggtgagggctcgctgcccgaaaaacgccaggactttctgaatgaactggacaagaccattctctcttcaccttggttcgccgcgaagaaaatctccggcgtgtaccctgagcccgagcaaacgctgccttacatcctgcgctctgccgcattggacgaacgccttgaaccgcactttctcgggcgcgcggtctaccaccttgcccagcgccgcggcttcttgagcacgcgcaagaaggcaaagggcgccaagaaagaggatgaagagggcgtcgtcaagcaaggcatcagcgacctgcgtcgcaaaatggaggaggccaaggcccgcaccctcggcgagttctttgcgcgcatcccgccctcggaggaacgcatccgcggccgctggacggcgcgcgcgatgtacgaagaggaattccagcaaatctggaacgcgcaggccaaattccacggtgaactgccgactgacgaacggaagaagctccttttccaggccatcttctaccagcggccactcaaggaccagccggagctcatcggccattgcgaactcgagccgcaggaacgtcgcgccgccgcctacctcgtcacctctcagcgcttccggctgcttcagaccgtcaacaacctcacaattctgccgcccggcgaaccggaaaagaagctcacgcccgccgaccgcgccaaactgatcgaggctcttgaactccacggcgaccagaccttcccgcacattcgcaagctcctcggtctgaccaggaactacggcttcaacctggaacgcggcggcgagaaatccatcaagggcaaccgcaccaacgccgatttctacgccgtcttcggcgagcgctggtcccggatgtcgcccgaggagaggcagcgcgccatcctcgatgttcgcagcatccagaaacctgagacgctcctgcgccgcgcccgcgaatattggaagcttgacgaagaggctgcccaacgcttctgcgacatctccctcgaatccgattacctgaacctttcacgccgggcgatggagaagttgctgccgctgcttgaggacggcatcacttacggcgaagcgcgtcggcaactctatcctgagcgttttcaggcagtcgagcccctgcccctcctcccacccgtccaggacgcgctcacagagattcgcaaccccgcggtcacgcggtgtctcacagagctgcgcaaggtcaccaatgcgatagtaaggcagtacggaaagcccgcagaaatccatatcgagctgacgcgcgacctcaagcagcccaagaagcgacggcaagatcgtgccgaccggatgcgcgcaaacgaaaaagcccgcaaggccgctgccaagcgcattgtggaggaagccggaatctcggacccttcacccgacgacatccgcaaagtgcttcttgccgaggagtgccgctgggagtgtccttacaccggcaagtccatctccatgcgcgccgtggtgggtcacgagtcgcagtttcagatcgaacacatcattcccttcacccgctcgctcgacaactccttcctcaacctcacgctctgccacgtggaagagaacaaggtcaaggccaacaaaacgccctacgaggcttacagcggcgatccggagcgctacgagcggatccttgagcgcgtgaaacgatttcaaggcgacaaaggcgccatcgctcagaagctccggcgcttcacgatgactcccgaacaagtcgaggaattcctggcaggcttcaccgcccgccaactcaccgatacggcttacgcctcacggttggcggctgattacttgggcctgctctacgggggtgtggttgatcaggcgcacgcgcgccgcgtccaggccacttcggggcaagtgaccgcctacctccgcaacctgtggctgctgaacaccatcctcagggacggcgaaaccacccacggtgggtacgcaaccaaaccccgcgacgaccaccgccatcatgctgtggatgccgtcgccattgccttgaccgacgcgggcacggtcaagcaactcagcgacgccgcccagcgtgctccgctcgaacatcgccggcgctttgcagcgctgcaagccccctggccggatttcgtggactcggtccgccaggaaatcaaccgcatcatcgtctcccaccgcgtctcgaaaaaagtcagcggggcgctgcacgaggagaccatctattccgcccctgtagcggcgggcttcagcccgccaggtgccgccctgaagggcggcgctacggacgtccgccacgtccgtaagcccctggcctccctcaccaaaaccgaagtcgaggatatcgttgaccccggcgtccgtcagcgcgtgcaagacaagctggaagagctgggcggtgacatcaagaaattcgcgaagagcgagaacctgcctttcctgctcgccaaggacggccgccgcattcccatcaaacgcgtgcgaatcaagaagaagcttccgacgttcgaattgggctcagggcgcacgctccggcacgtcacccccgagtccaatcaccacttggaggtcttcgccgaactcgacgagcaaggaaacgaggtcgaatgggacggcgcggtcgtctccatggccgaagcctaccaccgccagaaacttggccttcccgtcgtccagcgcgaccacgggcccaagagagctttcaagttctcaattacacctggcgaaatgttgcaatgcgacggcccacacggaggccgacgtttgttggttgtacgtagcacgactcagctatctgccgggggcatcatcatcggtctggcaccggtcaacgacgctaggccaaagaaggagatgcaagcagacaagtcgtgggtgtggaagggccctgacaccttgcggaaactgaacgcccgcaaggtcgccgtcggcccgctgggggaggtaagcgaagcccatgattgaccgcgcctgtagcggcggtctatgaccgccgtttcgatttagtgtatctcagaagcggttcccggcaaaccatagcagacgttcaccaaagacctcaagacgcgcagtgtatctcagaagcggttcccggcaaaccatagccttacgcgcgcgcctaaagaaacttcttgagtgtatctcagaagcggttcccggcaaaccatagcaagaaagaggagcgtgacgcgcgcgctgcagtctatctcagaagcggttcccggcaaaccatagccctgttcgtctccgaggctatccggattaagtg

SEQ ID NO: 883 - DNA, 15806 bp, synthetic construct
  source 1..15806: mol_type = other DNA
  misc_feature 1..15806: note = Synthetic
aaatagatgaatttgtaaaagaaactcaaaaaaaatataataatataaaaattatatacaaaacaaaggcacaagatgtaactgctaaaaataaagctctagaagaagctagtggaaaatacattttaataatgaatggaaatatgaatctagaaaaaacagcattagaaaaaatgtataatgcagaagaaaaaaatgaaacggacattgcaatttgtggttataatattatagacttaaatacaaatcaaacaataaataaaggtttaaataataaatttaaagaagtagaagaattaaatggaaagaataattcttttgcatatttaaatttagatgcaggtaataaattaataaagaaagaaataataaaagacctaaaatttcaaaattatgatgaatgccaagatgaaatatttatattaagttgttatagtaatgtaaatacaatttcttttataaatgaagagctattttataaatatgaggataattcagcaaacaacttaaaaaatataattcaaataaaagacttaagaaatggcttaatagatgtaaaaaagagatttaaagaagttggaaaatacgaaaaaatgaaaaatgtgttaacatatatagcatttacaaaaataggaatgaggtcattaatagaaatagcattcgaccaaaaaaatgatttaaaagaaaatattagagaaacaatgaattacttagatataaatttctttgaatggagaaaaaatccattttttaaattaaaaaatgttccaagaaaaagcttttgggttgcacatactgtatataaatatggcttccaacaaatatttgtaaaaacatataaaagattaatagaaaaaggaaataagcctttagcgttttaatagctagattaataataagtgttacaatttagtgtagtaatattggtatactaaaagtaattatataaaaagcgtacaagtttttggtaaatccattaaaaaacttgtacttttttaatataaatgatatatttttaaagagtaaaactaatataggagacgaatatggaagaggagaatttaataaatccagaattaataaatgaggaagaaaatagattagaaaattcattaagacctaaaactcttgcagaatacataggtcaaacaaaagttaaagaaaatatgaaggtatatatagaggcagccaaaaaaagaggcgagccgctagaccatgtgcttttatatgggccgccagggcttggtaaaacaacattatctaatataatttctaatgaaatgaattccaatataaaaattacatctggtccagcaatagaaaagcctggagatttagcagcattacttacaaacttatctgagtttgatgtattatttatagatgagatccataggttaaataaaagtgtggaagaaattttatatccagcgttagaagattatactctagatataattataggtaagggaccaagtgctaggtctataagattagatttaccaaaatttactttaataggagcaacaactaaagcaggttctttaactactcctttacgtgataggtttggaattgtagaaagattagaattatatgagccagaagatttacaaaagattgtaaaaagatctgcaggaattttaagcgttgaaatagatgaaaaagcaagtattgaaattgcaaaaagatctagaggaacgccaagaattgcaaatagaattttaaaaagagtaagagactatgcagctgttttaggtgatggaacaatagatttaaatatggcaaaaatagctttaaataaattagaaatagatgatttagggcttgaccaaacagatagaaatatattacttacaataattcaaaaatatgcaggggggcccgttggaatagaaactttagcagcaacaacaggagaagaaattgaaacaatagaagatgtatacgaaccatttttaatgcaaataggttttatagctcgtacaccaagaggaagagttgcgcttccttctgcttttgagcatttgaacttaaagcaagctgaaaaataaaaatttataatgcaatagtagaaaaatgaaattttagattggagataaagtgaaagaggaaacgaaagaaaaactaataaatattgatgtttttggtatagcaatattattatttttagctacagttttaccaagaaatctagctaatttagacgaaatatggaattttaactttgcaagaaatattgcaaatggtttaattccatataaagactttaatatgttacaaacacctttattaccatttatacttcggtgggatttttaaattatttggacaagaattatttgttatgagaatagtatctgcagtattaggagctggaataatttttatatcatataaaattcttaaagagctaaagctaaatacaaaatggtcaattttatcggtagttttattattcttatttatagaagacaagttttatttagattataattatgtagtattatttataactttgtttcttattttcttagaagttaaatataaaagttatagcagaaaatataatttgctaataggaatattggcaggaactacaatattatttaaacaaagtacaggaataataatatgtgtagtaacagcattatatttaatattaaaagaaagaaacaaagacgtattaaaagctataatatgtagaacagttggaattacaattcctggaataatttttattatatatttgctgtgtacaaattccttaatggactttatagattattgcgttttaggaattggtacatttgctaataatgtaccatatataaaattactacaaggaaaagatttagatgctttcttaggagcagtagcaccaattacattattaatattacttattgcaattatagtaaatataaaaaataagaaaataaaagaaaaagataatagtttaatattatttgtgtttgctttagcacaatttacagttgtttatccaatagcagataaaattcactttaagatagcagtattaccaatacttttagtaattttatattatttgtttaaatcaattcaagagacaaaaaatataaaaatttctatttttatcgaacattttatgaatataataacaatatctttagtaggaatgcttgtactaagtggaattaatgacatatttatatatacacaaacagaaaaatcagtattaaagcattttagcaatattccaatatcaaatacattgcaagaaagaattttagaagtagataaatatatagaagacgaagaaagaaatgtatatattttagattcagaagcagcagtgtacatgataccattagacaaatacaataaagattttgatatgtttttaaaaggaaaccttggggcaaaaggtgaagaaggaaaaatagataaaataaaagaaatggaaaatacaattatcttaataaaaaatgaaaaaataccattaaattggcaaacacctaaagaagtaattgaatacgtgaaaaataatttagaaaaaataggtacaataaacttttttgatatatatatttcaaagtaagaatatgcaaatgaggagaaaaacaccaaatggaaaaaaatggaaaaaatggaaaaatacaagcgcttataaaaaatatcatattagtatttgcaactattacatttatagctgttttaattttaaactttatatataatgcaaatacagataaacttagtgcagttgaaattgagtatgtaaaaattactaacctgttaatcagtatttctattgctattgcaatatatataatttcacagtacgtaaataaaatcaaaatgaataaagttgcaaaaattatagtaatagttattttaattttggcatatgtaattgttcaaattagatggtcaaatacaacaattggaagaccatctggtgatcaacaaataatatataatatggccaaaagttatatagaaggaaataatgaaaaattatataagtcagaatatttagctaaatgtccacaacaacaaagtttgttagttatatatattttaataatgaaagtgataaatagcacagattatgtatggttatatttggctaatattttagcaaatgtattttctatatttgcactatacctaatattaaagaaattatcggaaaaatatagtgtcaacaaagcattattttttattttaacattaacttttataccaatgatattattatgtaattttatatatggcgacattattggattaacatttgttttgttttctgtatattttataatggaatatacgaaaaagaataaaaaaatatttggaataatttctgcaattttagcatccattgcaatgatgtttagaatgaattacattatatttgttatagctatggtaatatatcttgttttaaacttaaaaaaggaaaatatttttaagcaaataatgtctattgtaatatttatagccataatacttattccatataaattggttggagcatatgtaacagaaaaattagatttagacaaacaagcaacaatacctacaagtagttatttatatatggctctttatgatggagaaagaggtgctgggtggtatagccaagaagcaatgcaagtagcacaaacagatgtgaaaaatgcaaaaaattattattcgccaatactaaaagagagagtacaatatttagctacgcatcctttagaaggttttagattttataaaaataagattgtttccatgtggacagataatgcattccaatgtatattttataatttaccagttcatttagatggtatgcctaaagaattatatgatagcgcaataaacgaaaatgaattttatagtaattattttgtagaaaaaggatcagaacaaataaagatatatatgaagggaatagtacttttagtatttacattaagtttaataaatttattaaagtataaaaaagaattatctaatgaagcaattttaatgataacgatatttttaggaggatttttcttccatgtattatgggaagcaaaatcaagatatgtaattccctattttgtagttcttattccaattgcatgtataagtttgaataaagaaatattagatttttctattataaaaagaataaaaaatatttttagaaaaaaggagaaagtaaaatgaaattgttaatgcatacttgttgtgcaccttgtagtgtatattgcatagattcgctaagaaaagaaggtatagagccaacagtatattggtataacccaaatatacacccatatatagagtacaagacaagaagagacacattaaaagaatatactaaaaatataaacgttgaagctatttttgaagaggaatatggactagatgaattttgcaaaaatgtaataggtgatcttaaaaatagatgtcaaaattattgttatagggtaagattagagcaaactgcaaagtttgcaaaagaacatggctttgacacaatttctacaactcttttggtaagcccttaccaaaaacatgagattttaaaagaacaaggtgaagaaattgctaaaaaatacggattaaattttttatatagggattttagagtgggatttagagaaggtcaaaataaagcaagagaattaggtttgtatatgcaaaaatactgtgggtgtgtgttttctgaggaaatgtcgagtcttgcacgacaaaaaaaggataaagagataatggatagaactaatagagatacagaacgaagaataagattatcagattgtatatcaaatctcgattttagaccactaaaaagagaaaataaggaagaaatagactttatatataatattaaaaaagaagattataataaatatgtagaagaaaataaaactgagatgagcgaagaaatacagacaaaattatttgaaagatatataaaaggaaatgcaaaaaatataaaaataattacagtaaaaggagaaaaaataggattttttgatggaaagattttagaagataatacttttagaattgataatatatttataataaaagaatatcaaaataaaggaattgatgaagcaatttccagagagttattatttgaaaataaaatataaagtataagtatcaaaaaaatgtactaggaggaaatagtaatgacttatccaattgaaaaagaaattgaaataaataaaaaaataattaaattaaccttttattctggattaacaattcttataggaccaaatgggtcagggaaaacgagagtattaaaaaagttaaaaaaatgcagttttgatgatatagatatttctcaaataagatatttatcttcaaatcgtattggagatttggaacaatatagatctaagacaaatcaatataattatgaaaatagtgattataatcttggagataaagaaactgaaagagctaaacatcaaatagaaattgctaaaggtgatttctttgttatggctgatagaaaagatgtatttataaaagtttcagaaagattatcagtattatttaatagaaagatgtttatcagatgggatagtggacagttaaaagttttctttagtaagaaagattctaatgaagaatattcaattacattagaagctagtggtttattaaatcttgtttctatattagctgctttatatgatgacgaaataaaagtattactaatagatgagccagaagtatctttacatccacaattacaaagatttgtgctaaatgaaataaaaaaagttactggagattataatgaacaaggaaaaaagttaattgtaatgtcgacacattctactgaaatgattgctattaataaagttaatgatttacctaattttgttttctttttagatgatggaagtgcaccaaagcaaatagaaccatcagatgatgttttaaaaaataaaaagttaaaagaattaattattagaatgagtcaatcctataaatcagcttttttttcaaaaagaccattattggttgaaggaagtagtgatttgatattatgtaattattttgacaataaatacgaattaaatctaggagtagcaggaactcaaattgtaccagtagaaggaaaaggacaattccctgtaacagttaaatttatggagctgataggaaagaaaccaataatattaacagatttggattcttttgtagatgataatgaagttattaatttatttgtaaatagtgatatagcaaagcaatgtgcaatagaaaaaggacatagagatttacaacaatttgtaagagatttaaagagtgatttatatcaattatgtagaaaaaatgaagaaagcttaaaaaatatatatgaaaatcatccttattggaaagataacgaacaaactgataatgaaaaaaaactaagaagatctttgacagcgatgttattttataatgatgatgcgaaaatattacaatgggaaaatggtaaagattgggtaaatataaagaaaagactaatggttttatttgaaattttagaacaatgtggatgctttattttaagaaaaggagctttggaatcttactatatgcatacaaaagattatatatttgatggaaagccaagttctgcaatagaagaaatagaatttttagataataaaaacgatgaaactattgaagaaaattatgacataattttaagatgtttaaattattcttctaatacacaaaaaattgatgaaactagacctataaaaacagaacttcttgcagagatagcacctatattaggacaatattgtcaagatatgatggaaaaagatataagtagtataattaagcaggtaagaggaagtgaaaaatctatatttatctataataatgaatatccgaatatagaagtgaatattgaatcaaaaatactaaaggttaaaggttttccgataaagtttaaaaaaggtgataatgtaaatgagatagtagaacaaaaaataaaaaatgatatttaatatataagtagaatttttaaatagagaggaggagttttatggacaatgaaattatgaatcaagataacaataaaatattaatatatacttccgatgatgggcaagttaaaatagaagtaagacttgaagacgaaaatgtttggcttacacaaaatactatggcagaattatttgatacaacaaagcaaaatataagtttacatataaaaaatatttttgcagaaaacgaactgaatgaaaattcagttgtcaaggaaaacttgacaactgcttcagatggtaaaaattacaaaacaaaattttacaatttagatttaattatatcagttggatatcgtgtgaagtcaattcgtggtactcaatttagaatatgggcaaataaattgataaaggagtatttaataaaaggatataatttgaatgtagatagattcaaaaataatggtggaggagtatattttgaggaagtattagaaaaaattagagatattcgttcatcagaaaaagtattttggaggaaaattttagatatttatgctacaagtattgattatgatgcaaaagatgaaaaaacaaaagaattttttaaaacagttcaaaacaagatgcactatgcagtacatggaaatactgcagcagaagtaatttttaatagagtagatagtgaaaaagagaatataggattaactaattttaaaggaaatatgcctacaaaatttgaaacagaaatagctaagaattatttatcagaaaaagagatggacatgttgaatagaatggtgtcagcgtacttagatgtcgcagaaattaatgcactgaatatgcatccgatgacaatgaaagattggataaaagaattagatggatttttaactatgacacataaagaaatattggaaggtgtagggaaaatatctcatgaaaaagcattgaaaaaagcacatgaagaatatgataaatatatgaaatctcatttaactcaagcagaaaaagattacttagaaatcatgggagaagatataaaaaaactgaaatagaaagcacagaaaaaattatatatagatttagaaagaaaataatcaaatataagggttatttcgcaaatttggtgtgcagagctggatatgttattaagaagtgctaatttatattcaaaagattttgtaactggaaaagaaggtttaactttagcagcaatactattatttggcaaagatacaacaattttatctgtattaccacatcataagacagatgctatttatagagtgaaagatttagatagatacgatgatagagatgatataagaactaatttaatagaaagttttgatagaatgatggcttttgttgaaaagcatttagatgataaattctttattgagaataatcaaagaattgatgtaagaaataaaattgcaagagaattgtgtgttaataacttaatacatcgagagttttctaatccatatcctgcaaagttaattattgaaaaagaaaatcttagaaccgaaaatgcgaatagagcaaaaatgataggaaaaataaatgttgacttttatgagccatatccaaaaaatcctaaaatagcaaaaatatttaaagaaattggacttgctgatgaattaggttctggtgttagaaatatggtaaaatacactaaaatatattctggtggaatacctgaatttaaagaagacgatatttttaagacaaatgtacctttaatcgtcaaagataataatgtcggtataaatgtcggtttaaatgaaatacaaaaagagattttaagattaatagcaaaaaataaaaatattacgcaaaaagaaatgtcagaagaacttaatataacgaagagaactatagaaagaaatataatgattttaaaggaaacgaatttagttgaaagaattggttcaagaaaatcgggatattggaagataaactagaaagaataaatttgtaggaataatgctttattgtaaaggagaaaaaatatggaaaaaaattatgacttatcttttggaatagatttaggaattgcatcagttggatggtctgtttttaatttgaaagaaaatagaatattagataaaggagtatatttgttttcagaagccgaaaaagctgaagatagaagaggctatagaagtgttagaagaagaaaaaagagaaaattacatcgaatagagagaataaatatattatttaattcaaaaggtatatcagaaaataatacctatgatagccagttattagaaaaaagattgttgggagtaaaagaaaaaataactatgcaagatattgttaatataataatgtattttgcaaggcatagaggatatattccatttaaagatgaagatgaaagaaaaagtgagattgtagatgaactaagaaaacaaggattacttgcttgtcaaattcaagaaaaaatatttgaggataataccaaatatcgtggcgatgaatatttaattcaacattctgattatgtaaaagaattaaaaacaatgttatatgaacaaaagaaatattataaagagatagacgaagaatttataaatggtattatagagataataaattctaagaggaaattttgggaaggacctggtggcccaagagaaaatcaattaaacaaatatggtagatatagaaatttagaagatatagaaagatacaataaagataagaattataataaatatctatttgaaaatttaattggtaattgtaatatttatgctaatgagaaaaaagcatcagcttggaatttttatgctgaaagttttaattttttcaatgatatgacaaacttaaagataaacatacaagatttagatgaaactaatagaatgtattttgaaaaagtagataaagaaacatataaattaaaaaatacagctatcacaacattaaaagataatgtattaaatagtagttctgtaagttatcctaaattatttaaaaaactatttttggtggatttttctcaaatatatggttataaaaaagataaaaatggcaatccagaacttgctaaatttgaacaaattagaagactgaaaaatagattagaagatacgaaattgatagaagaattactttgcaatatggacgcttacaacaaagcaatttatttgattcaagtatctccagataaacaaacaagatatgaaattttgaaagacaatttagaagaattctatagtgatagattaattgaactgttatctagttgtagtttggaaaatcgctatcatagtttttcagaaaaggcattaagaaaatatttagagttgatggaagaacataatcaaaattcttcatatattgaaagaaacttttctgatgaaataaatcctactagagaagagaaattaataaatagttatataggtgaaaatattgaaaaaggaaatttaaaatatattaattcaaaaggaattgaagatataatagcttctcctgctacaaagaaaagcttaagaaaagcaattagtataataaataaattattttcaaaatatggctatccaggatatatttgtattgaaaatacgagagaattattatctatagataagcaaaaagaatatgaaaataaaacattagataacaataggaaaagagaaacagcaaaaaagaaactagaagaagcaggatatgaagcgtcagatataaatatagataaatatttattattaaatgaaactaatcataaatgtgcatattgcaataaagatattacagtttctaattgtgaaattgaacatatattaccaagaagtaaaactgccaatgatacattcttaaataaaacggtttcttgtacacaatgtaatagtttaaaaaataatagaacaccgtatgaatttttaacttctcaaaatatgtatgaagactttaaaaatcgtgttcaaaagaattctaaatttgatgataaaaagaaagataatttactatttgaaggaaatattgataaatacgaaaaaagttttaaaaatagaaatttaaatgatacagcttatgcaactaatgaattagctaatcaaattgaattatttaagaaagcttatataaggcataattatggagagattttagacacaaaagtattaaaaataccaggacaatttacaggaattataagaagaaaagctaaattagataaaaatagagatttaaaatatcatcatgctgttgatgcaagtattattgcaagtatgccatatttaagagtttcaaaactaatagatatggttcaaaatgaaccaaataaatattggcaaatcaacaatttaagtgaatatagagataatctatatgatgaattgtatttaaataaaacgttaaaagaagctctacaaaaagctgactattctaatactagatttgctcaagaaatacaaaaaaagaagaatggacaattgtttgatgctaatatttcaaaagtagtaatgaaaaataatgaatactataaagttgagcagatagataatatttatgatttagactataaagatattgaaaaatactttacaaattcaaaaactaaaaaatattttttatgccaagataacgattcaaaattatataagaaaatatatgatattattgaaatgtatcaagggcaaaaagtaaatccatttgtagaatactgcaaagaaaataatatgtgtgaaaatgaaaaatttgactatagaaaatatggcattaggaaaaatgacaattcaccagtagttgctaaactacgatttttaactaaagttaatacaccatacataatgaaaaatgataaattaattatcagccaaaaacaaaataaaaaagctcctatggttatgtttgatagtttaaaacaatattgtactagaatttatagagataaagaaagtggaaaacttttatttatgcctatattaagaatttttgttgataataattcgggagaaataagaacagattcggattattataaggtattatttgatacatatgtcggaaaagaagaacaagatgtagagaaatatatggatttgtttaataatgaatatgttagattttataaaaatggggaagctttaggggaaggattagtatcatgctttcataaaactctcaataaaatcataataaaaaattgcaatgtgagtattacgcctaaaattgatataatagaaaaaataaaatctgatatattaggtctttacaatttaaatatttaatgatatattattattgtaattcgaattacagttttacattaataaggatttacagtttctttattataaaagagaatactgtactaaaagaagtctttaacggggcttctttctttttttatagaaatgtcatggcgaatagtatatgtaactaatgctgacaaattaagtttaaatcttaattcaatacaagtaatacatgaagaggaaaaattctttgttaatttaaatgatattgcaatgttagtacttgaagattataagtcaataataacagtaagattacttatagagctagcaagacaaggaattcctgtactcgttttaaatacaaatagtatgccaattggtgagtattttccaattgcagataatgttagaacatctaaaagaatttcggaacagattttatggagtgatgaaataaaagaaaaattatggacaagtattataaaaggaaaaatagaaaatcaaattattacattgaaacgattaaatttattagataagatttcaattttggaagaatatatttctaaaataaaacctggagataagagtaatgttgaaggagtttgcgcaagagtatattttaaagaattatttggaagtgaatttattagatttaatgaaactattgaaaactattgcttaaatttttcatatcatataattagaacaattataagtaaagaaattgttgctagaggatatattccttctttaggtataaatcacaaaagtcaatataatgtatttaattttgctgatgatataattgaagtttttagaccaatagtagattactatgtttatatgattttatcagaaattttaaaaagtgaagtgtttgagctaacaaaagagataaaggttaaattaattgatatagctaatcaaaaaatattttataaaaacaaagaatatagtattttaaatgtagtaacaatatttataaatgatataataaattttattaatgttaatggtaaatcatatttagaaattccaagattaattaaaaatgaatgaatcattatataaacaagtgagagtattagttttatatgatttaccaatggtagatattgaagatagaaaagaatatactaaatttagaaaaaatattttaaaattaggatgttatttagttcaattttcagtatatgctaaagtaataaaaaacgaaatttattataaatcatttatacaaaagctaaaaggtattttaccggaaagaggagaagtaagagttatcaaattgacggaaaaacaatatcaagacatgctatttttaaatggatctaagaataattttgagaagaaaatttctaataataatttggtggtgttctgatgttttatttaaaatatagaaacgagaatttttttattgtaaaaaataataaattaattattacttcttatgaaaaatactatgaatttttgaaagaaatacttgtaattaatgaaagtaaagatacaaaaatagaatttaatggcgcaaagttaaattcaaagaatacattaataattgacttgtcttcaatatcttcggcaactaaaatattcaattcagaaaataggttaataaatgaatacataaaaactagcttggacaattatagtatggattatgaaaaagaaaataccataaattttactataaatgagattataaaaaaattatataaagagctacagttagaaaatgttgaaatagatattttaaaattgattaaatcacatacaagttttgctataaataataatgatgatttttttgttgttctaaatgaagttgttaaaagtgaagatctaaaaaacatttttattatatataaaaaaggtattttagattttttaaaattaaatgaacttgaatatattaaaaatgataagatcatattgtttgagatatgcgatagtaattctaaatttaaagatggtgataatattttattttttgataaggatatatatcaaattacatataataacttagttgatttgatattatccaaaagtaaaatacaagatttagatagagaattatttgagtttttattaaacaatatatttttttattctataaataagaaagaagttgatattatgagaaaacatttaaaagaaattataaatatcaatgatgtattgaataaagaatttaaaattaatttgatggatacattagattacatatagattgactttttaaagaaattaaattagaatggttataagttttaaagtactgtaaatccttattaatgtaaaacttttcatccataatataatcatttaactctgttttaaagtactgtaaatccttattaatgtaaaacaatcaaagttttgtgcaatgtggtaaaaaggttttaaagtactgtaaatccttattaatgtaaaacatatagcaataaaaagaagaaggaatattagttttaaagtactgtaaatccttattaatgtaaaacctaaatctggtattaatggctctggcaattgttttaaagtactgtaaatccttattaatgtaaaacagaaatctgtttgtgtaatgaatttc

SEQ ID NO: 884 - DNA, 7608 bp, synthetic construct
  source 1..7608: mol_type = other DNA
  misc_feature 1..7608: note = Synthetic
gaggttgccttcaaacttgtcgtgatcaccaaacgcgggacttttgttttcatgatatcaatttcccttcaccaaaacattttcgagagagcaacgcttctaggttcgtagtcctatgagccttggcgtacgggggcttgaggcactaaaagctgtaaggcactgtacgttggcctgcgtgtttagcgaaacaatttctccgcatcttgatattaagcggcaatgaatgctttcgtgtctgtatgcatcagaaatgagcctgacatccatcaggaatgagcctgacaacaatgacacaatattaaggtacttgcttaagtcgatttgcatcaacaacgagtggaagtccagacgactaaaggcgcatagcgctgacaaataaatagccatggctgacgaacggagtgatgaggccgtggtcccggcggattcctcctccaagccgcatcgcggcgacacccaaccggaagaaaagggcataagagtatgataaacgacatcgagtaattttgcgcactcgttttagtgaattctgggcacagcaggatgcaagcaggatccaaactgggcggggctgaatcctgcgcctcggctcgtgttctcttccaatttagcgcctccccctcgttgcctcttttgcaccatgttgatcgaacggattgacgcctaaacccgtggtaccaataaaatgtaccatgaccttccaaggtcgtgttcgtgccatggccttataggccgtggtgtggtaaggatattcctccgctatgaattctaggctgtaaatcacgactccgtgtcgtaggttatgcaaacgcactcaaacgaaaacacgggtcgtgagaatagttgagactattagatcggatcgtatgggccaaagtgaggaattcgcagccgaatctgctaagtccgacagactcctagcccaaaactattcccagcggccaggtctccgaccacaccgcctacttcgacgatgtcatggccaccctctgcgacgtcgccggtgtccactgccccgaaggccgcgactccatctccctcctccccaccctgctcagcaaaaaatagcaggccgtcccgccctacctctactgggagtcctacgaaaaaggcggcaagcaagccctccgctccggcaaatggaaagcggtaaaagaaccttggatcggcggcgacatccaactctataacatcgaggaagacatcggcgaagcacgcaacatcgcgggcgaaaacccagtggtggtcgagcaagccgcagcctatctaaaagaagcgcacgtcccgagtaaaaactagaccccgccaaaaccaagaaaacccaagaccccgaaaaagaaacctgctggcgtctaaacgcaagaaatcaagcgtggccaaattcggcttaacatcttgaacatatccatctaagactcctaataaaggagggttagaaatgcccaaaaaaagtactgtattcgcgtgggatctggggaaagcatcactcggcgaggctgtaagacaaggtgatcacattgtcgcggtcgagtcgttcaaaataccagaggatcacgcatcactagcggacgaacggacccgccgccgcgcctaccgcacccgcaaagctcacaaggcccgcgaagactaccttcaacaggtattccaagaagcgggactggaaaccctcaccggcaggcgcgggaaagaactcggagacccgcgcctagaacgcgaatttcccgcccaaggagaagacacctgttacacctcctccctcttacgcatcaaactcattgaaggcgaagccctcgcccaatggcaggtctataaagcgctccactcggccatccagcgacgcggctatgacagtgatgttccttgggctacaaatgcagaccgcgacccagacaaaacaggcgacgacaaggatgaagcggaaaatgccgccaatgccgctcgcttccgagcgtcctgccttgagatgtctgatgatgctgactaccaccttccctgctttgtcgacgcctggcacatgggcctctggaccgaacaagatggcatcaccagcctccgcatcgaccaccatgcgcaacgcgcacgtggctatgtcgcaacccgcgaagcggtcgaaacggaagtgcgcctgctcttcaccgcagcccaaacccaataccctgaactgggcatctctgtagatgcctttctctatggcccaaccgaactcgcctacgcttccatgaatccggatctctgcaaaaaacatgggatccgcgaaggagccgccaccgattggcgcggcgtactctcgcaaaaagtaccgcgctttgacaaccgcatgccaaaccgctgttgctgcattccgcgctatcatgtctgccgagccaccgacattttgcatgcccaagttcacttcctactcggactcatcaacctccgctacatgggtggaaacgagaccttcagcctcactcccgcagaggtcaacgaatgcttccaaaccgctcggaagaatgcgtctaaaaaggacaaagataaaaaggctgaccaatataaaatcaccaagacagcctggaacaagtggctggctaagaatgaccgcgtcgcagtggtcaacaacaacgagatcccaaaaccaaaaacaggcggacgctcccgctacagccgtcccgcgctccgcatcatgcgtgatctcatcctcagcggtgattcacctcatgccttccgtagcgccctcttagccgaaaccgacaaccaagatccgctcaaaggcctcgtccccagcgacctcgatttcctcgcgaagatgccggatgactgggaacgcatccacatcccttcagcaaccttacctaagtccaacgaggaacaagaagcagccattgctaaactcatcggcagccaaggggatcctattgtctgccatcgccttggcgtcctccaccaacgcctcaaaaaactcaccgcgacctacggagaacccgatctcgttgccctcgaatttgtccgagaagacttcatgggcgaaaaggcaaaaaaacgcctcatggacttccaaaagaaacgcaccaaagcccgtatcgcagcccgcgaggaagccaaaaccatcagcgaccgaggcagcgctcccctcaaacttcagctcctcaaagagcagggcggccgatgcatttacactggggaccacctctgcctcgagcaaatcgacgcctacgaaatcgaacacatcgtcccacgcggctccaaatacaatggctcagacgccatgtacaacaaggtactcaccacccatgaggccaaccaagccaaagcccaacaaaccccgtttgaatggctggcaggaaccccggaatggagcgcctacctcggacgcgtcgatagcatgcgcgcccgtagctccaaaaagaaaatcaacctcttagtgagcgaagacgctcctgacatggaccgacgttataccggcctcgccgaaaccgcttggatcgccaaactctcgcagcaactcgtatcgctcttttacggatggcccaccggtgaaaaaggctctgaacgccgcgttgccatcgtctcgggtggtctcgtcggcaaagtccgccgccaacacggcatcaacaaaatcctctatcccgagatcgaagatttggaaaagctggataagaaaaaccgcgaagatgaccgccaccacggcctcgacgccatggtgatttcctacatcccaacttgggctagagacccaaagaaggaacgctacttcagcttccccgatggaatcgacgcgccctatttcaaagccaagattgatacctgcatcccaaccaacttggtctactccaagattggactcgaagaaacggtgtatgcaaaacgactcctccctgctggcgaaagcgcagtcttgcgtcgcgaccttgcaaccatgggcggcgatgtaaaaacctggaccgtaaaaaaagcaaaaaaaactgcagcaaccgtggtagaacccatgatccgtgaagcgatactcacctttctggaaacctctccgagccaagctgaatgggtcgccttcgcgagcgaactacggtccaatagccacgatcacaatggcccgctcatcaaaaaagttgccacccgtaccggcacgctcagcgagtacgcagatctttctaaagatgaaacaggtcagtatcgccgaaccgacaagaatactggagtggttttttacaaagacaaggaagaggaattccaaaggcatcagattctcggacatgagtcgctttttgaagcgcaagcagaggtggcattaatctcatctgagattatcggcttttttgaagcggcttgcctagttgaacttggaagtgacatttctcgaaagggcagcgaagatatttcagcaggccgctatcggtggaaatcctataaacacaaccgttcagttattctcgagcgtccaggggaaaaagagatcagtgtatcgtggaaatctgtctgcgaggccggaattaaacgcctggatgcataaattatgcagcatatcctgcacgtcttcaaacacggaatgcgattgggcaaagaacgcggcatgctcgttggcgaactcaagaacgaacgagacaagcgcatgccgattgccgatcttcgtgccgtggtgatcgcagcccgaggcgttacctttagttcagaattgattgccgccttggcccacaaccactgcatcgtgctccacgctggccccgactaccagccggtggccgtcaccgcaggcttggcgcggattgtccatgcacaggccgcgataaaccaaggcaaacttacctcccaggaacaggcccgctactggcggccgattctccgacaaaaaatacagaaccaagttgcgcacagccacgctcttagccttccctgccctatcgctgaatacgaagcaaggcagcgtaaacccaatgaggcccgtgcagcaaaggcctactggaaaaacttcttcaacgcagttaacgagcccataggccgtgaccaagccggcaacacgcctgcaaacgctatgctaaactatggttacgccatcttggccgccctctgccatcgggccatcatcgtgcatgggctcaacccactctacggcctgcaccatgtcttgcgcgctcgtgctcacgccctcgtctacgatgtgatcgaacccctgcgcccctttttggatgcggttctcgttgcctaccttcgcaaaaaaggagatcgtgatatgcagggctgggccaagttcgcagcaagacggcttggcgaggccacgctagagcacccgaatgggaagataaaatttctcgatggcattgatgtctacgtaaaatccttggcagacgccatcggtaacaaggaggttaaacaattatgggtacccgaattcccccacagaatggattcacaatgggctggttaatggtgatgtttgacttgccggtcatgaccaaacgacagcggaaaaccgcaacgggtttccggctagctcttttggaccaaggctacattatggtgcaatattcagtttatgcacgatcctgcaccagctgggacgcaagagaagcggcaaataaacgcttggaggctgtgattcctgaaggcggaaatgttcgcgccatcttcatcaccgataaacaatggcagaaagctactaccttgattggcgagtgctacatgcataaacgctggaatccgaatccaaaaattccagagcaaatggagttttggtaaaaataactgatggctccgggtaacctctcagagaggatagtgccggaacatcagcttagtcagttaagacttcccacctaaacgtcacacaaaacaggacttatgacaagcctgttctaacgggtcggaaatttttgggaagtcaaaacacacccagtagcttctccgacgcgcccttgttctaacgggtcggaaatttttgggaagtcaaaacttaagatgacccacgaagaaaacgaaaaatgttctaacgggtcggaaatttttgggaagtcaaaaccagtccttgcccttctcccagtactggaggttctaacgggtcggaaatttttgggaagtcaaaacactacacgtccaaggcaacagctttgaatggttctaacgggtcggaaatttttgggaagtcaaaactggtttatcagtgggtccataattagcaccgttctaacgggtcggaaatttttgggaagtcaaaacttgcggtaagtgacccctacgcgaatagttgttctaacgggtcggaaatttttgggaagtcaaaacgccttcatctgacgcttctgcttcgctgcggttctaacgggtcggaaatttttgggaagtcaaaacatggcgtatggattcagcatggcgattttggttctaacgggtcggaaatttttgggaagtcaaaactgcatatctcctatattaaaagagtgggtagttctaacgggtcggaaatttttgggaagtcaaaacttccaactcgcgcttgtgtgtcgcgctgtgttctaacgggtcggaaatttttgggaagtcaaaactggaggttatagatgaacctcttgcgcttggttctaacgggtcggaaatttttgggaagtcaaaactttgcgcttaggcttggcctcatgagcttctgttctaacgggtcggaaatttttgggaagtcaaaaccaaaccttatagagtaaccggtcgcctttagttctaacgggtcggaaatttttgggaagtcaaaactagagcgggccttggtgcggttcgtcgtcggttctaacgggtcggaaattattggggagtcaaaactcataggtcgctgggtcccattctcgggttgttctaacgggtcggaaatttttgggaagtcaaaaccacgagaatattcaatctttcaggatgcatgttctaacgggtcggaaatttttgggaagtcaaaacgaatccagtcgagcgaatgtaattcgccaggttctacgagccttggcgagttggcgctgacgaagggcagccatgtgctgaccctgcaggccacggatatagcgggaaactcggtaatggacttccgcctcttgatgctcgcgcgaaagtaagctgccgtgatcttcgccattgagtggcagaggccaaatgaaaggctgccattgagtggcagaggcgtggcaaaataaagtggcagaggcgcccccctctgtgcggaagtttggcgtatccctggacaggttgcttcaaacgagatctccctcactgtcggcggttggaaaccgccgctccttggccttcggcgcatcgctgttcttttagaacacctcacaacgaactcgtaccatgccctttcgcgggcgtgtttgtactatcgccttccaaggcggtggcggaggcggcggaggtggctggtagggtattgactgtaagggaggtgcctacgcaccttcggagcttggtgttaatgagcgccgtcatccccgaggcaagcctcggggctaagtgcctccgctccttcggagctactcgctggacaataaaatgaatacttcagatcctaatgcgtatacccagaagactttaacgaaccaacgcgagcgtcatgcgttcaaaccgcgaagcggtgcaggcacttcggagctactcgct

SEQ ID NO: 885 - DNA, 14790 bp, synthetic construct
  misc_feature 1..14790: note = Synthetic
  source 1..14790: mol_type = other DNA
agataaatttcagaccaaacaaaaaagggtagaaaaaatgcattggctgattatcagaatgagtagtaagcaaaattatactttagctaaggcattggaaaactacaaagggagcgatgacgcaaagctgaatcttctgaattattttgataaagcaggtatttcaccgatacctatccaaagatatgatattccatttatgcagtctattgactcaatacttgaatttgatgaaccaaatgaagcagacagaaaatattccaattacctaaaacagaaaacaaggagtaaagaggtgttttttcatgaacctgtcagatgaattacttacagtaaatgagacctgcaagctgctgaaaataagcagaccgactctgataaggctgcttaaaagcggtgagataaagggattcaagatagggaaaagagtatggaagatccctagatactacttatcggaatacataaaaaacggtggtggaaaatgatatcacaccattgtgtgcagatcagctgaccctctcggagcttgatctgcacacgatcggagttcttgcactctgctcttctgtttcattttttctctttctgctcataattaaaacctccaaagtagtgtatcttctattatacactactttggaggtttacacaaattttaggatagactcaagtctgtgaaacgagtaagtcaaaataaagaactcttgaaaaaaattattccacactgttaaaactgttgataattcagtagtttattgaatatatttcgcgatttttttagactttgtgttcaattactgagtaaagattataaaatatttcattgttttgcgaagctaaaagactaattacgttttcgggattattctgttcttttattcgtaaaactgtttaacatgtttaacttttcgtaaaattgataagcactgttttctgaatatgtttgtttggtcgggtttaggatgaggaaacttttatttgcgagaatgaaaatttgaaaattacaatttcgattgcatgcaagtttgaatagatagtcaaggcacgcatgttttattcaatgaagtttgaactaagattttacaaattacttgacattggaaattatccgtgatataatatagctgatggatgagatgaaaaatgcgtttgcatttttcaaaatctgctgttattacaaaataggagttggtaaaaatggttttttaactcctaccactgatttgcgttctccatattagatttatgtataatccgtggtagtagtaaaatatggtatatcactataagtatttgtagtcagtaaaacacaggtacaaactctgtgttaaaactaaggaggacttaatatgtcaataaagttcaaaggtaactcaggtttcatcaagttgattgcttcgttttcggcagctgttttgctttccacgggagtggttactccgtctgcgtcggatggaatcattaagaatctctgcgttcccactacaataacagcatcggctgcttcgaatctttatgtacccaatcttaatgggtctaatagaatagtatggaaggctacatcgtgggtacctgtatatgcctattccaatctgagtgcaagaggtaacttttcaaatttaaatggcagtggagtaaagacctacagcacggcttgcattgatgcaggagacgactgttatatataccgtatgggcaatagtgtatctactgttttttatcctgccgggaatacatacaaatacgcatacgtccggacaagcgatattacaagaggaaatcgtaacgaaaccagaaatgcatttaaggctgctgcaggtgtaaatacatttacttacaattctaatggtggaaccttcaatatagggtcgatcgataaaaacgatacttgctatctcctgaataaagttaataatgcctatcagctgatataccccatttccggaggaaattacaagataggttgggtaagtgcaagtgactatgcaaggttgaccaattcgggcggtggaagtatttcaaatgctcgtcagaacgtagtgaatactgcacttcgtgaagttggagttgcagaaactggaaataacaatgttaaatataatacttggtattatggacgaactattaacgcaacaggatatgcttggtgtgatgcctttgttagctgggtagctaatcgttcaggggtttctacgagcattattcctaaatcagcttccgtttccaatacacttaaattctatcgaaattgtggtagattttacaaatcacgctactatggcggtagttatacacccaaaggaggtgacttagtattctacggaaccaacggtggttgccatatcggtataattatagcaagtcctgttaacggctatcttcaggtggttgaaggcaatgttcttttgaatggtaaatatcaggttgctaaatttactgcaaacagcaagcgtacagtcaacagcagctacgtatatggttacgcttctccgaactattaaaattatactatgaaaaagaaaccttcaatcgtgagtcttataggatataacacaccatatgctacaaggatacaaagacatgattaagtatgtagatgtattctgaaattcaaatgcgatgaataattgagcccatgccggagagtttgattctcggcaggggctcaatttgaggtgtgcagtattttaagtttacgaatcgaataaaagtaaccgtcacagataaggtagccagtaaaatctttcagaaaagtcgagaaatgctcaccctttcttgtcggctgataatcgaatattatgtatgatgattctgtcacttatcttatcgttgatgtgtcatataagtaccaaaagatgtacgttatcagaccgcagtttattattccgcttatttcattcttgagaaacgctgcattaaaatcacttgagtataaaaaacagctgctgatggttcagaatcaaaaggctgatctcactacatttgagaataatctcgtaacttttaagaatagttttctctatacctatgaaaatgctaaaaagaagcatcaggaagctattgacggtatcgataaggcaatagttcagcttactaaaatcaaggaatctttgcagatttcagataagcaccttaatgctgctaataataagcttgaaatcggaattaactattaaacgccttactaaagatgcagattatgtatatgataagttgatagaaattcgagaagaaaaataattattcgatcaatcatattgattaaaagcgctccccgagatgtttggacagcttggggagcataattttagaatagcctaatttggtgtttggttagagttttgaaaactttgatatgttttaacctttaaagtattgtctgtgatagtgcaaatagactttcatttcttcacaaataaattcatcaggtattctcatcttatcgttgacgttcaaaaaaagcttatccgtgtcgctaagttgatttgaaatcattatttgcccattatcagaaaatgagatataacctttatcaaagagtttatcatggttaggacacagtagtaatccattgaatatggagagcttttcattagggtcactttttgaccaaggtttaatgtgactggctattaaaaatgatgcgttagaaacactgcaaagtgcacatttacaatggaatctctcaagtatttgttccctgaaaacgccttgattaacacgttgcttaacaagacactcatattcttcgcctttaatatcagaatttgcttcaacactacaaatatagtcatttagagatttttgataatcttggagatatttcagcaccttttggtccatgtcatcattgccgtaccagatattgcaacgtcccattccagtgactgctatctttcttttatcacttgggattaagattgcttgtttcgttataatattatatcctgctccctcgcattttgaacgctgtgcagctatattattaggtatcggttgtttatttctatacacagtagcatctatgtagaagccaacaatcttcgattggtgacatacccagacaacgagcacattatcaatggaatcggaatttggtgaagcaccaaaatttttttgaatatttatagtatcgtgtgtagactgaacataaccatagtatagattaccatgcctagtgaaattattaacttcaagcggaactttattttcggtataagatccgccaccgtgataaccatctattacataaccattatattcgtccatttctcttacgttgcaataaagtattttcattagaatcacctcttgagagaaaattttttcaattatatcataatatagtgaaaaagtcaataattgaaaggagtgaaaccgcatagcaaacagaatcaagggcatcactgtcgagatcgccggcgatactaccaaactgcgaaggcgctggaaggtgtcaataaaaacatcaaaataacgcagacgcagctcaaggttgtacagagactgctgaactcgatccgaccataacagaaaggatattgctgaaaagtacggtgtgacttattgatatgctggtcgtgggagtatgaaaaaggaataacctgacatcgtgttaaaagtgagatgcaatggatctgcatctcacttttttctatcttctcataataaaatcaatcacactatacttataaatcctccacctgttgccgatcttgaatccctccagttcacctgaatgaagatatttcagcatagaatttttccctattttcagaagctgcatacactccttgggggtaaggatatccggtactttttcaaacatgataaaactcctttcgcatgaaaaatgttggtttaaaacggtttgttatgtgttatttaagtgttcaataaactgtacactattaaaatcgtataacgagtttttacagctatacattatccttttgtaaaccattggtttaactgaaaaggaggttttaataatgaaaacaaaaggtatcatgatgctgatcggttcggtgctgatgaatataacaggcagactgatcatcaacgcagtaaagaagaaggtgagatgaacatgaatgcaaaagtatttgcagacacatcttcaatgagccgtgaggagtggctgaaatatcgaacaatgggtataggcggctcggacgtttctgttatcgcagggataaatccctatcgttcggtttttcagctgtggctggaaaagacaggtcagaccgagccattcgaaagtgggaacgagtgtacacattttggtacagttcttgaacccatagtcaagcaggaatttaccgaaagaacaggtattgagatagctgaacctaagttcatttatcagcaccccgactatcctttcatgtttgcaaaccttgacggtgtagtcaacgttgacggagaagactgtatctttgaagcaaagacagcatcagcctacaaacagaacgagtggaacacaggcgtaccgcctgagtatatgatacagatacagcattatatggctgtaacaggactgaaaaagacgtacatagccgctcttataggcggtaatcattttgtctataagaccgttgagcgtgacgatgaaatgatcgcagatatcatcgaaatggaacgcagattctgggaagaaaatgtccttggcggtgaagaacctttacccgacggctccgagggtacaacatcatggctgagcgaacactattccgaaagcaacggtgaaagtgttgaattacctgaggatacagtgtttatttgtgaggaatatgaagatatttccgaacagatagaagcactgtcagctgagaaagacgctcttggcaaccgcctgaaagctatgctcaaaaataatgagacaggtctggcagggaagtacagggtcagctggaaaactgtaaactcctcccgctttgacagtacaaggttcaaggcagagaatcccgagctgtacggtaaatttgtaaagcagtcaagttcacgaaggttcggtatatcgggaggtgctacatgaataaccttagcatcagacttcttcgtgccgatgagatcgaatgccgtataggtaccataagcgataaaggactgtccctgctgctttacacagatgcccgtgcagatatgaagatactggacgagacctttggtattcttggctggaaaagatctcaccagtgcataaacggaaatctctactgtaccatcgaactatgggacgaggataaaaagcagtggatatccaaacaggacgtgggaactgaaagctataccgaaaaggaaaaaggtcaggcttcggatagcttcaaaagagcctgctttactgtaggtataggaagagaactatatagcgctcctcatgtatgggtgtctgctcagaagtgcaggatacagaggcgcggagataagttcgtctgctttgataaattctctgtaggacatatcgtgtacagcgatgaacgtgagatagtcgggctcactataatcaattccgatacaggtgaagtggtctataacggctacaagagatcacagaagaaaacagcatgagttatgcctcttggcgatgatcgtcaaggggctttttgtatttggaggaacttttatgaatgagatctatgagtgtgcaaactgcggatgcaccattgaaaatgaggaagacctttacgaagttgaagaccagataatatgtgaggactgcttcaacgatgagacatttacctgcagtcactgcggagacagatttttctaccgtaattctgtatccgatgataatacagctatatgtcagaactgctatgacaactactaccgccgatgtgaacgatgcgggtgtatcatccatgatgataatgtgtactgggacggtgattatccctattgcagtgactgctatgatgaagaagaacagtgcaggcatatccatgattacggatataagcctgtgcctatcttttacagatgcagtgatgaaggtgaaaatgtccgctgttacggagttgaactggagatagacaggggagggaaggacgatgacaacgcagatacccttgaaagcatttcaaacagggaagaagagatcctctacataaaatcggacggttctcttgacgagggtatggagcttgtaagtcatccctgttctttatatttccacaagtatgacttcccctgggaagagataatgaaaagggcagtacgtctgggatacaggtcacacaacacaagcacctgcggtcttcatgtacatataggcaggtgttccctgggtaacacatacgaacgtcaggaagatgtcataagcaggatactgttcttctttgagagccactggaacgaacttttcagattcagcagacgttccgaagaatctgctgaacactgggcagcaagacacggctacgaagacagacctaaggagatactagaaaaagccaagaagagcagcaagggcagatatgcctgcgtgaacataaccaacatcagcacagtggagataaggctgttcagaggtacgctgaagtggaatacctttatggcatctcttgaacttgtggacgctatatgcgaaaacgctatacgacatagtgatgaagaactgcataaacagtcatgggcagattttgttatggatttaagcccagaatataccgagctgataacctatctgaaagagaaaaggctctatgtgaatgagccggttgaaactgaggaggaagattgatatgtgcgctatatttggatttgtgaactaccgtcatgcaataagcggaaggcatatgaaagaactggtaaacaggctggcagttgaatctgaagtcagggggacggatgcaactggtatagcctatgtaaagaatgatgaactgaaggtctacaaaagaccgaagcctgcccacaagatgaggttctatttccccgaggatactgcgatactgactggtcacacaaggatgaccacacagggcaatgcgaaatacaactataacaatcacccttttaccggacatactgcggagggtgattttgcgctctgtcacaacggagttttattcaatgacgatattcttcagaaggatgaaaaccttcctgaaacacatataaagacagatacctatgcggctgtacagctgatagagaaatacggcaatctcagctttgagaccatagctaagatgtgcgagacagtcaaaggcaatttcgtattcaccattcttaatgatgacaatacactttatctggctaagggtgacaatcctctgtgcatcgtacatttcaagcaactggggctgtatgtgtatacctctaccagaaagataatggaggaagtgatagagaacacattcctgaaaatatacaagttcgattttgtaacatcagaggaaggagatattatccgcatagacaagaacggcgtactgacaaggagcaaatttgaatttgaggactattttgcacttgaacgtcattggaatcatgcatcatacggtcatcaccctgattatctttacgagctctgcaatctgttcgggctgacggtggacgatatttctcttctttatgaaatgggttactgcgatgaagacattgagatgatgctggatgacagggattatctaaatatgtgtcttgaagaggctaaggaatactacggagactggcttatggaagaaagctatggtgttaaggtttagggaaaggagatagctatgggttacagatttgacggaaacaagtatattacaaggggaatagaagcggagataccttctgctatacaggttatgatgtttgaaagccttgcgttaatggagcgcaaggcaggagagctggacaggctgcaggtatttaagctgactacaacagaaaaagacggtaccttcctgcttaacataaggcacgaacaggagataccggaagcgtcgatggattactttatgccggtggatgcggcgatcaatactaaggtctatattattgatgatgtggatcatgttactatgcttttggcggaggagtattagtttctatgtatctttatttatgaaaggcgtgataaaaaatggtagtaatgaatccgaaaggtgaggtagttatcgctcaccgcggcaaaaaggaacttcgtgtaaagttttgcaaggacgggatcagagcacgttcagaacttgggtacaagtccttttatctgtacaataaagatatgtatataagatcgacagataaaggatatgtcactgaaaatatgcagttcgcacttataaggatcgagagattcctgataaatgctattaacgtgatcggtgccgggtttgaagaaaatgctataccatccgaatctcataaagctgctgaattgcttatgcaaaatgtaagtgatactaaaatgacttcaatcgaaagatgggcagatttcaacaaaaaggttgatcgtttgggtggatggttagcaaactggtagcataaatgataaagatcacggtctattatgggctgtgatcttttttagtagtgagatcataaatttaagttcgtagaatatctgagtcaaggggtatttaagataaaaacgcacactgatttttgatgtatatcacaaaatctttctttgattaatctaatataatttgatattattgacagtttattattctcgtgatatactatattattagatgaataattgtgctattttagagtttatggcgttatataaactatatcaacagaaaaagaaaaggtgccattaacacgaatggcacctgactattcaacattaggcggattagatgggataccgccataccctacggcatataaagccttatcttagaactctgatgaatattgataaactaataaatcaatgcgtttaaaaataagcctctgatgaatattgataaactaacagcagttttctaagttcaagtttattatatcacgaaattttaattttgtcaacactttgggaggaaaaaacatgggaaactattaccttggtctggatgtaggtatcggttctataggttggtctgttataaatattgaaaagaaacgtatagaagattttggtgtaagactttttgattcaggtgaggacgtaaaaaataaaaatagcttttgtcagcagagaagatccaaacgcgggattcgccgtcgttataggaggagaagtcacagaaaactgcgtttgaaaaattacttgagtgttataggtctgactacgtcagaaaaaatcgactattattttgaaactgctgataataatgtaatacaactgaggtacaggggcttatctgaaaaactgacacccgaagagatagtggcttgtcttattcatatctgcaataatcgtggatatcgggacttttatgaagtcaatatagatgatattgaagaccctgatgagaggaaagaatatggtgccatagatgatataaaaagattgatggacgatggagaatatcgaactcctgctgaaatgatatgtaaatgcagcgagtttgatgaacccaattctgtatacagaaaatatcataattctgctgcttctgaaaagcattatttgctgaccagacatatgctagagaaagaggtcagtcttatccttgagcatcaaagcaagtattatgatattctagataataaagttatagcttcaatcaaagatattattttcgcacaaagagattttgaaacgggtcccggtaatgaaaatgacaagtatcgcaaatttaccggttatcttgatagcttaggaaaatgccaattctttcaagatcaggacagaggctgcagatttactgttattgcggatatttatgcttttgtaaacgtattatcgcagtacacatatacaaatagcagtggagaaaacaaatttgatgcaacatttgcaaacgaactgataaatagtgcccttaaaaagggttctatggataaacgagaactgaaagctattgctaaatcctatcatattgatattaatgataaaaccggtgatacatcgctgactaaatgctttaaatacattaagattgtcaaacctttttttgaaaaatatggttttgattgggataaaataattgagaactataccgatacagataataacattcttaacaggataggaattgttctttctcaggcacagacaccaagacgaagaagagaaaagcttaaagcgctgaaccttggactcgatgaaagcttgataaatgatctgactaagctgaaattatcaggtactgccaatgtgtcttacaaatatatgcagggaagtattgaggctttttgtgagggcgatctatacggaaaatttcaagcaaaattcaatcaggaaattcctgatgtagatgagaatgcaaaacctaaaaagcttccgccatttaaaaatgaagatgactgtgagttctttaaaaatcctgttgtgttcagatcgataaatgaaaccaggaaactaataaatgcaataattgacaaatatggttatcccgcagcggttaatttggaaacagcagacgagctaaacaaaacgtttgaagacagggcaatagatacaaagagaaagaatgataatgaaaaggaaaatgataggatagttaaggagatatgtgagtgtatcaaatgcgatgaagcccaagcgcgccatctaatagagaagtataagctttgggaagctcaggaaggcaaatgtttgtattcaggcaaaactataactaaagaggatatgctgagagataaggacaagctttttgaagtcgaccatatcataccctattctttgatactggataatacaattagtaataaggcattggtatatgcagaagaaaatcagcgtaagggtcagcgtactcctttgatgtatatgaataatactcaagcatcagattatcgcataagggtcaatgcgatgcttaaaagcaaaaaatgtaacaagaaaaagtatcaatatttgatgcttccgaatcttaataatcaagatctgttaagtgaatggaaaagtcgtaatctcaatgatacaaggtatatatgtaagtatcttgttaattatctcaggaataatcttagatttgacagatcgtacgaatcaaaagatgaagaggatataaaaatacgagatcacgccagagtgtttgcggtcaagagcagattcacctcaacgtttagacggtggtggctcaatgaaaaaacatggggtagatatgataaagccgaacttaaaaagcttacatatttagaccatgctgctgacgcaatagttattgctaactgtcgtccggaatatgttattctggcaggcgaaaagatgaaactgaatagaatgtaccatcaggcaggtaaaaagattactccagaatatgagcagagcaaaaatgcttgtatagaaagtcttttcaagtattacagaatggacagacgaacttcggaaagattactttcaggtcatggtagactttcgccaataatacctaatctgagtgatgaagtagataaacgtctttgggataaaaatatctatgagcagttctggaaaaatgatgaagataagaaaagctgcgaagaactgtaccgtgaaaatgttatgtctctttataaagatgatcccaagtttgcagcatcgctaagaatgcctgtgatctcgctaaaacccgatcataagtacaggggctcagtaacaaccgacaatgctatctgcgtaaaagaaattgatggtaagatgattcagttgagcaggaaatcaatatcgtctataactgaaaaggatattgataagatatacactgatgacagaatactcatagattcattgagaagtatttttgaacgagggagctataaagatgttggagagtatttgaaaaagactgatcagacattctttactacaagcaatggtatgcgtgtcaacaaagttactgtaaagagcacagcacctggaagatggctcagaaaggatatagatggcagcaacttctcaatgcttgatgacaggagttattattgcattgaactctataaggacggtaaaggtaataacaacttacagggcatagctatgagtgatatcgttcataaaaacggtaagctgtggttaaaaccggattttaagtatcctgatgattatagtgctcatgttatgtattttttcccgggagattatattcgtataaaaacatttagtaaaaagtctggtgaaaagttgaaatttgaaggctattttaaatcaattaaaagtgtaaatgagaacagttttaggtttatttctgataacaaaccttgtgctgaagataagagggtagccgttgctcaaaaggatatcgttattaagttgactgtagacctgatgggaaaaattcaaggagaaaatgatggaagggggatatcatgtggagaaccgttatcgttactaaaggagaaaagctaatactccgagataactggctcgtagtgtattcagatcatacagaacagcgtgttccgttgggagatatatattctgttgtaatagataacagagctgctttggtaagtgtcagccttatggctgcacttgctgaggcaaacatccatgtaatattctgtgataacaaacatataccaactgctcttatgcttcctatgaatacacactacaaaccgtttggtgtcattaaacgacaattggcactgtcagacgagtttaaggcagtgttatggcagcggataattcaacaaaaattgacaaatcaaataatatgtctaaagctggcgggtttatctactgatgaaatagaacctattgaagaaatggtcagtgaggtacttccgaatgataagacaaaccgcgaagctgctgcagctaaaagatattttattgctttattcggtaattcattcagacggataaaggatgatgtaactaatgctgcactgaattatggttatgctatcattcgctctgctgttgcaaaaacacttgtagcctacggttataattgtgtgctgggaattcatcatataaatgaacagaacgcatataaccttgctgatgatatgatggagccccttcgcccattggtcgatctatgggtagataactctcgtgacaatctgtttgaagagctttccaaaacaaacaggcgagatcttgttggtcttgtaaatgttccgataaaaatgggtaaaaagaagacaagagtgagatatgcaatagataagtatatttcaagcctgacaagtgcaatagagaaaaacgatccgggattactacagcttcctacccttatacagatagatgaaatgttcgaggatgatgaggatggttaacaggtttatgagaataatggtgttttttgatcttcctgttgtttcaaaagcggacaggaaagaatattcgagattccgaaaatttcttataaatgatggatttataatgatacagttttctgtttattcaagaactgtcagaaatcatgatgatgctaaaaagcattgcaaaacaatcgaagccaatcttcctccaaaagggtcggtaagagttcttacggtcacagaaaaacaatacgattcgatgaaactccttgtcggagaaaggttaaaaacagaaaatcttcttgacaaaaaagatataattgagttataataattataacacatattatagtgatgagcatggtttataatgcaatactcataccttaacaacgctgatgattattgtagattgttttgattgacgaaatcatcggttttagtcctctgatgaatattgataaactaatacaa

SEQ ID NO: 886 - DNA, 5011 bp, synthetic construct
  misc_feature 1..5011: note = Synthetic
  source 1..5011: mol_type = other DNA
ggtgccattagaataatggcacctaaatattcacattaggcggattagttgggataccgccataccctacggcataaaaagccttatcttagaactctgatgaatattgataaactaataaatcaatgcgtttaaaaataagcctctgatgaatattgataaactaacagcagttttctaagtttggctttattatatcacatatcatcatttttgtcaacactttgggaggaaaaatcatgggaaattattaccttggtctggatgtcggtatcggctcaataggttgggcagttatcaacattgaaaagaaacgcatagaagactttaatgtgcgaatttttaaatctggtgagatccaagagaagaataggaattcgcgtgctagtcaacaatgcagaagaagtaggggattacgcagactatatcgaagaaaaagtcatcgaaaactgcgtttgaaaaactatctgagtataataggtctgactacttctgaaaaaatcgattattattatgaaactgcggataataatgttatacagctgagaaacaagggcttatcagaaaaactgacacctgaagaaatagcagcttgtcttatacatatatgcaataacagaggttataaggatttttatgaagtaaacgttgaggatatagaagatcctgatgaaagaaatgaatataaggaagaacacgattctatagttttaataagcaatttgatgaatgagggtggatattgcactcctgctgaaatgatatgtaattgcagagaatttgatgaaccaaattctgtatacagaaagtttcataattctgcagcatctaaaaatcactatttgataacaagacatatgttagtgaaagaagtcgaccttattcttgaaaatcaaagcaagtactatggtatccttgatgataagacaatagctaaaatcaaagatatcatttttgctcaaagagattttgagataggacctggtaaaaatgagagattccgcagatttacggggtatcttgatagtataggaaaatgccaattctttaaagatcaggaaagaggcagtagatttactgttattgcagatatatatgcttttgtgaacgtgctgtcacagtatacatatacaaataacagaggagaatctgtgtttgatacatcatttgctaatgatcttataaatagcgcacttaaaaatggttctatggacaaacgagagctgaaagctattgcaaaatcctatcatattgatattagtgataaaaacagtgatacatcgctaacaaaatgctttaaatacattaaggtcgtcaaacctctatttgaaaaatatgggtatgactgggataagctgatagagaattatactgatacagataataatgtccttaacaggataggaatagttctttctcaggcgcagacaccaaaacgaagaagagaaaaacttaaagcgttgaacattggactcgacgatggcttgataaacgagctgactaagttgaaattatccggtactgccaatgtgtcttacaaatatatgcagggaagtattgaagctttttgtgaaggcgatctatacggaaaataccaggcaaaattcaacaaagagattcctgatatagacgagaatgctaaaccccaaaaactgccgccttttaaaaacgaagatgactgtgagttctttaaaaatcctgttgtatttaggtcaataaatgaaactaggaaactgataaatgcaataattgacaaatatggatatccggcagctgtaaatattgaaacagccgatgagttgaacaaaacttttgaagatcgagcaatagataccaagagaaataatgataaccaaaaagaaaatgacaggatagtaaaggagatcattgagtgcatcaaatgtgatgaagtacacgcacgtcatctgatagagaagtataaactatgggaagcgcaggaaggcaaatgtttgtattccggcgaaactataactaaagaggatatgctcagagataaagacaaactatttgaggtagatcatattgtaccatattctctgatactggataatactataaataacaaggcactcgtttatgcagaagagaatcagaaaaaaggtcagcgtacaccattgatgtatatgaatgaagctcaggctgcagattatcgcgtaagagttaatactatgttcaaaagtaaaaagtgcagcaaaaagaagtatcaatatcttatgttacctgacctgaatgatcaggaactattgggtggatggaggagccgtaatctcaatgatacaagatatatttgcaaatacttagtgaactatcttagaaaaaatctcaggtttgacagatcttacgaatcaagtgatgaggatgatttaaagataagagatcattacagagtttttcctgtcaagagcagatttacttctatgttcaggagatggtggctcaatgagaaaacatggggcagatatgataaagcagaactaaaaaagctgacgtatttagaccatgccgcagatgctatcattattgcaaactgtcgtccagaatatgtggtgctggcgggagaaaagcttaaactgaataagatgtatcatcaggctggtaagaggataacgccagagtatgaacagagcaaaaaggcttgtattgataatttatataagcttttccgaatggacagacgtactgcagaaaaactgctatcaggccatggaaggctcacaccgataataccaaatctaagtgaggaagttgataaacgtctttgggataaaaatatctatgagcagttctggaaagatgataaagataaaaaaagctgcgaagaactgtatcgtgaaaatgttgcatcgctatacaagggagatcccaaattcgcatcatcactaagtatgcctgttatctcgctaaagcctgatcataagtacagaggaacaataactggtgaagaggcaattagggtaaaagagatagatggtaaactgattaagttgaaaagaaagtcaatatcggaaataactgcggagagtataaatagtatctatactgatgacaaaatacttatagattcattgaaaacaatttttgagcaagcagactataaagatgtgggagattatctgaaaaagactaatcagcatttctttactacaagtagcggcaaacgtgtaaataaggtcactgttatagaaaaagtaccttcaagatggctgaggaaggaaatagatgataacaacttctcactgcttaacgacagtagttattactgcatagagctttacaaggacagcaaaggtgataataatctgcagggtattgctatgagcgatatagttcatgacaggaaaactaaaaagctctatcttaaaccagattttaattatccggatgattattatactcatgtaatgtatattttcccaggggattatttaaggataaaatcaacaagtaaaaagtcaggggaacagttgaaatttgaaggctattttatatctgtaaaaaatgtaaacgagaacagtttcaggtttatttctgataataaaccttgtgctaaagataagagagtatctattactaaaaaggatatcgtaattaaattagcagtagacttgatgggaaaagtacaaggcgaaaacaacggaaaggggatatcatgtggagaaccgttatcgttactaaaggagaaaaactaacactccgagataattggctcgtagtgtattcggataataatgaacagtgtgttccgcttggtgatatatactctgttgttatagataacagagccgctttggtaagtgtcagccttatggctgcacttgccgaggcaaatatccatgtgatattctgtgacagcaagcatacacccactgcgctaatgctgcctatgaatacacactataaaccatttggtgttattaaacgtcagttgggactatcagacgagttcaaggcagtgctatggcagcggatagttaagcaaaaactgacgaatcaaataatatgtcttaagcttgcaggaatcaatactgatgagataaaacctattgaagaaatgataagtgaggtactaccaaatgataagacaaaccgagaagcagctgctgccaaacgctatttcatagcattattcggaaattctttcagaaggataaaagatgatgtcactaatgccgcactgaactatggttatgctatcattcgctctgcggtagccaaaacacttgtggcatacggatacaactgtgttctggggatacatcatataaatgaacagaacgcatataaccttgctgatgatatgatggaaccactccgtccattggttgatctgtgggtagataactcccgtgatgatctgtttgaagaactcaccaaaacaaacaggcgagatcttgttgatcttgtaaatgttccgatcaaaatgggtaaaaagaaaacgagggtcagatatgcaatcgataaatatatctcaagcctgacaagtgcaatagagaaaaacgatccgggactactgcaactgcccacccttatacagatagatgaaatgttcgaggatgatgaggatggttaacaggtttatgagaataatggtgttctttgatcttccggttacaactaaaaatgacaggaaagagtatgctaaattcagaaaatttcttataaatgatggatttataatgatacagttttctgtgtattcaagaactgtcagaaatcatgatgatgcaaaaaagcattgcaaaacgatcgaagcaaatcttcctccgaaaggatcggtaagagttcttacggtcacagagaaacaatatgattcaatgaaactccttgttggagaaaggctaaaatcggaaaatcttcttgacaaaaatgatataattgagttataatatatgtaacacataatatagtgatgggcatgttttataatgcaacactcacaactatcaaataccgatgatcgctgtatattgtttttaatgacgaaatcatc

SEQ ID NO: 887 - DNA, 4723 bp, synthetic construct
  source 1..4723: mol_type = other DNA
  misc_feature 1..4723: note = Synthetic
gttagcgaattaacggttcactctcgtaaatgtcaaggattagaatttgattacatttctcgagttgaaaaaccaagtccccgcttggatccaacaataagccggtcaagatggggacttgaatcttgcgaacttttgttcttattgtgaaaagcccacaagactgggttaaattagttgtaacaatgtaagctttgaattatactaatgcaagtcaacctgttaactaatttctataaggaggatttatgagtactattttaggattggatgttggaccaaattccatcggttgggcatttatatacccggataacagtgaaattgttgcaacaggcgtgcgagttttccctgaaggagttgataattatggcagcttaggacaacaggaatcgaagaatgccaaacgacggatagcacggggaatgcgccgacagaaccaacgatttaaaatgcgcagagataatttagcttggcagttgaaacagttaaatatgtatccagaaaaaaaagatgagctttcagcttatttttcgttagacccatattcattaagaagcaaaggtttagacaagaaattaagtttacttgaatttggaagagtgttataccaccttaatgaaaggagaggattcaagtctaaccgaaaagctggcagttctgaagatagcaaaatatttaaaagcaaaaatgatttggtgggaattactgacacagaaatagccattaatacaggaggttttagaacgctcggcgaatatctttacagtttagactcccatgaacttagaaaaagaagtcgttatacacttcgagcaatgtatgagcaagaatttgaaatgctatggggaaaccagaaaacctactataaagacattttaacagatgaagctaatgaaaaactgcaccatgccattttctttcaacgtaagctgaaatcacagaaacatactattgccaaatgtacttttgagacacagaaacggtgtgccccaataagttcccccacatttcagtattttagaattcttgaacagttggcaagattgaaagtcaccgacggtgatagaaaaggagattttcttacacaaaatgaaagagatattcttgtaaacgaattgaataataaggaaaagttacctttcaaacgagttacgaaattactgggattaagtagtgaggccatgtataaccttgagcatgaaaaacagttaatcggtaatagaacaaatacgaagttagctagagtttttggtaagaaagaatgggatggcaaatcacctgaagaacaatacaatatctggaacgatttccatttttctgatgacttagattggctgaaagaaagaggaaatataatatgggaactaaatgaaactcagatagagaaaattgaaaaagtttcgctggaaaagggatatggcaagttaagccagaaagcgttattcaaaataataccttacctggaaatatctgaaactgaagatagtgatcccatgacctttgataaagctgctaaagcggcaggttatcatcacagtgacgtttatgagcactccggtaaaatgggaaaactgcccatacctgatgacatacgtaatcctattgtccaacaggcgctgtttgaaatgagaaagcttgtcaatgccatagtagataaatatgggaatcctgagacaataaaagtggaactggttagagatttaaaactaccgaggcaaagaagagaacagatattttctgaaaatcggaaacgacgagaatatcatgatgaaattagagatattttaattgatgttggaatgaatgacccatccatggatgatattctaaaatacaagctttgggaagagtgtgataaaacttgcccgtacagcggtaagaaaattaattccattgccaagctttatagcgctgaatttgagattgaacatattcttccgtacagcagaagccttgacaattcttacatgaacaaaactctttgccatagggattttaataatgaaaaaggtaataaaacaccatacgaagcttggggagaaacaacagaatatgagaaaataacggaaagagcaaaaaagctcccctacccaaaatatagacgttttatccaaaaggaattaaaggaagacgagtttattaaccgacagctaacagatacggcatacatcgcaaaagaagtgagaaaatatctttcacatatttgtactgatgtacgcacagtaccgggtacggcaactgccagattaagaaatttctggggtttgaatggaattctttcgaaggatgttgatattaagaaccgggaagatcaccgccatcacgctgtggatgctcttgtggtggctaatactgagagaaagtacattaaacacttatcgacatttcatcattacagacgcacaccaaaaggagaacattttccgatgccttgggaatcgttctggagtgatgctgaaaatgcagtaaacagtattcttgtttctcacaaagttaagaacaagttaagcggtgcattacataaagagagtttttacggcttaatcatggatgatgtcggtacccctcagaaaaacgataaaggacaatttatttacggaaaaaggaaacctgtacagaacttgaatgattctgaggtgaagaaaatcgcagatgacgatgtaaaaaaatctgtgaagagatggaaaagtttgcctaaagattcaagatcagaatatccaaccttaccatcagggcagaatataaaacgggttcgcattcacgacgttcacacaaatgtagttgaattgcgaccaggtgtatttgtggaacccggaagtaaccatcacattgcaattttcgaaaatatagaaacaggaaagcgcaaaggaaaagttgtctcgctgtttgaagccgttcaaagagacaaaaatggtgaacccgtaattgacaaaacagctgaagaagggtggaaatttgtaatgtcactttctattaatgagatggtattaataaataataatcttgatgaaatagactgggggaataaaatacaacttagtaaagatctatatcgtgttcagatagctccagcgtccctccaaatttcctttagacatcacaatgtagctaggctaaaaacagatgacaacagaaagcctgggttaatactaaaaaaaccaaacacatttaaaggtattaaagtaggaattgattatttaggtaatatttataaaatatgattaagaaaacgctctactttggcagtccagccagtttgagggttaagaacagacaattactgataaaaagagaagacgaagaagaccgtaccattcctattgaggatattggatttataattttagatcattacggtgtaactatttcccacggcgctttgggagcattgatggaaaataatgcttcagtaattactacaaatgaaaaacacatgccggagggactatttttgtccttggccggtaacagtgaacaaaatgagcgtttcagatatcaactgaatgccagtgaaccgctgaaaaaacagctttggaagcagactgtaattgcaaaaatacaaaaccagtccggtttgctcaaacagcttggtatagaacatgagtatatgcacaaaacctctaaaaaggttttatcaggtgacagtggtaatcttgaggctcaagctgcacgatattactggaaagtactatttgatccatttttatttaaacgctaccgatatggcaagccccctaacaatcttctcaattacggctatgcgatattaagagctgtgatagctcgtgcattatctggcagcggtctattacccggtgtaggtattcatcacaaaaacagatataacgcttatcctttggcagatgacattatggagccctatcggccttatgtggatgagattgtatggaatctggcgatgaatgaatatgatatatctgaattgagcagcggcattaaacgagaacttttagaaattccaaatctaccggtaatgttggatgaacagcctttatctttaatgttggcagcttctcgtacaaccgcttctttacacagatgctttagcggtgattcacgcaagttgctttatccaattatatgaggttaaacccatacaaaattatgtggttaatggtattttatgatcttccaacaattacaaaaaaagacaggaaagtttttgccaaattccgtaaagacattatgaaagatggatttacaaaaatgcagaattcagtttacctgcggcattgtgcaagcagagtgaactctgaaattcatgtaaaaagggtaaagagtgttttgccggataaagggttagttagcattttaaaagtaaccgataagcagtttgatcagattgaaacgtttaaaagtaaaaaatcaatacccccacctactggagggcaacagcttgagatgttttagcagaatgctcttttgtcgtttctatttttttatagaacctaaaatataggattgtttgaccaattacaatccattatcagccattttatacagaccgatacgactgtaactccctataattgttgatttgcagcgcaagtaatttaattaacccagtcttgtcaacaaatcacaactgtttattcattggcccagtcatcgtattgaatttaattaacccagtcttgtcaacaaatcacaacccgaatcaagacgtagaagcggaagaaaagaatttaattaacccagt

SEQ ID NO: 888 - DNA, 15335 bp, synthetic construct
  misc_feature 1..15335: note = Synthetic
  source 1..15335: mol_type = other DNA
acacctaaagtcttcaggtgtcgcacttacagcgctcctttaatcacgtatctatagaataacagccctaacggactgccctattaggtgtcgggctttggctttcccttcggccgccgacctcttcgacgttcagccctcgcagtcttgaattcatcgaactcacgttaaatattttcaacgcaaaaaacacagagccgcaaagttttaataccccaatgcctctgcgcttttgcgtttttatttacatccactaaaaacaaaaaataatcacctaaatatttggttaagtgggaaagaatcagtatttttgcactcagaacatcaaatctgcaaaatatggaaaaaaaatatcgtaacataccagatgaaccagcaatggcaagtgaacctgctgttgcctatggtcacatacatacccaagcaccagtattctcttcatatcagatgcagattcttgactctatcgccaacgtaaagagcgaacaggaactttgcgacatcaaaaatctcattgctgagtatttctccaacaaggctcttgatgctatagataagctatgcgaggacgggactttaagcaccgaaaccattcagtcatggcaatcagaacacatgcgtacaccatacaaatattaatatatggaaaacatagttcttgacacgaactgcttgatatcatcattaaaaaggacaagtatatattatcctatctggagagattttatgcttggcaagtattgtttatgcttttctgatgagattcttaatgaatatgaagagataatagaacagcgtactggttctgcagagattgcacatagtgtgataaacgctatcataaaccgcagtaacacacgccacattgaagtttattatcattttgatttaatcaagacagacaaagacgacaataaattcgttgattgtgcaattaaagcaacagcaaaatacatagtatccaatgaccaccattttgacatcttgaaacaaatccaattccccaaagtggaagttatagatatcaatagattcatagaggaattaagtaaatactaaagtcaaaaatggaaaataatgcaagaaatcgcgcaataaggtagattacgtatacctttaagcgcaaaaataggaaaatatatttctaccacttaaacaatgccccccaaaaaaagaagccccgctttcgcgaggcttatacacacggagctgtaacagacgcatgtaagagataatcttcggcttggcttttggcctgcctttttgtgaagagtgttcacaaaatgatttctaagtgtgtgcaaagtaaagaaaaattattcaaataaccaaaaatatctgctgaaaaatgccaaaaatagtaggaatagacctcggaaccaactccgtaggcatcaatatctgggataaatacaataatggactactgaagaatcaaatagaatcttcggtagatatatttcgtaatggtgtgtcaaaaggcaattccatgacaagggaatcgtctttggcagcagaacgcacaacaaaacgtagcaaaaggcatttagtgcgctctgcccgtacaagaaaacaggcaacgttgaaacaccttataaagtacggatattgtcctcttactatggaagaactcaaccgttggcgttttcagaataaagaaaaaggatatgatagaaccttcccttcatctgataagttcatgcaatggatcaacatgaactttgaaggacatgaaaacgggaaagccgactattcaagcgtttatcagctcagaaatgagttgatgacgagagattttgactttgagaatagcaagattgaccgctacaagttagggcgcgcactctataacattgccatacacagaggtttcaagagtaacaaaggcaataaggcaggcgaggaagataaagaagatgaaatgaccgagggtaatgccacttccgaaatcaagaaatcggcaaaactcaggcaacttatggctgaaaagaatctccagacaataggacaagcgttctattatcttgaaaagaatggcgcatttgctgaaggcgagaaaggtttcagagtgcgaaacagtgaatatacagctgaccgttctttatactatgccgaaataaaggcaatattccagaaacaacactttgaccttgattctgatttctgcaaaggcattctcagcaaaaagaagcacgaaggtactatcttctacaagcgtcctttgtcaagtcagaagggtaatattgcacgttgtttccttgaatcagacaagccccgatgctatatcagccacccagagtttgaggaattccgtgccttgcaacttatcaataacatccgtgtaaagctctctgaaaatggcgagtggataggtcttgacgacaatcagcgtcagcaactttacaaggataagttccttaatagcagcaaggattatttcaagttctccgagatacgcgaatatcttgaaaagatgttctctgcaactttctcaaaacagtcaggaacaatcaactacaaagactctacatccgtttctcgctgtcctgtaaccgttcgtctcaaccgcttgtttgaaggcaagggtttccgcgaaacaatagcgcaagataataacaaacgctatacggtagaagatatatggcatatctgcaatacgtgtgatgatgaagactggctcaaggaatttgcaaaagacaaactgcattttgattcacagaaaacgaaggaactaacaacactttggaacaacattcctgaaggctactctaatctcagtcttaaagcaatacgtaggataaaccgtatgttgcgtaagggtatggtttattctgatgccgtgatgtttgcgaaattaccagacattcttggtgaaaagaccttttctgctatcgaggatagcattatggatattgctgatgaattcactcgtcaatataatgaggaacgtgatgcaataagggcagagaacgcaaaaatagaagcctacatagcagagcacccaaatgaagacttcggtcatgcaatcggcaaattccgttctatgcctaataaaatggattgcttcaaacatttcatgcatcgcagtttcccagaggtgaaatcatatacgtgggataggctatatcatcattctgatgtgtcattataccctgtacctccacgcgatgaagatggaaatctctatcttgccgaccctatcaaaggcaggattctgccaccggccgtaaaacgcactctgtgcattctccgcaagcgtatcaattcccttatcaaaagaggcgaaattgaccctgacagcacacgtatcgtaatagaaacggcacgtgatatgtgtgacgctaacatgaaatgggctatcgacacatacaacgctcgccgtgaagatgagaataagaagatagaagaacttatcaaggaattctgtgagggctatgccgacaagtctgtaactcccgatgaaataaccaaggcaagacttctcttagaacaaggcaaacagcagaatgattgccttgaggctgaggggagatactacgagatgaaggtaaacgccgagcgttacaaactttggaaagaacaagactatataagcatctatacaagtaaggttattccgctcagcaaactatttactgatgaatatgatatagatcacacactacctatcagccagtcttttgatgattctctcgaaaacaagacaatctgcgaggctcactacaatcgcaacataaagaagaatattctgcccacggctttgcctgactatgaggaacatataaggcattccattgttcttgatatatggaatcagaaagtagagaggctgaagagacaagtagatgtatgggataagaaagcaaggcgtgccgccgacccagaatcaaagaacgagtacatacgtcaaaaatatacatatcgtatggaacttgactattgggaaggcaagctaagccgttttttcgttactgatattgatgataaattccgtaacaaccagctcaacgacacacgaatcattacacgctatgctatgcactacatgaagagtgtgttccaaaaggtatctgttcagaggggcgagacaacagccagattccgtgagattctcggcatagagaaaaaagaccgttccttgcattatcatcatgctattgacgctcttattctttcgcttattccacatgccagattgcgtgatgaaattctccaaacgtattacgaaatcaaggaggcaaagagatatggaacaaacaaacaatgtgacgaacttaatcgtgaattgcgtcataaactgatgcttgcaggtatcagttattcagaggtaaaggatgctgttgaaaaaatcaagacagaactcatcgtcgaccacgaaagaaaagatgtcaaaatggtgcgcgacagcaaaaatatgcgcatcaggggcaaagtcgtcaaagggaaattgatgcgtggtgatgttgtcaaaggacagttgcatctcgatactttatacggagctatcaaacttcctgaccatcctattcaatatgtatctcgtaaaccgcttaaatctgtaaagaaacttgacgagattgtcgatccgcaagtacgctggtcaatagagcgacagatgcagatgtacggaatcaagagtttggcttcatccgatggaaaaccaatgtggatgatgcgtaatgttaaaaatgaggatggcacaacaacagaaatcatcatcaaggaagacaagaacggccgtccattattgcctatccgtcatgtgagggtgttctcttctccacagataaatgccggtaatattcctatcaagaagacagaacggaagtcaaagaaagctcttgtcagacttagtgacagagagcataaggattttcagtacgcagtaaaaggagactttattgcctgtcttgtttatagcacaataaacgaaaagaacaagttacaaagaggctaccgtttccttactgattttgatattgccaaggcaaagcgcaaaaatagagattctgcctcacgttgcaagtctctgaaagagtttataatggctattgacgactatgtattggcagatatacctcagtatagcaataatacgcttactggatatataaaaatgaagatagagcgcgtaattcttcccggtactgttcttattgagaaagatgaaaataagtctttatcagaaagaaccttcatagttagaaattgcaactactataggaaaagtggtgttatctgggcttctaatcacctcgtcgcagatgtgacagatacgaagaacctgatagagataagaccaagcaaactctcgtctttcgatattgtggaatagaagaaagtcacccttgttaatagggtgactttctttcaatatcaactttttctttggaataaataccctcaatattctgatagataaccctttacgctcaatcagatattgttaatattacttagaactcattttgtaaccaattcacaactttttggttatgagggatgaaatcatcattgatattgttaatattacttagaactcattttgtaaccaattcacaacgcaatcctaaccacagggaaagcggaggcagatattgttaatattacttagaactcattttgcaaccaattcacaacgatgtccgttcaatgagtttcggaatgtgggatattgttaatattacttagaactcattttgcaaccaattcacaactgcttgtatgccttatatgctactttcgtggatattgttaatattacttagaactcattttgtaaccaattcacaacgttaggcgcgcagatgttgaatgccttctggatattgttaatattacttagaactcattttgtaaccaattcacaactggaagcgtaaccagttaccctaataagagatattgttaatattacttagaactcattgctattttgcaaagatataaactttttatgttaattccaagaaaacaagcggaaatttaatgtttttatgtctttttataatgattcctttccaaaaatgaacaaggaaatctcatctttattcccaaaattgcaactcctatgttcctcccatgtaactcctatgtaagtcccattttcctcccattcataggaacggacttggaacggctttgaaacggacttgaagcgaaggagaagcggaccaacaacggaggcataacggaggcacgaggttaaagaatcagattaacgtgagttcgacgaatttacgttaatttgctatgtcgggattacaagtgaactttttttagaattaaatgccaaacacgtacatgggggtaaaaatcgcatgataacatattgtgtatcagagtgtttatactcatgtacgtgtttgtcaaacacgtacatgagtcgtacataacacgtacatgatttttgctcacaaattcaagcaatataaatctatgctcattttataaaaaaaagaataatgacgacctatgtacgtgttatgtacgtgtttgacaaacacgtacatgctcttaacttgtttgttatcagtacacttacggtcgattttagctatcatgtacgtgtttggcatttaattcttaaaaaaaattgcatctctttgacaggaaataaaaaagcgacattttttttgcagttaaatcaacgtgagattcaacaacttacgatccttttaacatttccaatgaatttatacgcagaaaatttcttgcgaaatatttgcaaattgaaaaatcattttgtaactttgcaaacccaattcgaaagaaaaggaacctaaatcttacgtttatcgtaaattaacaattaaattttttgtctaactcttaatttattttttacatgaagaaaaaccagcagcttagtgcaaaggttgcagaggaattcctcgcacaggcaaagacatcaaggaggttatcttctcagagaacaccgttatgcacaatcctatcagggagtatatggacgctctgcctgaatgggacggcaaggatcgtgtcacgcctctctggcatcgtctgggtgatgtgagtgacgagatgtgcgaattcctgcgcatttaccatcgctcatgcgtggcacattggcttcagcttgacacgctccacggtaatgaatgtgtgccaactctcattggcgatcagggctgtggtaagacgacctttgccaagcgtctgctgcccgtagagcttcgtcagtacttccttgaccacctcaacctctctaataaatttgataaggagatggctctgaccaacaaccttcttgtcaatcttgatgagcttgaggctatccgtccttctcaacaggcttcgctcaagcagacactatcaaaatcgaaggttaacggtcgccctatcttcggcggttcacaggatgacaagcctcgttttgcatccttcatagctactaccaataatccgcatcctcttagtgacgtgacaggctcacgccgctatctctgtatcaaaattgcagagggttgccttattgataatgatagtccgatagagtatgagcaactctttgcccaactgaaatatgaggtggaggttgagaagaaatcctattggtttaccaatgagcagacaaagcgcattcaggaactcaacgctccgtttatgcagacatcggaccttgagcagatgatagactcatgcttccgtaagccaaaggaaggtgaagaggcggaggcgatgagcactaatcagattatcaatgtgataaggaaggagttttctaatctcacagtcactcattccaccattgtgaaccttggtctcaggctcaaggaaatgggctatgatgtgcatcgcactttcaagggaagggtgtatagcatagtacagaagaagaaggcggcgtaaaggtaaatgaaaagtgaaaaatgaaaaatacaagatacacttttctggtaatgaccaaactcgaagatactaatctgtatttttcactttttcatttttcatttaattttaattcagttcttcaacccattcacgaaatcgcgagctgccattcgtttctttccggcaatctgaacctcaaggatttcaagctgatagtcggaggcggagatatagaggtggttcttctctgcgtgaagagtgccaggagcctcagccttacggtcagtcttctgtgccttgtagatcttcatgacagtctcacgaccatcgggaagagtgatgtttgtccatgagccaggcacaggggagagtccgcgcacgaagtcgtgacattgcttcacgctcttgttccagtcaatctcacatgtttccttgaaaatcttaggggcttgatgcagttcctctcctacaggaatcatttcttcctgtggaagcgactctacattaccgttacctgctatgatagcatccacggtctctatggcaagttcggcaccgagcttcatgagtccgtcatagacatgctccacattggcatcgtcaggcacgtcaaacggcttttgcctgatgattctgccagtatcaatatcgtgatcgaggaagaaggtggttacgcctgtcctcgtctcgccattgatgattgcccagttgataggtgcagcaccacgatactgcggaagaagggcagcatggacattgaacgtgccgaagcgtggcatatcccatactatctcaggcagcatacggaaggctactacaacctgcaaatcggcattatagctacgaagctgctcgatgaactccgggtctttcatcttgaccggctgaagcacagggatgttatgctcaagtgcatattgcttcacctgtgacggctgaagcacagagccatgtcgccccaccggcttatccggctgagtcactacagccacgacgttatatccgccctcaacgagagcagagagagtacccacggcaaattcgggggtgcccatgaatactatgcgaagaccgacccctttctgccctgcgggcatctttccccgtgaggggcaagaaggctggcgcagaacggcattatcgctatacgaagattcaatattattattgctcatataaattctttttgatattcgtaattactttatttatatcagtcattatctcttcattggtgaatcgtattacacgaaagcctaattgagatatatgatacgttctttttctatcttcttctatttgctcgtcagtcaggtgatataatccatcaacctctacaacaagccttttctctatgcaggcgaaatccgcaatgaaatctcctattatgaattgcctacggaaacgtacacctaacgcattcctacgaagatattcccacaacaccctctccgcatccgtcagagccaaacgattcttacgagcattttcctttagtatggcgacacggtcggggtaggccattttgtaagaacccctttctgccctacgggcatctttccccgtaaaggggcaagaaggctcgcgcagaacggcattatcactaaagggattaatgccattagatttattatcgtctgtacgtttctccatacacacattttatttgattgcattaacgaatcccccatactgcgctagcctcttccccctccacgggggaggatgcccgtagggcaggtaggggtcgccttaatcatttgaaaggtccgccaccatctttctatactgtgcatagacatggctgcgggaaacgtagccgatgaggtggttgttgtcgtccatgacaggaagctgatgcgcgtgatactggtcgaatgcctttaccacatcctccataggatcaccaagacggagctgcgttggcgggtcgctcatcagttgtgagacgcggaaatgatgataaagttctgtacggaaaacgatatgacgaagcttgttcatgtcaatctcgccaaggagattgccggcacggtcgaggactggcagaagactgctacccgacttgctcagagaatgaaccaactgcccaagctccatgtccttatccacactcacataatccctttcgatgacgctgtcaaggctcataagcgtgagtacggcacggtcggtatggtgggtgatgagcttaccctcacgagccagacgcatgccatagatgctgtgaggctcgaagataaggattgtgaggtatgaacttacggctgttatcataagcggcatgaagagatcatatccggctgtgagttcggcaatgaggaagatacccgtgagaggggcatgcatcacgcccgacatcactcctgccattccaagcaaagcggcattcttctcaggaaaatagacacccatgccatacatattccagatgcgtgcaaagaagaatccagcaaaggcgcctatgaagagtgatggtgcgaaggtaccgccacaaccgccaccaccattagtagaagccgttgcaaaggacttagtgagcacaatcataccgatatagacgataagccattgctcatgaccatagaacagagaaccgttcataaccttgtcccaatcagcctgagtacgtccgtcaagaagaatattgatatccttatagccctcaccgtagagtgaagggaaaaggaagatgagagtgctaagaatgatacctccaagggcaagcttcgcataggtgtggttcttcagctttccgaagatattctcgcagaaagtcatggaacggatgaagtagagagctacgagtccgcagaatacgcccaagaggatattgcttggcacacgctctactacccaaggactgtcaagcacgaatgtaaacaactggtcgttgcctatgaagatataggtgaaacaggttgccgttacggatgcgatgaggattggggagatgctcgccatagtgaggtcgatcatcagtacctcaatggtgaagacgagtccggcaataggagccttgaagattccggcaatagcagccgcagcaccacagccaacgagcagcatcagcgtcttgttgttgagtcggaagagctgtccgaggttactcgcgatactcgaacccgtaagcacgataggagcctcggcacctacggagccaccgaatccgattgttatggctgaggcaaagacagacgaccagcagttatgcctcttcagtcggctctgcttggtacttatggcatagaggattcgggtgataccatgcgagatattatctctcaccacatattttacgaagagtgaggttagccatataccgacgatagggaatacgagataaagccagttgaatgacttcatattgaattccgaggtcagcagatgctgtatgaagtggatggcagaatgaagtatgaatgccgcaatagccgcaagcatacccacaaagaatgcaaggacaagcgtaaactgcttgtccgatatcttcttcactctccattctatgatttgatctattgtcatactaaaaaaacggcccctcacctgccctatgggcatcctctgacacatactcggagatactcaatctccgacttccccaaggggcgaggaggaagttagtattagcccctcaaaaagttcttaaaagcgaacaaatgtaacttttccctcgccccttggggagagggtgcccgaagggcgggtgaggggctgttggtcttttattttcgaatcaccgtcacctcgccattgcttgcaagcttgatgatgcttgaaggcacatgaggctcatgctcgtttctgcgtgacttgcagacataatccacagcctcaaggagttctggggcaatgtcacgatagttctgggcagcaggctctccacttatattcgcacttgtagaaacgattggcttctgcatacgatagcagagttccttggagaatgcctcctttgttatgcgcatagcgatgctaccgtcctctgccacaagattattggcaagtccgctggcattatcaaggataacggttgttggctttgttgcgatattgagaagatcccaagccacatcaggcacattacggatatagcgtgagatgcgcttgtcagagtcgataagacatatcaacgcctttgaatcatcgcgtttctttatctcatatactctcttcacggcctcagcattcgtagcatcgcatcctatgccccaaacagtatctgttgggtagagaataacaccaccctgcttcatcacacgaacagcctcagcgatgtcggctgcccagccgtccttcaaaagacccctatctggcctctggccatcttcccccgtggagggggaagaagctggcgcagtacgaggtttcgcaccattttttccttttatatccttatcaaatttattgtatgccatatttttctcttttattagttgctattttttagcttttctgtatagtcctttctacattccgttctgcgccagcctcttcccccttcacgggggaggatgcccgcagggcaggaaggggtcaggtattcaacttcgtcagcatccatcctccagatttcttctggaatgtgagttcagactccataccgttggcaatgccacgaaccacgaaaatcctcgtgttagaaggcttgtaaggctgatcaccgtaatggatgttatagagcgttccagaaggcatccaaggaaggaaagcaggaacctgctctgccataagttcgcctgtcatgcgagagaaatcatcctcaggatctggacctgagaaacttaccgactccgcaattgaaacagactgtatgtcaggattcgtgacaaagttattgtagaatctcaggaaagaagcatcttcatgctttgtgagtgccataatcctgacaccttgcattttccaaagaccaagcacacgcttgaattgccatctctcaacccttgacttcttgaatgaaatcttttccacatatacgctattgatggcggtatccttaaccacatccatctgacgagcactattgaacacgagtgtgtagtagccctgacgcataaagaaatgctccataccccattttgacttttccaccttcgacagcttgccgtatgtatcaacattaacaggatagtccgtgcgctcgctctgaaggcgacggttggcagcaaagttaaaaatgaaatcgtcaaaaagctcatcggctgcttttggcataggttcatcctcgatcaacgcctccatagagtcagtaccaagggtatcggtgagcatcgtatctacactcacggatacatcggaggttgtctttttgtctgtacaaccagtaccaacgaagagcatcgccaatgacgctaaaaagactacaaaaacaatttttctcatcaaatttacacaattttcggtgcaaatgtacacatttatttttattttattccttattttccaagaaaaatattaattttgcacgcaaatttgatttaagacactatcaagacactatgttagtagagaaaatagacgcacttcgcaaggaagtggaagcgctgacagcctccaacgcagaagaaatcgaggctcttcgtctgaagtatctcagtaagaaaggtgagctcaacgccctgatgaccgatttccgtagcgtgccggccgatcagaagaaggagcttggtatgaagattaacgaactcaagcagttcgctctcgataagatcaacggactcaaggaacaggtggcaacaacagagactgttgctgacgacctcgaccttacccgtactccctaccctatccagctcggcacacgtcaccctctctctatcgtgaagaatgagattgtggagattttccagcgcatgggcttcacattggctgacggcccagaggtagaggacgaccttcacgtgttcacaaagatgaacttcgctgctgatcacccagcacgcgacatgcaggacacattcttcgtagagcagagtccgctcaacgatgtgacaaagaacatcattctccgttctcacacctcaagcgtacaggctcgtgttatggagcagggacagccaccaatccgtgtcatctgcccaggacgtgtgttccgtaacgaggctatcacagcacgcgcacattgcttcttccaccagattgaaggtctctatattgacaagaacgtatctttcaccgacctcaagcaggtaatgctcaccttcgcacaggagttgttcggaccagacactaagatccgtctccgtccaagctatttcccattcacagagccatcagcagaaatggatatctcttgccatatctgtggcggtaagggctgcggattctgcaagcatactggttgggtagagattctcggttgcggtatggttgaccctaacgtgcttgaactctgcggtatcgactctaaggtatattccggctacgcattcggtcttggtgttgagcgtatcaccaacctcaagtaccacgtttccgacctccgtatgttctctgagaacgatacacgtttccttcaggaattcgaggctgcgaactaaaggttagaggttagaaggttagaggtcagcatcgctccgaccttagaacctgaaaacctataaaactgaaaacctgaacgaaaaagcggattaactcagcgatgagttgtccgcttttttctatcttcatttcttcgaaaacggaaagcctccctaaaaagttgacagtacgttccttggaatgggcgaaaaatgggatttggtagggatttgcttaggccttgcaagggacttggagacttactcatttcaatgtgaattttacgaccaattttcatccaaacagatttctttttttctgtcctcattttttcagagacggaaacatccctaaagaggagaacatatttcttctctgttttctgaatttatttctctcttttttgctatttctatcgtcaatcccttgcatttgacataatttttcattacctttgcactcgttgtttataaaacatcaagtcgaataatcataaaaataaacctaatcaaaaaactaaggtatcacaatgaaggaatcaataatcctatctcttctcctactcttatctctgagtggctgggcaaaggcaagcaacgtctctgccaatgattctgtctgtattattgaaggaactatcaagaacattcccgatggctgtgacgttattctctatggctctgccggcaagtatagtggcaagcagaaaacagtagcccagattaagaagggaaagtttcgttttgagaagatgatgaaaggagatgaaaagtatagtcttttcctctatccctgcatagactccctcacaatatatgtttcaccaggaactaaaacgacaattacaggcaatggaacacatccatctacttggcttgtgaagaatgacaatcccttacaaaaggaatggaatgcttatcagcaagtagagatgaatgacattgcaggttatcaag

SEQ ID NO: 889 - DNA, 16396 bp, synthetic construct
  source 1..16396: mol_type = other DNA
  misc_feature 1..16396: note = Synthetic
ttgtcgcataaattcaatccagaatattggaactatgccaaattgatttcaagtaccttgcgtcatggaatgccaattgataagatagtcgatttaatcaatagcctgcaactggatagtgaatccatcaacacctggaaaaatggtgtggttagagcgttaaagcgttatgtggaagatggaacacaagccaaagggcaaacctgtaccaattgtagttcagggaatttaatttatcaagagggttgtttaacttgtaaggactgtggttcttctaagtgtggataatcacatatatagaatttaatggtataagggaggttgtttacagcttcccttttttatataaatgcttttatgaaataaagataggcaagcatgatcagaacgtcaattataaatattgcgcagaaaagttttaaagttgaaatgccaaggttgttgtaaaaaatcaatttgcgtttggcatgggtttcgtttatcaagtaccacaataaaatggttaaaaacagtttggtgagtatggcaggaacaagttggggatttgcaaacgtgatcacgatattaattgcaaacgaccaaataaaatagggtttgtaaaataaccatatagctccaaaacgctgcatcatggtataaaaacgacttttttttgaaaatatttcctaagaaatgatagaggctaaaattcaggaatttaaaaaattccaaaatccataaattatcgtatttttggcacacaatttagaatggtacatgttagataaattacaaatagtaaagcaacgttttgatgaggttagtgatttaatcatccaaccagatattatttcagatcaaaaacgttatgtggagttaaataaagaatacaaagatttacgtgtgttaatggacaaacgtgagcagtatataacccttaccgagaacttaaaagaagctgaggacattatttctgatggaagcgatcccgaaatggtggacatggccaaaatgcaatatgaggaggccaaagaagggattccgaaattggaagaagaaataaaactccttttaatacccaaagaccctgaagattccaaaaatgccgtagttgagctacgcgcaggaacaggaggagacgaagccagtatatttgcaggcgatttatttagaatgtacaccaaatattgcgaaagcaaaggatggaaagtggatactgtggattttagcgagggaaccaatggtggtttcaaggaaattcagtttgaggtgtctggcgaggatgtttatggcaccttgaaatttgaagcaggtgtgcatcgtgtacagcgtgtgccacaaacagaaacccaaggacgtgtgcatacaagtgctgctactgttatggtgtttcctgaagctgaagagtttgatgtggaaatcaacccaaaagatgtacgaatagattttttctgttcgtctggaccaggaggacagtcggtgaacacaacctactcggctgtgcgattaacacatattcccacaggattggtggctcaatgtcaagaccaaaaatcacagcataaaaacaaagaaaaagcgtttaaggtattgcgctccagattatacgatatcgagctggccaaaaagcaagccgaagatgctgccaaacgtggctctatggtaagttcaggagatagaagcgccaaaattagaacttacaattatcctcaaggacgtgttacagatcatagaattggtttaaccctttacgatttgcaaaatatagtaaatggagacatacagcgtataatagatgagcttcagttggctgagaatacagaaaagttaaaagcaaatacagatattatttaaaacctggcctcttaattgaggctttttttataagatgacaacacagcaactcacagaacaaatcagaaaaaagaaatcctttttgtgtattggattggatgttgatttaaacaagatccctcaacatctattgcaggaagaagaccctatttttgcttttaacaaagccattatagatgccacacatcagttgtgtgtggcttacaaacccaatacggccttttacgaagcttatgggttaaaaggatggaaatctttagagaaaaccattcaatatctcaatgcaaattatccagaaatctttacgatagcagatgccaaaagaggcgacataggaaataccagcagcatgtatgccaaggctttttttgaagatttgggctttgacagtgtcactgtagctccatatatgggcagggattcagttgagccctttttggcttttcatgacaagcacaccattatgttggccttaacgtccaatgcaggcgcattcgattttcaaacgctaaaggtcaataataaagaattgtataaagaagttcttgaggtgtctaagacctataaaaactctaagaacttgatgtatgtggttggagcaaccaaagccacgtttttagcagacattagaaagattgttccagatagttttttgttggtgccaggagttggtgctcaaggtggaaaccttcaggatgtctgtaagtatgggttaaacaaacatgttggcttgcttataaactcttctagaggaatcatttatgcttccaatcaaacggattttgctcaagcagctgcaaacaaagccaatgaacttcaacaggaaatggaagtgattctcgacagtcattcctagaagtgataacgatgtgggaatctttttgtttaattaagagattgatacagaaaaatttaaattttcttggcaatgacaatagtggaccaactaaatagaacaattcaaataatgcatatcccaaaacggattgtgtctttggtgccatcccaaaccgaattgttatgcgatttaggtttggagccttcccttgtaggcattacaaaattctgtgtgcatccaaaacacttactctccaacaagcaggttgttggaggtaccaaacaggtgcatttcgataagataaaagcgcttcagccagatatcattctttgcaacaaggaagagaatacccaagaaatgatagaggttttggagaccatagctcccgttcatattagcgacatttatacccttgaagattgtttggaattgatacacatgtatggcaacttgtttacagtggaagataaagcagggaaactagttgcaaccataaaacaggaacgactaaaattccaggaggatatcaagggcttagctccattaaaaactgtttattttatttggaaacatccatggatggtagccgcaaaccacacctttatcaataacttgatgcaggaagctttatttgaaaacctgtttcaaaacttagagaggtatccagagattgatttggataaagatatcgatgggcaggttgaagttatcatgctttcaacagagccatttccgtttaaagattcgcatgtaacagatatgaaaaacaagtttccccaggcaaaggtgttattggtagatggcgaattgttttcttggtatggttctagattggcaaaatcttttgaatattttaaagcgctaaggtttgaatctttaaaaggataaagacttttagcacttaaaaaaaacaagtaattacaacaagcgttgtttggcaggttccctgtttagatactttaacctgttcagtttgtttaacaacttgatggctttaaattccgaaatgtcgctcaaggcactatccgtttcgcgtaggttgtaagcctgctcaattagttgtttgtaacgattctgtaacttgatttggttttgtttgattttgtttaaattttccattgctcacacctttgaataataaatatatttaaaattatagaattcagcaagttaacaatgtgttaattgtgtgttttgttaataaaaaaaatcgattcaagtagaatcgatttcatttaaataactaactaacttaattcaaattctccacaagacgcgtgaaattttcttttttgaaataaaatcaatacaaagatggtgttttttacgaggttttatgttagctaaatgtcaataaaacttaaagtttaaattaatgcgataatgccgattaatcctgaagggcaaaaacctgtttcagtaaattggtggtcctggaagtgtatttggttctaatctctttttcttccacggcaatcattttgtagaccccttttaaggcttcttgagtcacataatcggttaaatctgggtttacattggatgtaaatggaacagcgttgtacttattgattaaattggaccagatttgatcggctcccactttttgaaacgatgcgtttataaccggatggaactcggtatataacgctgcttctgttttgcctgccaaatagcgtgtagcagcatcgtcatttcccaatagaatggttttggcatcggcaaaggtgatgtcttttacagcgtttacaaaaataggggtagcagtggctacggcatcttcggctgcacgattcaagactttcaagccttcatctgccaaggatcccagtccaatatctcgaagggtcttgtctactttttgcaactcttccgggagtagaattttcactaagtcgtttttataaaacccatctgtttgggtaagtttgcttacttgtttttctatgccttgatccaaggctgcgcgtaagccagctgcaatttcggtattgctgatggttgaggtgctttccggtaattggttgacagcctcttgtaattcggcacaagagagcaaagtcatacatactaataaaacagtacattttttaatcatgatatattttttttggcaaatataccatgattgattctaaaatcccttaaaagattataaactcaaactaatatggtggttttattgaataatgcttaaatttgtgccactaaaaaaataagattttatatgaagcctatagcaccttataaacccaaacataaagtacgaattgtaactgcagcctctttatttgatggtcatgatgcctctataaacatcatgcgacgcataatacaggcaacaggtgtggaagtgattcatttgggacatgacagaagtgttgatgaagttgtaaacactgccatacaagaggatgccaatgccatttgtttgacgtcttaccaaggaggacataatgagtattttaaatacatgtacgatttgttgaaggaaaaaggtgctgagcacatcaagatttttggtggtggtggaggtgttattttaccatcggaaatcaaagagttgatggattatgggattgccaggatttattccccagacgatggcagggaaatgggtttgcaaggcatgattaatgacttggttgcccaatccgatttcgcagtaggcgatcacttaaacgtgacgatagaggagcttcaaaagaaaaaccccaaagccatagcccgtgttatatcttcggcagaaaacttccctgaggttgccaagggcactttggaacagatacatgacaagaataagaactccaagacacccgtattgggcattacaggaacaggtggtgctggaaaatcgtctttggtagatgaattggtgagacgttttttaatcgattttcctgagaaaacggttggtttaatttctgtggatccctccaaacgtaaaacaggaggcgcactattgggagataggattcgcatgaacgccataaacaaccctagggtttatatgcgtagtttggctaccagacaatccaatttagccttgtccaaatacgttcatgaagccgtggaggtattgaaagcagctgcgtacgatttgattattttagagacttcaggtatcgggcaaagtgacacggaaattatagagcatagtgatgtttccttatatgtaatgactccggagtttggtgcagccacccaattggaaaagattgacatgctggattttgccgatttggtagccatcaacaagtttgataaacgtggggctttggacgctttacgcgacgtgaagaaacaatatatgcgtaaccatcaattgtgggaagtgaatcaggacgaactaccggtttttggaaccattgcttcgcaattcaatgatcctggaatgaatacgctttataaagcagtcatggataccttggtggcaaaggctgatgccgatttaaaatcgacctttcatatttccgatgaaatgagcgaaaaggtattcgtgattccaccttcaagaacacgctatctgtctgaaatagctgaaaacaatcgtaattacgataaaaaagcgttggagcaagtggaagtagctcaaaagttgtatgggatttataaaaccatagaatctgtttccaatgtcattggaaatgaagcgaagcaatcttttcttgacaagaatgggttgaatagtaatgggatccttcgctacgctcaggatgacagtgacaaagactttttgagcttattgcttaaagaatttgaccgtgtgaaattggatctagatccttacaactgggaagtgataactggttgggatgataaagtgaacaaatacaaaaatcctatttactcatttaaagtaagggataaagaaataaaaattgaaacccatacggaatccctgtcccatacacaaattccaaaagtggctttgccaaaataccaagcttggggagatattttaaaatggtgtttgcaagaaaatgtaccaggggaatttccatatgcttcaggcttgtatccatttaagagaacaggcgaagatccagctagaatgtttgctggcgaaggaggtccagagcgtaccaacaaacggtttcattatgtgagtcaaggcatgcctgccaagcgtttgtctacagcttttgatagcgttaccttatacggaaacgatccggatctgcgaccagatatttacggaaagataggaaatgcaggagtgtccatttgctgtttggacgatgccaaaaaactgtattcaggctttaatttagcagatgtgatgacctctgttagtatgaccattaatggtccagcacctatgttattgggcttttttatgaatgcagccatagaccaacaatgtgagctttacatcaaagagcatggattggaacaggaggttgaagcaaaaattgcagccttatacaaggaaaagggaacagaaagacccaagtatcatggaaaactaccggaagggaacgatggcttgggcttgatgcttttgggggttacaggagatcaagtgcttccagagcaagtatatcaagagatcaaaaccaaaaccatagcacaggtaagaggaacggttcaagcagatatattaaaagaagaccaggcgcaaaacacctgtatattctctacggaatttgcattgcgtttaatgggtgacgttcaggaatattttatagaacataacgtgcgtaacttctattcggtttctatttcaggatatcatatagccgaagcaggagccaacccaatcacgcaattggctttaaccttatccaatgggtttacctatgtggagtattatttaagtagagggatggacatcaataagtttggtccaaacctatccttctttttctccaatggtattgatccggagtatgctgttataggacgagttgccaggaaaatttgggccaaggccatgaaatataaatatggtgccaatgagcgtgctcaaatgcttaaatatcatatccagacatcaggacgtagcttgcatgcccaagaaattgactttaacgatattcgtaccacgctacaggccttatatgcgatatacgataattgcaactccttgcacaccaatgcctatgatgaagccattaccacgccaaccgaagaatctgtgagacgtgccatggccattcaattgattatcaataaagagttaggtttggctaagaacgaaaatccattacagggctctttcatcatagaggagttgaccgatttggtagaggaagccgtattgatggaatttgatagaattaccgaacgtggaggggttttaggtgctatggaaactatgtaccaacgcagtaaaatacaggaagagagtttgtattacgaaaccttgaaacacaatggtgagtttccgattattggtgtgaacacgtttttgagttcgaaagggtctccaacggtattgcctgcagaggttattagagctaccgaagaagaaaagcagttacaaattaaaaccttggagaatttgcataaaacctatgatacaaaggccttgttgaaagaccttcagcaaaaagcgattcataacgaaaacatttttgaagctttaatggatgtgtgtaaggtatgttcgttaggagaaattactacagctttatttgaggttggaggccaatacagacgcaatatgtaagagaagtaacataattattatatgaaagtcccgggaagtttcctgggattttttttggagcatctgtaagtaaaagtcgacataaagtcgacatatactcggtacatatacggtttatatttgtaataaaatagatgtaaatttggtatatacttgatgtatttatttgatttttaaggattttgtattaactttataagactaaacaatatatattatggcaacgtatcgaggtattatatttattaaagggactataggtggtattaatttttacgatcgtttgggcaaacctacgctaagggaaggaggaggaggttttaccagagaagctattaaaaatagtccgaggatggttcgggttcgtgaaaacaatgatgaattttctgaagcttcacggaccaataaatattttaagcgttccataaggccttttacaatagggtataaagatggtaccttgcatagtaggttgatgcaattgtttacaaggatcaaggatgcggatctggtttccaagcgaggtgagcgtcaggtatcattaggcatggcaaccgatacagggaaacacttgttgacgcattttgtgtttacacccaaacggcccaatttatttccctgtaactatgaatttgattggaacagcttgactttacatgttactggatttcaggcagctcatgccggttttccaaaagaggcctcttatatggaagtgcttttgggattgatacgttttgattttgaaaccaaaagctatacgcaggtgatagaagctcctttgatcctagaacgggattatatgggagatgcttttagtatacctgtgtctgcactgccaagtggtactggaacagtgtttgccatagctcgtgtggcgttttaccaaatggtaaatggcgaaggctatatgttgtctggaggacatgcttttggggtccaggttgttgggatttaggtgttttatttaatttgttaaattgagaggtatctctatttaattgggcagttctttttatttaaaagagctgtttttttttatgagaatggctttttaggacagctcacgagctttaagggatagctcacgagctttaagaggatagctttcgagctttaatagggcagctcacgagctttaagcggacagctcacgagctttaagcggacagctcacgagctgtccgtacggggaatttaaataaaatttgtgaatcatttttaaatatctgattttgaaaggcattatataaaaattttaaaagggtgagatatttgggcatgttctcgagctttaagagggcagctctcgagctttaggggatatctttcgagctttaggggatagctcacgagctttaaaggacagctctcgagctttaaaggacagctctcgagctttaaaggacagctctcgagctgtccgtacgtgggggagcataaaaaaagtcccaccgaagcaggactaaagattttcatctacggcatatagtacttcgacaagctcagtacaagccttattgtgataagattaaagattagaaattttaatctgaatcaaatatactaaaataaaattaagatttcaatgaggtttcccgtaatataaaatatgaagttttttgtaacttgaagacttataaaatttaaagattatgagtaaggttttaggtcttgatttaggtacaaattcaattgggtgggcattattagacctgcgcgatgaagaaaataaacttgaaggtaaaggagtacttattttttctgaaggagttaagaaggagaaaggacaagaaaaatcaaaagctgccgaacgaacaggttttagaagtgctagaagaataaaattcagaagaaaaatcaggaaataccaaacgcttttagtgttggcgaagcacgatatgtgtcctttaacgattgaagaagtaaaagaatggagaaaatctaattttaagaaatatccggctaaaccagagtttttagagtggttaagaacagatgaagaacaaaatatcaatccttattattacagagataaagccagtcgagaaaaaataagcaaatacaatttgggtagagctttgtatcacatcgcacaacgtaggggctttttaagtaatcgtttagaccaatctgatgacaacttaattaaatcgaaaaaagatgaaatacaagacattattaataatactagtcttaacaaagttgatttgattgatgccattgaagctatttttgaaacctatgaatttaaagagaaaaagaaaaaagattgcactaatgcaacagaagaaaagctttggagtatcagaaagtatattctcaatgttatcgagaacaagataaaaggtaaggattattcgaaaaacgaagatgtaagaaaagaaattgacagatatataaacaaacccgaaaatcttggagctgtacaaggtaatatttctgaactaaatacagcaatcagtgaagcaaattgcaaaaccttaggacagtatttttggaaattataccaacaagacagaaatgatgcaaaaaacaaaataagaaataattatacttcacgagaggatcattacttacacgagtttgaagtcatatgtaaaacacagggtttagatagtataaacgaagctaaaaaagacccaagcgaaagatattcaggtatagttaaagaattgtataaagctattttttaccaacgcccattaaaatctcaaaaagggttgataggaaaatgttcgcttgagcctaatagagttagatgtacagtttcccgtcccgaatatgagctatttaggatgtacagttttattaataccattaaactaaaagaaccaacagctgaaaaatttaggtttttaaatagtgaagaaagagaaagtattaaatccaaattctttagaaaatcaaagccaacgttcacttttattgatattaaaaaaacgcttggagaagacaataaatataattacaaagacaattcaacagtaagtggatgtcctactgtttctgctttaatttcagtttttggcgatgattgggaaaatatcatttatgaaaactatacagataaaataatcagaaatttaaaaaacgataagtcagaagaagtaaaatcgaaagaagatgtaacggctgatgtgtggcacgtattatctacatttacttctgatgaaaaattggttgattttgctaaaaataagctgcaattaagccaaaaagatgcagaaaagttttctaaaatccatttgaagaaagattacgcttcattaagtctttatgccatcaaaaaaatacttccatatttagaaaaaggtttgttgtattctcatgcagtttttatggcgaatatggacaaaatcatcaagccggagcgatgggaaaacaatgaagatagagaactgattgaaaaagaggttggcgaaattatcaacaatcatcaagaagaaaacaaaatgttgtttgctgtaaatagtgctttgaaaatttgttttgataatcatcagacctattccaaagaagcagaaacaggctataaagatgatgtggaaaagcagcttaaaaaagaatttggagaaaaaacatgggataataagcctaacaaagaagccttattttcagaagcttttgacatttttatccaacatttgaaagaaagaaaacatcctgccattaaaagaattgatgaaaaggttatggagtttttatcggataatgatttattaattccaaacacttttaataaactgtatcatccttctgatatagaaaaatttcgctcggtaaaattaaaagataaagatggcaatgttattaaaatagatggtaaagaagcgattggtttaggtagtcctgatgtgggttctattaaaaacccaatggctatgaaagccttacatcaactgaaaaagttgataaacactttgatattggaaggacaaattgatgaaaacaccaaagtaaatatcgagttatctcgtcagttaaatgatgccaacaaacgtaaagccattgaaaaatggcaaaacgatagaaaagaactgtttcaagaatatgaaaaaaagattaaagaactctataaaattgaaacaggaaacgagttgaaagaagttaccaatgaagatattgaaaaatttacttatgctttagaacaaagaaaagataaaaaactggtaagcaaagaagatgtcatgaaatacgttttatgggaagagcaaaaccatatttgtatttatacaggaaaaaccattagtttgtcaagctttttaggagcaaacccgcagttcgatattgaacacactctacctagaagccgctcatgggataattcgcaaatgaacaaaacgctctgcgataaaacctataatcaacaaactaaaaaggaaagaatgcccatagaattatctgaaaaggattattcggaaattcttcctagaatacaacattggaaagataaatacgaagcattagctaatgaaattgaaaagaaaaaaagaagcaccagaggagcaacagataaggaacaaaaagataaattaattcagcaacgtcattacttacaaatggagtacaattactggaaaggtaaatatgaccgttttgtaatgaaagaaattaaagaaggttttaaaaacagtcaggcagtagatataggtattatctccaaatatgccacagcctatttaaaatcggtatttaaaaaagtgtattcggtaaaaggcgaaatggtttcggaataccgaaaagcttggggattgcacgatacttttaaagataaatgggggcgaacccaataccaaccaaaagatagaagtaatcacattcaccattgcattgatgcggttaccattgcttgtatgaataaaaataaatacgataagttagctcacgcttggggattggaagataaaggggaatttgacaaagccaaaaaagaattagaaaacgaaaaaccttgggacacttttacgcaagatgttcgcaatttagaaaacgaagtgtttattgtgcatcaaaataaagatgtattgcccatacaaactaaaaagaaatttagaaagagaggtaaggctcaacccaaagtaatttataaaaaagatgaaaatggcaaatatgtttttgatacaaatggcaaaaaaatagttgaaaaatatatttacaaaaaagatgatttaggaaacttaatccctgttaaaggcaaaaaactcaatactgatttaataaaagataaaaaagaaggtgaagattactttaagatagaatctgaaaatggaaccaaattctatgaatatctaaaagataaagaaaataaaattgtttatcaaaaagactatatgattgagcaaggggatggaacgagaggctcgttacacaaacttaactatataggtgtaattgcaaaacctgaacttgaaaatggtaagcctaaaacagaaaacggtgcgtttattttacaaaaagatgatgaaggaaaagtttcaaaattttatgtaaaaagaaatccggtaacgaaagatttttcagaaagtgacgtgaaaaaaatagttgatgaaggaattaagagaagaattgaaaaacatggattaaagaatgttaaaactccagatggcttcatattgctaccagcagaaaaaaaaggattaaacggtagtgaaaaagatttaaaagaaatgctaatcaaaaaaataagactttttgaaaaagataaacctattgaaataaagaaacaaaatgaaattaatttgcaaactgaaaaagcattaagaaaaaaacataaacaccatttttatgcccaaaatgatgaaaattactccatggctatttatgagggttttgacaaaaaaggaaaaccaaaacgtgattttgaattggtcaataacattgatgccggagaatattataaattaagtaataaatcccatcgcgaaaaccacgatttagtgcctaatccacatttaaaatcgagtttgcctttaaaatatatcctgaaaaaaggtatgatggtgttgatgtacgataaagatccagatgagatttgggagttgtcagataatcagaaacttggtcgtttatatgagataacgcaactagatgttgaaaaatacgctgaaattaaattacttcatcatcaagaagcaagagaaaagaaagaaataacaaaatttatgggacttaaaactggaatgaaaggagggaaaaatcttgataattatagaaaatttccatggattaaaattggttatactacttttgattgtattgtagaaaatattgattttaaaattttaccaacaggtaaaatagaaaaaatataaatcttcattttcttgaagataaaaagttctttgacataaactggtcgaactctcttaacagaccaaaatcaaaccacaacgtgagcgaagcgagcgttgtggtttgattaaagattagaaaacacgatattcttttaggaatccatacttttttgccaaaggttgtggtttgattaaagattagaaaacacgatattatcaaaagatacaagattattgtaagtatagttgtggtttgattaaagattagaaaacacgatattaaagaaaaactactcgaactttcaccatcagttgtggtttgattaaagattagaaaacacgatattttggttgatattatatcttccaactactctgttgtggtttgattaaagattagaaaacacgatattagaacttttaggccttgccgaagaagctgggttgtggtttgattaaagattagaaaacacgatatttaggtgatatagtaacagcttcaaagtctggttgtggtttgattaaagattagaaaacacgatattactttattagcatattaattaaaaaatctggttgtggtttgattaaagattagaaaacacgatattctccagcagcagcagagccaacagctgaaggttgtggtttgattaaagattagaaaacacgatattgcagtaataggtcaagtggctaaacattggttgtggtttgattaaagattagaaaacacgatattccccgcttcaaaaacacaagtctacctagggttgtggtttgattaaagattagaaaacacgatattggtccaacaatgcgccagtatttagtagtggttgtggtttgattaaagattagaaaacacgatatttgttttgccattttgcatcaagatattacggttgtggtttgattaaagattagaaaacacgatattggtaatgtcctaaaggcacgcattgctacggttgtggtttgattaaagattagaaaacacgatattggattaagcggtcaacaagcaatgtcggcagttgtggtttgattaaagattagaaaacacgatattcaaaaaagtacgccaaaccaacatgtggggttgtggtttgattaaagattagaaaacacgatattagataacgtaaaaacacacgccacttttcggttgtggtttgattaaagattagaaaacacgatatttcaaggataaccataacgcccagacgcgcgttgtggtttgattaaagattagaaaacacgatatttaaaaaacaacaccgaagtagtagctgctggttgtggtttgattaaagattagaaaacacgatattttcgccattggaaaaaatccccttacaatggttgtggtttgattaaagattagaaaacacgatatttatatccacctggagcagaaggcacagatggttgtggtttgattaaagattagaaaacacgatattagatgtcttgttagatgctgatattcattattttaagtagaaatatcgttataaaaaatgcttcttttttgcagtgataaggcaagattgaggcattttttgatttttaatgtagggacagctctcgagctgtccgtacggtgattttaagtaatttttttgaaatataatttaaaatgatgcttcttttttgcaatgataaggcaagattggagcattttttgatttttaatgaggacagctctcgagctgtccgtacggtgattttaagtaattttttttaaatatt

SEQ ID NO: 890 - DNA, 15055 bp, synthetic construct
  source 1..15055: mol_type = other DNA
  variation 9873..9972: note = n is a, c, g, or t
  variation 7183..7332: note = n is a, c, g, or t
  misc_feature 1..15055: note = Synthetic
tggcgaggatgtttatggcaccttgaaatttgaagcaggtgtgcatcgtgtacagcgtgtgccacaaacagaaacccaaggacgtgtgcatacaagtgctgctactgttatggtgtttcctgaagctgaagagtttgatgtggaaatcaacccaaaagatgtacgaatagattttttctgttcgtctggaccaggaggacagtcggtgaacacaacctactcggctgtgcgattaacacatattcccacaggattggtggctcaatgtcaagaccaaaaatcacagcataaaaacaaagaaaaagcgtttaaggtattgcgctccagattatacgatatcgagctggccaaaaagcaagccgaagatgctgccaaacgtggctctatggtaagttcaggagatagaagcgccaaaattagaacttacaattatcctcaaggacgtgttacagatcatagaattggtttaaccctttacgatttgcaaaatatagtaaatggagacatacagcgtataatagatgagcttcagttggctgagaatacagaaaagttaaaagcaaatacagatattatttaaaacctggcctcttaattgaggctttttttataagatgacaacacagcaactcacagaacaaatcagaaaaaagaaatcctttttgtgtattggattggatgttgatttaaacaagatccctcaacatctattgcaggaagaagaccctatttttgcttttaacaaagccattatagatgccacacatcagttgtgtgtggcttacaaacccaatacggccttttacgaagcttatgggttaaaaggatggaaatctttagagaaaaccattcaatatctcaatgcaaattatccagaaatctttacgatagcagatgccaaaagaggcgacataggaaataccagcagcatgtatgccaaggctttttttgaagatttgggctttgacagtgtcactgtagctccatatatgggcagggattcagttgagccctttttggcttttcatgacaagcacaccattatgttggccttaacgtccaatgcaggcgcattcgattttcaaacgctaaaggtcaataataaagaattgtataaagaagttcttgaggtgtctaagacctataaaaactctaagaacttgatgtatgtggttggagcaaccaaagccacgtttttagcagacattagaaagattgttccagatagttttttgttggtgccaggagttggtgctcaaggtggaaaccttcaggatgtctgtaagtatgggttaaacaaacatgttggcttgcttataaactcttctagaggaatcatttatccttccaatcaaacggattttgctcaagcagctgcaaacaaagccaatgaacttcaacaggaaatggaagtgattctcgacagtcattcctagaagtgataacgatgtgggaatctttttgtttaattaagagattgatacagaaaaatttaaattttcttggcaatgacaatagtggaccaactaaatagaacaattcaaataatgcatatcccaaaacggattgtgtctttggtgccatcccaaaccgaattgttatgcgatttaggtttggagccttcccttgtaggcattacaaaattctgtgtgcatccaaaacacttactctccaacaagcaggttgttggaggtaccaaacaggtgcatttcgataagataaaagcgcttcagccagatatcattctttgcaacaaggaagagaatacccaagaaatgatagaggttttggagaccatagctcccgttcatattagcgacatttatacccttgaagattgtttggaattgatacacatgtatggcaacttgtttacagtggaagataaagcagggaaactagttgcaaccataaaacaggaacgactaaaattccaggaggatatcaagggcttagctccattaaaaactgtttattttatttggaaacatccatggatggtagccgcaaaccacacctttatcaataacttgatgcaggaagctttatttgaaaacctgtttcaaaacttagagaggtatccagagattgatttggataaagatatcgatgggcaggttgaagttatcatgctttcaacagagccatttccgtttaaagattcgcatgtaacagatatgaaaaacaagtttccccaggcaaaggtgttattggtagatggcgaattgttttcttggtatggttctagattggcaaaatcttttgaatattttaaagcgctaaggtttgaatctttaaaaggataaagacttttagcacttaaaaaaaacaagtaattacaacaagcgttgtttggcaggttccctgtttagatactttaacctgttcagtttgtttaacaacttgatggctttaaattccgaaatgtcgctcaaggcactatccgtttcgcgtaggttgtaagcctgctcaattagttgtttgtaacgattctgtaacttgatttggttttgtttgattttgtttaaattttccattgctcacacctttgaataataaatatatttaaaattatagaattcagcaagttaacaatgtgttaattgtgtgttttgttaataaaaaaaatcgattcaagtagaatcgatttcatttaaataactaactaacttaattcaaattctccacaagacgcgtgaaattttcttttttgaaataaaatcaatacaaagatggtgttttttacgaggttttatgttagctaaatgtcaataaaacttaaagtttaaattaatgcgataatgccgattaatcctgaagggcaaaaacctgtttcagtaaattggtggtcctggaagtgtatttggttctaatctctttttcttccacggcaatcattttgtagaccccttttaaggcttcttgagtcacataatcggttaaatctgggtttacattggatgtaaatggaacagcgttgtacttattgattaaattggaccagatttgatcggctcccactttttgaaacgatgcgtttataaccggatggaactcggtatataacgctgcttctgttttgcctgccaaatagcgtgtagcagcatcgtcatttcccaatagaatggttttggcatcggcaaaggtgatgtcttttacagcgtttacaaaaataggggtagcagtggctacggcatcttcggctgcacgattcaagactttcaagccttcatctgccaaggatcccagtccaatatctcgaagggtcttgtctactttttgcaactcttccgggagtagaattttcactaagtcgtttttataaaacccatctgtttgggtaagtttgcttacttgtttttctatgccttgatccaaggctgcgcgtaagccagctgcaatttcggtattgctgatggttgaggtgctttccggtaattggttgacagcctcttgtaattcggcacaagagagcaaagtcatacatactaataaaacagtacattttttaatcatgatatattttttttggcaaatataccatgattgattctaaaatcccttaaaagattataaactcaaactaatatggtggttttattgaataatgcttaaatttgtgccactaaaaaaataagattttatatgaagcctatagcaccttataaacccaaacataaagtacgaattgtaactgcagcctctttatttgatggtcatgatgcctctataaacatcatgcgacgcataatacaggcaacaggtgtggaagtgattcatttgggacatgacagaagtgttgatgaagttgtaaacactgccatacaagaggatgccaatgccatttgtttgacgtcttaccaaggaggacataatgagtattttaaatacatgtacgatttgttgaaggaaaaaggtgctgagcacatcaagatttttggtggtggtggaggtgttattttaccatcggaaatcaaagagttgatggattatgggattgccaggatttattccccagacgatggcagggaaatgggtttgcaaggcatgattaatgacttggttgcccaatccgatttcgcagtaggcgatcacttaaacgtgacgatagaggagcttcaaaagaaaaaccccaaagccatagcccgtgttatatcttcggcagaaaacttccctgaggttgccaagggcactttggaacagatacatgacaagaataagaactccaagacacccgtattgggcattacaggaacaggtggtgctggaaaatcgtctttggtagatgaattggtgagacgttttttaatcgattttcctgagaaaacggttggtttaatttctgtggatccctccaaacgtaaaacaggaggcgcactattgggagataggattcgcatgaacgccataaacaaccctagggtttatatgcgtagtttggctaccagacaatccaatttagccttgtccaaatacgttcatgaagccgtggaggtattgaaagcagctgcgtacgatttgattattttagagacttcaggtatcgggcaaagtgacacggaaattatagagcatagtgatgtttccttatatgtaatgactccggagtttggtgcagccacccaattggaaaagattgacatgctggattttgccgatttggtagccatcaacaagtttgataaacgtggggctttggacgctttacgcgacgtgaagaaacaatatatgcgtaaccatcaattgtgggaagtgaatcaggacgaactaccggtttttggaaccattgcttcgcaattcaatgatcctggaatgaatacgctttataaagcagtcatggataccttggtggcaaaggctgatgccgatttaaaatcgacctttcatatttccgatgaaatgagcgaaaaggtattcgtgattccaccttcaagaacacgctatctgtctgaaatagctgaaaacaatcgtaattacgataaaaaagcgttggagcaagtggaagtagctcaaaagttgtatgggatttataaaaccatagaatctgtttccaatgtcattggaaatgaagcgaagcaatcttttcttgacaagaatgggttgaatagtaatgggatccttcgctacgctcaggatgacagtgacaaagactttttgagcttattgcttaaagaatttgaccgtgtgaaattggatctagatccttacaactgggaagtgataactggttgggatgataaagtgaacaaatacaaaaatcctatttactcatttaaagtaagggataaagaaataaaaattgaaacccatacggaatccctgtcccatacacaaattccaaaagtggctttgccaaaataccaagcttggggagatattttaaaatggtgtttgcaagaaaatgtaccaggggaatttccatatgcttcaggcttgtatccatttaagagaacaggcgaagatccagctagaatgtttgctggcgaaggaggtccagagcgtaccaacaaacggtttcattatgtgagtcaaggcatgcctgccaagcgtttgtctacagcttttgatagcgttaccttatacggaaacgatccggatctgcgaccagatatttacggaaagataggaaatgcaggagtgtccatttgctgtttggacgatgccaaaaaactgtattcaggctttaatttagcagatgtgatgacctctgttagtatgaccattaatggtccagcacctatgttattgggcttttttatgaatgcagccatagaccaacaatgtgagctttacatcaaagagcatggattggaacaggaggttgaagcaaaaattgcagccttatacaaggaaaagggaacagaaagacccaagtatcatggaaaactaccggaagggaacgatggcttgggcttgatgcttttgggggttacaggagatcaagtgcttccagagcaagtatatcaagagatcaaaaccaaaaccatagcacaggtaagaggaacggttcaagcagatatattaaaagaagaccaggcgcaaaacacctgtatattctctacggaatttgcattgcgtttaatgggtgacgttcaggaatattttatagaacataacgtgcgtaacttctattcggtttctatttcaggatatcatatagccgaagcaggagccaacccaatcacgcaattggctttaaccttatccaatgggtttacctatgtggagtattatttaagtagagggatggacatcaataagtttggtccaaacctatccttctttttctccaatggtattgatccggagtatgctgttataggacgagttgccaggaaaatttgggccaaggccatgaaatataaatatggtgccaatgagcgtgctcaaatgcttaaatatcatatccagacatcaggacgtagcttgcatgcccaagaaattgactttaacgatattcgtaccacgctacaggccttatatgcgatatacgataattgcaactccttgcacaccaatgcctatgatgaagccattaccacgccaaccgaagaatctgtgagacgtgccatggccattcaattgattatcaataaagagttaggtttggctaagaacgaaaatccattacagggctctttcatcatagaggagttgaccgatttggtagaggaagccgtattgatggaatttgatagaattaccgaacgtggaggggttttaggtgctatggaaactatgtaccaacgcagtaaaatacaggaagagagtttgtattacgaaaccttgaaacacaatggtgagtttccgattattggtgtgaacacgtttttgagttcgaaagggtctccaacggtattgcctgcagaggttattagagctaccgaagaagaaaagcagttacaaattaaaaccttggagaatttgcataaaacctatgatacaaaggccttgttgaaagaccttcagcaaaaagcgattcataacgaaaacatttttgaagctttaatggatgtgtgtaaggtatgttcgttaggagaaattactacagctttatttgaggttggaggccaatacagacgcaatatgtaagagaagtaacataattattatatgaaagtcccgggaagtttcctgggattttttttggagcatctgtaagtaaaagtcgacataaagtcgnnnnnnnnnnnnnnnnnnnnnnnnnnnnnnnnnnnnnnnnnnnnnnnnnnnnnnnnnnnnnnnnnnnnnnnnnnnnnnnnnnnnnnnnnnnnnnnnnnnnnnnnnnnnnnnnnnnnnnnnnnnnnnnnnnnnnnnnnnnnnnnnnnnnnnctatacttgatgtatttatttgatttttaaggattttgtattaactttataagactaaacaatatatattatggcaacgtatcgaggtattatatttattaaagggactataggtggtattaatttttacgatcgtttgggcaaacctacgctaagggaaggaggaggaggttttaccagagaagctattaaaaatagtccgaggatggttcgggttcgtgaaaacaatgatgaattttctgaagcttcacggaccaataaatattttaagcgttccataaggccttttacaatagggtataaagatggtaccttgcatagtaggttgatgcaattgtttacaaggatcaaggatgcggatctggtttccaagcgaggtgagcgtcaggtatcattaggcatggcaaccgatacagggaaacacttgttgacgcattttgtgtttacacccaaacggcccaatttatttccctgtaactatgaatttgattggaacagcttgactttacatgttactggatttcaggcagctcatgccggttttccaaaagaggcctcttatatggaagtgcttttgggattgatacgttttgattttgaaaccaaaagctatacgcaggtgatagaagctcctttgatcctagaacgggattatatgggagatgcttttagtatacctgtgtctgcactgccaagtggtactggaacagtgtttgccatagctcgtgtggcgttttaccaaatggtaaatggcgaaggctatatgttgtctggaggacatgcttttggggtccaggttgttgggatttaggtgttttatttaatttgttaaattgagaggtatctctatttaattgggcagttctttttatttaaaagagctgtttttttttatgagaatggctttttaggacagctcacgagctttaagggatagctcacgagctttaagaggatagctttcgagctttaatagggcagctcacgagctttaagcggacagctcacgagctttaagcggacagctcacgagctgtccgtacggggaatttaaataaaatttgtgaatcatttttaaatatctgattttgaaaggcattatataaaaattttaaaagggtgagatatttgggcatgttctcgagctttaagagggcagctctcgagctttaggggatatctttcgagctttaggggatagctcacgagctttaaaggacagctctcgagctttaaaggacagctctcgagctttaaaggacagctctcgagctgtccgtacgtgggggagcataaaaaaagtcccaccgaagcaggactaaagattttcatctacggcatatagtacttcgacaagctcagtacaagccttattgtgataagattaaagattagaaattttaatctgaatcaaatatactaaaataaaattaagatttcaatgaggtttcccgtaatataaaatatgaagttttttgtaacttgaagacttataaaatttaaagattatgagtaaggttttaggtcttgatttaggtacaaattcaattgggtgggcattattagacctgcgcgatgaagaaaataaacttgaaggtaaaggagtacttattttttctgaaggagttaagaaggagaaaggacaagaaaaatcaaaagctgccgaacgaacaggttttagaagtgctagaagaataaaattcagaagaaaaatcaggaaataccaaacgcttttagtgttggcgaagcacgatatgtgtcctttaacgattgaagaagtaaaagaatggagaaaatctaattttaagaaatatccggctaaaccagagtttttagagtggttaagaacagatgaagaacaaaatatcaatccttattattacagagataaagccagtcgagaaaaaataagcaaatacaatttgggtagagctttgtatcacatcgcacaacgtaggggctttttaagtaatcgtttagaccaatctgatgacaacttaattaaatcgaaaaaagatgaaatacaagacattattaataatactagtcttaacaaagttgatttgattgatgccattgaagctatttttgaaacctatgaatttaaagagaaaaagaaaaaagattgcactaatgcaacagaagaaaagctttggagtatcagaaagtatattctcaatgttatcgagaacaagataaaaggtaaggattattcgaaaaacgaagatgtaagaaaagaaattgacagatatataaacaaacccgaaaatcttggagctgtacaaggtaatatttctgaactaaatacagcaatcagtgaagcaaattgcaaaaccttaggacagtatttttggaaattataccaacaagacagaaatgatgcaaaaaacaaaataagaaataattatacttcacgagaggatcattacttacacgagtttgaagtcatatgtaaaacacagggtttagatagtataaacgaagctaaaaaagacccaagcgaaagatattcaggtatagttaaagaattgtataaagctnnnnnnnnnnnnnnnnnnnnnnnnnnnnnnnnnnnnnnnnnnnnnnnnnnnnnnnnnnnnnnnnnnnnnnnnnnnnnnnnnnnnnnnnnnnnnnnnnnnnttcccgtcccgaatatgagctatttaggatgtacagttttattaataccattaaactaaaagaaccaacagctgaaaaatttaggtttttaaatagtgaagaaagagaaagtattaaatccaaattctttagaaaatcaaagccaacgttcacttttattgatattaaaaaaacgcttggagaagacaataaatataattacaaagacaattcaacagtaagtggatgtcctactgtttctgctttaatttcagtttttggcgatgattgggaaaatatcatttatgaaaactatacagataaaataatcagaaatttaaaaaacgataagtcagaagaagtaaaatcgaaagaagatgtaacggctgatgtgtggcacgtattatctacatttacttctgatgaaaaattggttgattttgctaaaaataagctgcaattaagccaaaaagatgcagaaaagttttctaaaatccatttgaagaaagattacgcttcattaagtctttatgccatcaaaaaaatacttccatatttagaaaaaggtttgttgtattctcatgcagtttttatggcgaatatggacaaaatcatcaagccggagcgatgggaaaacaatgaagatagagaactgattgaaaaagaggttggcgaaattatcaacaatcatcaagaagaaaacaaaatgttgtttgctgtaaatagtgctttgaaaatttgttttgataatcatcagacctattccaaagaagcagaaacaggctataaagatgatgtggaaaagcagcttaaaaaagaatttggagaaaaaacatgggataataagcctaacaaagaagccttattttcagaagcttttgacatttttatccaacatttgaaagaaagaaaacatcctgccattaaaagaattgatgaaaaggttatggagtttttatcggataatgatttattaattccaaacacttttaataaactgtatcatccttctgatatagaaaaatttcgctcggtaaaattaaaagataaagatggcaatgttattaaaatagatggtaaagaagcgattggtttaggtagtcctgatgtgggttctattaaaaacccaatggctatgaaagccttacatcaactgaaaaagttgataaacactttgatattggaaggacaaattgatgaaaacaccaaagtaaatatcgagttatctcgtcagttaaatgatgccaacaaacgtaaagccattgaaaaatggcaaaacgatagaaaagaactgtttcaagaatatgaaaaaaagattaaagaactctataaaattgaaacaggaaacgagttgaaagaagttaccaatgaagatattgaaaaatttacttatgctttagaacaaagaaaagataaaaaactggtaagcaaagaagatgtcatgaaatacgttttatgggaagagcaaaaccatatttgtatttatacaggaaaaaccattagtttgtcaagctttttaggagcaaacccgcagttcgatattgaacacactctacctagaagccgctcatgggataattcgcaaatgaacaaaacgctctgcgataaaacctataatcaacaaactaaaaaggaaagaatgcccatagaattatctgaaaaggattattcggaaattcttcctagaatacaacattggaaagataaatacgaagcattagctaatgaaattgaaaagaaaaaaagaagcaccagaggagcaacagataaggaacaaaaagataaattaattcagcaacgtcattacttacaaatggagtacaattactggaaaggtaaatatgaccgttttgtaatgaaagaaattaaagaaggttttaaaaacagtcaggcagtagatataggtattatctccaaatatgccacagcctatttaaaatcggtatttaaaaaagtgtattcggtaaaaggcgaaatggtttcggaataccgaaaagcttggggattgcacgatacttttaaagataaatgggggcgaacccaataccaaccaaaagatagaagtaatcacattcaccattgcattgatgcggttaccattgcttgtatgaataaaaataaatacgataagttagctcacgcttggggattggaagataaaggggaatttgacaaagccaaaaaagaattagaaaacgaaaaaccttgggacacttttacgcaagatgttcgcaatttagaaaacgaagtgtttattgtgcatcaaaataaagatgtattgcccatacaaactaaaaagaaatttagaaagagaggtaaggctcaacccaaagtaatttataaaaaagatgaaaatggcaaatatgtttttgatacaaatggcaaaaaaatagttgaaaaatatatttacaaaaaagatgatttaggaaacttaatccctgttaaaggcaaaaaactcaatactgatttaataaaagataaaaaagaaggtgaagattactttaagatagaatctgaaaatggaaccaaattctatgaatatctaaaagataaagaaaataaaattgtttatcaaaaagactatatgattgagcaaggggatggaacgagaggctcgttacacaaacttaactatataggtgtaattgcaaaacctgaacttgaaaatggtaagcctaaaacagaaaacggtgcgtttattttacaaaaagatgatgaaggaaaagtttcaaaattttatgtaaaaagaaatccggtaacgaaagatttttcagaaagtgacgtgaaaaaaatagttgatgaaggaattaagagaagaattgaaaaacatggattaaagaatgttaaaactccagatggcttcatattgctaccagcagaaaaaaaaggattaaacggtagtgaaaaagatttaaaagaaatgctaatcaaaaaaataagactttttgaaaaagataaacctattgaaataaagaaacaaaatgaaattaatttgcaaactgaaaaagcattaagaaaaaaacataaacaccatttttatgcccaaaatgatgaaaattactccatggctatttatgagggttttgacaaaaaaggaaaaccaaaacgtgattttgaattggtcaataacattgatgccggagaatattataaattaagtaataaatcccatcgcgaaaaccacgatttagtgcctaatccacatttaaaatcgagtttgcctttaaaatatatcctgaaaaaaggtatgatggtgttgatgtacgataaagatccagatgagatttgggagttgtcagataatcagaaacttggtcgtttatatgagataacgcaactagatgttgaaaaatacgctgaaattaaattacttcatcatcaagaagcaagagaaaagaaagaaataacaaaatttatgggacttaaaactggaatgaaaggagggaaaaatcttgataattatagaaaatttccatggattaaaattggttatactacttttgattgtattgtagaaaatattgattttaaaattttaccaacaggtaaaatagaaaaaatataaatcttcattttcttgaagataaaaagttctttgacataaactggtcgaactctcttaacagaccaaaatcaaaccacaacgtgagcgaagcgagcgttgtggtttgattaaagattagaaaacacgatattcttttaggaatccatacttttttgccaaaggttgtggtttgattaaagattagaaaacacgatattatcaaaagatacaagattattgtaagtatagttgtggtttgattaaagattagaaaacacgatattaaagaaaaactactcgaactttcaccatcagttgtggtttgattaaagattagaaaacacgatattttggttgatattatatcttccaactactctgttgtggtttgattaaagattagaaaacacgatattagaacttttaggccttgccgaagaagctgggttgtggtttgattaaagattagaaaacacgatatttaggtgatatagtaacagcttcaaagtctggttgtggtttgattaaagattagaaaacacgatattactttattagcatattaattaaaaaatctggttgtggtttgattaaagattagaaaacacgatattctccagcagcagcagagccaacagctgaaggttgtggtttgattaaagattagaaaacacgatattgcagtaataggtcaagtggctaaacattggttgtggtttgattaaagattagaaaacacgatattccccgcttcaaaaacacaagtctacctagggttgtggtttgattaaagattagaaaacacgatattggtccaacaatgcgccagtatttagtagtggttgtggtttgattaaagattagaaaacacgatatttgttttgccattttgcatcaagatattacggttgtggtttgattaaagattagaaaacacgatattggtaatgtcctaaaggcacgcattgctacggttgtggtttgattaaagattagaaaacacgatattggattaagcggtcaacaagcaatgtcggcagttgtggtttgattaaagattagaaaacacgatattcaaaaaagtacgccaaaccaacatgtggggttgtggtttgattaaagattagaaaacacgatattagataacgtaaaaacacacgccacttttcggttgtggtttgattaaagattagaaaacacgatatttcaaggataaccataacgcccagacgcgcgttgtggtttgattaaagattagaaaacacgatatttaaaaaacaacaccgaagtagtagctgctggttgtggtttgattaaagattagaaaacacgatattttcgccattggaaaaaatccccttacaatggttgtggtttgattaaagattagaaaacacgatatttatatccacctggagcagaaggcacagatggttgtggtttgattaaagattagaaaacacgatattagatgtcttgttagatgctgatattcattattttaagtagaaatatcgttataaaaaatgcttcttttttgcagtgataaggcaagattga

SEQ ID NO: 891 - DNA, 23675 bp, synthetic construct
  source 1..23675: mol_type = other DNA
  misc_feature 1..23675: note = Synthetic
ccgaacctatgcaagctgcttctcacttctccaagtaagggaacatagcaatactgcagcaatactagcaaaggctagcagcatgaaagtgacatgccatcctgcattctgcgcaactgtacccataagaagcttagagagtatagcatcaccgaaaagatagccaaacaggccgacaaaacctgccgccgtacctgccgcattcttaggcacaagattgacagcctggatgccaagcatggcgactggaccgtaaatacagaagcccactattataagtgccgagtacacaagcgatttacacaatatcggatagactgcagaccttgcaggaacaaagagagtagcgacattgtctgcctgccaataaagcagagtcccggcaaggaccaaaatcatgaagattacgttaggaggtgtacaacgacctttgaagaagcgggctgacacatatccgcagacgattgtgccgagaatcccggcataattgtgcagtgaaaacgccagattgctctccgccgcggtcatcataccgctttcttgaagatagataggagcccagtcccctaccccataacgtaccatatacacgaaagcattggcaaatgctattatccacagcaggcggttcttgaacacatagtcaacgaaaagggtacggaaaggaatcttcttcgtatcgtcttgtctggaacctactcccgaatagtcatgccggtagtcatttatggatggaaggccacatgactggggagtatcccttataagaagccagcagattgcagcaataaatatcgctactatggcgggcaggataaatgctcctctccatgattctacgacagggacaccgaaagcaacaactgcagtcattccaaggcttgcaagcaggccgagcgatccgcttccgaatgtatgcgaggtattccacactgacatcttgaagcttctctcattctggctgaaccaatgagccatgattcttccgcaaggaggccaacccataccagagagccatcctactataagcatcaggaagaagaccgttgctacattaaatgccatggatgaagcactatatgggaagactcccgcaacaatcatcgccaaagaagaaagcaaaagtccgacacacaagaacttgcgcgcatcagagcgatcagatatgcttcccatgatgaacttactgaaagcatacgcaatcgagactgcagacatggcgataccgataccagccttatccagaaggccctcatcgatcatgccaggagcagcaagcgagagatttttcctcacaagataatatcccgcatacccgagaaaagcgccaaggaataccttaaggcgcatactgctatatactttctttaccttgctctcctctacaggagccttaggtgccggaggatcaaagaaacgtgccataaacttacgatatgtaagcaaatttagcatttctttcttcattccgcaagtcaaaaggaagaacaagaaaacataataaatgaaaaatcgccgcaactcaatgagttacagcgatttcggtgaccccaataggattcaaacctataaccttttgatccgtagtcaaatgctctattcagttaagctatggggccataagggataaaccctctatattactttgcagcaggagctggagtctgagttgcaccttcctcttttaggaatacaagcttcttctccttaatccttgccttcttaccggagagattccttaggtagaaaattcttgccctacgaaccttgccgactttgttgagttctatcgagtcaataaaaggtgactgaaatgggaaaatcctctcaaccccaacaccacttgcgatcttacgcactgtgaaagtctttgtgtaaggtgtagcaccgcttatctgtatgactacgcctctgaacttctggagtctttctttgtctccctctttgatcctgtaggtaactgtgattgtatcaccacccttgaacttaggatatgtagcgactttctcgttagcaaaagcctgatctacgattttgatcaattccatctctaaaactaaattagcgcaacattactacaaaatacaacgatcgtaagaggttgcctcgttaataggactgcaaatttaccaataaaatcctaaaccgcaaactttttagaaattttctttcatcttatcgaataagtagcggtcctctcgacttggatccggggtaaacgtatcactgtatctgagactttcaagagtctctttctcactactcctgagcttcttaggtatccataccagatactttacatataagtctccgactccggtaccataacctttgacagctggaagtccgcggcctttcagacgtacgacagttcccgattgggtaccgggatctaccttaaccttatagttcccgtccagacaaggtatcgtcacttcacaaccgagtatggcatccatcactgaaataatcttagtatagtagagattcatcccctctctcttgagttgggaatgaggtatctcctcgatcaccacaagaaggtcgccattgatcccgcctgcttttgccgcatgtccctcgccacgaattgttatctgcatcccgtcttctacacctgcaggaatcttgacttttattgtcgctttcttacggatcactccagttccactgcaggaagggcaaggattggtaacaatctctcctgtgcctccgcaacgggagcatgtcgtatatgtgacagtctgaccgaagatactgttgaccactctctgttcttggccagtgccgtgacatacaggacaaggtttcacatccgaagcattgcgagtccctttgccaccgcaatccggacactgttcgttacggacgattgtaacttccttctcaactccagtagctatctcttccaatgtaagacggacctttgtacggatgtcacggcctctcatgaccggacgagactgtgcagaagcacctctactagagccgaagccaccgaatcctccgaaaccgctgaatcctccgaacgggttgcggccgccgaaaagattattcagcagatcatctaggttgccgaagcccccactaaagtcagggccggcacttccgtcaactcctgcatgtccaaactgatcgtactttgccctcttgtctttgtcgctcaacacactgtaagcctctgaagcctccttgaatttctcttcggccgtcttcttctcggcatcagtgccacttacccacctgtcaggatgccatttcaaggcaagtttcctgtaggcggactttatatcgtcctcagacgcattcttatccactccaaggacttcataataatctcttttctctgccatatctacgactcccttagattccaactacaacctttgcatacctaagaatcttgcctccataggtataaccggtctcaaccacatcaaacacatgccctttcttgtccttgtcagagacagggacctgcgcaactgcctcatgaaattcagtatcgaatttcttacctttcgcttcgataggctccaatcccttggacttaagatacttgagtagcttactgtatatcagccccgtaccttcctttgcggcttcatctgccgaacctcgaagcatatccattgctttctcgcagtcatccaaaaccggaagaaggcctttaatagtatctgcagaggcagtgctttctatctctttcttctgctcatttgtcctattacggaaagtctgaaactctgcaagaagacggatataatcgtccttctcctttgcaagcttcgactccaaagatttcttctcttcttcaagagacttgcatctagccttcaactcctcacacgccttatcatcatgatgggaacacccgcacttgtcagaatggcattcattgtctgaatgttctctctcaccagcagcattaccaccttcatctgaattaaccttttctttctctatcttgttgccgacctttctgctctcttccgagaactctttctccgacttttcgttttgcttttgcatatcttaccaatcttttatatttctttgaaaacagcccgaatacggttgctaatactataagccacaacatggttacagccggtattgcacacttaccgacgttcgccttacacgcaaattgtctgccaaggacagataatgacaatatgtcagtttgtagccttttgccttagcttcttcgttatagccttgcgaaaagcggctgcattgcgcagatgtgcggcatatgtcgcagcaaacaagtgagtcccgtccaaagcagaacttgcacagaaatataggtcacctcccgaggccggattaagaacagcattcatggcatctttgccgggaacacatattggaccgggaggaagccctttgtacttataggtattgtagggagattctacctgaagatgcgacttaagtatgcgatttggctcataatcaaagcaataggcaacagtaggatcagcctgcagcttcattcccctatgaagacggttgagatacacggctgctatctttggatattcggggacatagttggactctcccctcactatgctggcaagaatccccacctgcaacggcgtgaggccctgactactggctttggcaacattatctcgagtccaaaacctatcatactcagctttttgcttatccattatcctcgccatcgaatccgtccaatacatctgatatgtgtcgggcattatgatagcaaatacattctccggattcaccccataggcagagaggaaagccgtatctgatagagcactgaccacggcagctgagtcaacaagcatctgccgacttatctttatggccagagaggctttgcttctaatggagccggacaagacaagattgactggagtctgccagccgaaacgaagcatacgagctgcgtacgcactggtatttgtaccatccaacatataatatccaggatgaagacctgctgtatcttcaaattctcgtctcaagacccgctcaaggctcttgcacgacttgactcccacattctcttctatcgccgcgacaacctgagagagagtcgctccaggatacacatagaagccactttgaccacggaaattagggatataattgtcatacacgtatcttgacgcagatactgccgcaacggcaaatatgaccaagataacaggaacgacaatatgtaagtatttatatttttttcttctcatctttatctgagattaatctcgtcacctggagtcgtcacatagtcggaatggaatgaattgcgcttgcatagatccttgagtttcacgccaaagcgctgtgacaggtctcgcattgtctcaccaccgacatcggagatatatttgtccaatccctttacggcacgggattttttggcctgcacatacaccagagtgcctggtgtcagattggtatcggccttggcatcattgaatcgcagtatttctccaaggaaaagattgtactcgtcagctatggaagcataggtctcaccctcaaccgaatatacgaactgtactccattgttggaataaagttgccgcttcagtgcgaaagagattgtctcacgtgggtcgtcaccggacacctttgtaggttcctctatctgcagaggcggctctggtattgattcagacctattgccatcacttctctcatatttacggccttccctgtgatcccctttactgctttctcttttggattctttacgctcgcgtcttgcagtacgcttatcatcctccttgcggtctccatacgatttgccagtgctctcactatggaaatcttccggcttcatcgcatcgaagcggtaaagtctataatcctctatgacctttatcagtttggaggcataagatgggtcagtggcataaccggccttcttaagaccatgagcccaagccttatagtcagtcactgaattgccaaaaagaggcttgtaccgatctctgtacctgaggaaatccgaatgatcacggaaactctcgtctggcgaggaatagaccctgaagcattcccctcgcctgtcatcatcatagtacatcttgcgccctgtccagtcatggcacttgatgccaaaatgattgttgcctttaacagcaagctctgactggccggctcccgactcgagaagtccctgagcaagggttatacttgccggaactcccgaacggtacatctccctcactgccacatgagcatatttggatatgtatctctcctgcggtgagtcttcttctgcacagaggactaccgctacaaacaacattgcgacagctatcgctgtcttacgtattagattcatttataagcctttgaactcaacattcacttattggataacccggagtgtaccgtatccaaagctatgtcaaacttactaagttacgaagattcaagattatggccaaaatgaatgttttaaccgctcactgggcagagtcaaagtttaacttttctctcggcctggcaatcaactctcggatatgccgcacataaagccgaaacccgaaggaagaacaaaaaaaccgacaaggaaatacccttgccggctctattgtcctaaaatcaggctataacatcatagtaaatctaagtaagcggctacttattttttaacgattactaaacatagaagcctactcaaaagtttagcttaaacttgaattgggaagcggacagccaatatactattaatagttctcagccttgatttcaaagaaactcttcggatgcttgcacacggggcagatctccggagccttcttaccaatgacgatatgaccgcaattggagcattgccagatcatatcctcgtcacgtgagaacacgatgccttccttgatattggcgagaagcttcctgtaacgctcctcatgtgtcttctcgatagcgcctaccttttcaaagaggaaagcgagatcattgaagccctcttccttggcagtcttggcaaactcagcatacatatctgtccactcgtagttctcgcctgcagctgcatcttcaagattgacagttgtctcggggatctccccgccatgaagatacttgaaccatatcttggcatgctctttctcattctttgcagtctcctcgaagagcttgcctatctgtacatatccatctttaatagcttttgcggcatagtaaagatactttgtgtgtgcctgagactcacctgcaaaggcagtcttgagattctgctcagtctttgatccttttaattcgctcatgattgttgtctttaattgttgcgagacttgcgtttcgcgcaaatccgaggccaaatatagagtattttcaggaaaaattatcctatttccattattttatttttaattattccaaataagatattcccatgcccttggcaagccctccttcgctcgtctccttgtacagggacgggatgtcgtggccggtttgtttcatcacctccacgactttgtcaaacgacactctatgccgtccgtccgagaaagaagcatagaggttagagtccaatgcacgggtagcggcaaacgcattcctctcgatacacggtatctggacaaggcctccgactgggtcacaggtcatgccaagatggtgttcgagagccatctcagcagcatactcaatctgggacggacttcctccgaacatctggcaagccgcggctgcagccatcgcacaggcaaccccgacctcaccctgacagccgacgtccgctccggatatggaggcattctgcttgacgacattgcctatgagtccagctgttgccaaggcatggagcatcttgatatcactgaattcatgtcctttacacaagtggtacagcactgcaggcacgacaccgctcgctccgcaggtaggagccgtcacgatcttgcctccggaagcattttcctcactgacagcaagcgcataggcatatacaaggccgcgcgtctggagggaacgcttgtagcccattgccttgacataatatgtaggagccttacggggaagattaagcggaccgggcaatactccttcatggtctatgcctctctcgacagcttgctgcatagtcttccatatttccatcaaatagtcccatatttctttaccttcacattgctctacatattcccaataggtacgccccttctcatcacaccagttctgtatatcagaaagcctgtcgaggtcatatacatcttgagtgtcgaacatatcgcctttggccttgccttcagagagagctccaccgccaatactgtacacggtccactcgccgaccatattgccatccgcatccatcgctttgaatgtcattccattgggatgaaaagggaggaagacagagggcatccataagaattccaccggagcagtcccggaaagttcgtcccttatggatacatccgtcatatgtcccttgcctgtagctgccagactgccataaagggtcacctggaaggactttgcatctgggtacatggaccggaatatctgcgccgcacgcatggggcccatcgtatggctgcttgacggaccgcgtcctatccggtacagttctttcaatgatttcatctgttatttccaattcttggtcacaacatagactgttgctgtcataaattcagagatctgcctgtatgtgtctgaggtatagcattacactccaaaaggcgtctcataagggttaagtagcaccgatagttcaatgcgcacacctaaatgcctgggacaaatgtcatcagacggaaagacatagcctcacggacaaaaaggtcttgcatattcttcccgacaccaactgcgtggccgtcttcgagaactctacggtatccgtacagaacccctttaaggagattttcttccgaaaatccctattcatacaaagataacagttttataaatgcattctaaacgacgacaccagcgtaaatctcggaaatgtctatgaaacggccgtcgtgctcaacaacgagagaaatatccatgaagagaacggaatcctttatatgcctgtctattacatcgccttcctgcttaacgacagggtgtaaatgaggtgttgcattccgcagtccttattggtccaaaattcggatttctcggaaatgggatgactcaaatcttacagccgtataatttaccaccgtaaaaattgcaacctttactctatgtacttattctcaatctcttgcagggtcttatcgtaggcctcgagctctttcttcacggcattgatctctgggatgctgcagtcaaattcgttcagctgccgttctgctcccgcaaagtctgcccgactctcttgaaactcggaaatcacgttcccgattccagaggccgcatgaaatgccattttcaaggcatagcctgcgggatttgtaaggtcttttattgaatccggtacaaatgccttgcctatggtctttatggccttgtccgcaatctgcacatttacaccgaaatgctccttgaagattttttctgcctctccgaccttcatgctggcccttatcttcagcgacccagcctttgagttcagttctgtctttttagacaatttattcaactgtgcaagcgtccaatcaccgtaggcaattgtctgccccttatagacgcgaagcgaaactccaaaatttgcattgaaattcttgaaaggaacgtgcattacaacatactaactataccgtccaagaattaggcaaagcagccaagcataaaagctctcacgtgcggagaatccgatcactagccagggaaagtattacttgcatagaacgctaattcttcgtaccttaacgctcaagataagactcacataagacacataagacattcattaatcagctaaaaaacgaaggcgaagcttgcgccccgccttaaatgttttcacaacggaataatccttattgtgatttgcttcagattgttgcaaatctatgaactttatttgacattgcaaaacaatttttgagatatgaagaaagtattgggacttgacctcggagttggctcaataggatgggctttggtaaatgtagacgagacacacgcacctgtcaatcttcttggcatgggaagccgcattgtcccgctcacgacagacgatgccaaagaatttacgcaaggaaatgctgcatccaagaaccagaaacgaacacagaaaagaacggcaagaaaaggttacgacagatatcaactgagacgtcagcaactgactgacaaattacgttccctcgggatgcttcctgacgagaggctcatcaagcttcccgtacttgagctatgggagctacgtgccaatgcagcgactcccagctacaaactatctctgccagagatcgggcgtgtattgtatcacatcaatcagaaacgaggttaccgtcattcccgagacgaagattctgacaagcagcagagggactatgtagctgccgtcaacaacaggtggaaagaaatccgcgaagaaggaaagactataggccagcattttgccaacaaactgaaagagacagagatcatatcagaaaaaggcaaattctacacctataggattaaagaacaggtatttccgcgaggagcgtacatggaagaattggacaggatcgttgaagcacagaaagtattctggccagatatatttactgacgaaaatgtcgatgagctaagaaaccggatcattttcttccagcgtccgctcaagtcttgcaagcatcttgtatcgctgtgtgattttgaggtacgggactttgtcaagaaaaatcattccggaaatgtaataacagacaggaatggaaaccaatgccacatattggcaggccctaaggttgcgcctaagtcctcaccactatctcaagaaagcaagctttgggaagagatcaacaatatccggataacgaattccaaaaatgacgaattcttcatttcgcaagagaaaaaagtggaaatataccggttcttgtcagaaaatgaagttatgaaagccaacgatctcaagaagattctcggcatttctgccaatgacaaggagtggacaattgataaggctgtcagtaaaggacttactgggaacactactaggacaagattgagaaaagcattgtcacactttaagcgtgaagaccttctgagatttgacatgcaacttaccgattcttcatttgtaaatcccgagacaggggaaatcctacatgagatagacccgaaatgcgagcaggagcctctatacaggctctggcattgcatctattcgattgacaataaggaagatcttgcaaaagcgctggagaatcaattcgggataaccaacaaagaggcaattgacaatctcaacaagattgatttcgtaaaacaaggatacggaagcaaatctgccaaattcatcagaaggattctcccctatcttcagaacggagctatgtacagtgaagcctgcgagattatcggcacgaatcattcgggaagtctgacaaaggcagaaaatgccgcaagacaattgcttcagaggatacctcaattaaacaagaacgaactgcgccagcctgtagtagagaagattcttaaccagatgatcaatgtcgtcaatgccattgcagaaaaattcggaagcattgatgagatacgtatagagatggccagagagctgaaactaagtcaggaagcaagggccactactgcaaaaagtatcagagacagggagaagatcaatctcgaatatgccggcaagatacgggaattcggaattgtcccgtcaaagaacaaaattttaaaatacagactgtgggaagaggctgggcaacgttgcttctactgcggacagactatctcagctcaagaattcctttcaggatttgactctgatatagagcacattatccctaagtcacgcctatttgatgattcgtattccaataaggcatgttcttgcagaaaatgcaattctaccaaaaacaacatgacggcttacgacttcatgaaggcacaaggcgaagacaaattcaaggattattgcgacagagttgccaacgcatataaggaaggaaagatcagtaggactaagcgtgaccgattcatgacgccggcggagaagatccccaaagacttcatatccagacaattggttcagacacaatatatctctaggaaggctatggagatcctcatgcagatctgccatgacgtatatgcctccagcggagatgtgactgcatatctaagaaggatatggggatatgatgagatcctccagcgcctgaacatacctcgctacagagaaggcgggctgacggagatggtcacctacgagcataataatcagcaacataccgaagagcggatcaaaggatggagcaaaaggctcgatcacaggcatcatgccattgacgcactaacgattgcatgtacaaggcaaaacataatccaacggctgaacaatctgaatgctcaagagtcctcaggagaggacaaactgaatctcgacaaatggacaatggcacaggctcatttctctgtaagggaggtttctgatgctgcgagcagaattctgatctcattcaaatccggcaagaaagtagcgaccccgggcaagagatatatctacaggaacggcaaacgtattcttgcccaggagaatatcattgtcccccgtggggctctatccgaggaaagtgtctatggaaagatccggacgatagagaaaggcatcgctatcaacaaactattcgataggcacgaggatatattccaacctttgataaagaaaattatcgaagagaggatcagcgaattcgacggaaacataaaggctgccaaagcctcgctgaagaaacggcctctgtatttggacaaggagaagaccatcgaactgaaatacggcagctgcttcaagtacgaatacgtcataaaatatccactgaatacactcagagccaaagatgtcgagtatatcgtggacgagaatatccgcgagaccgtctcagatcggctaagccagttcaatggaaatgtaaaggaagcattcaaagagccgctctatactgacgggacaagtcccgtcttgatcaagacagtcaggatgttcacagggttagacgctgtcgttcctgtcaggaaagactctgatggtaagaatatcggtttcgtaaagacgggcaacaatcaccatgtcgccatctataaagataaagagggcaaataccaggagcataccgtcaccttctggcatgccgtagagaggaagaaatacgggatcccgataatcatcgaacatccggacgaggtatggcagaaagtgcttgacttggacgcgcctcagtcattcatcgaccagctgccttcgccagattggacatacgtcatgagtatgcagcagaacgagatgttcattctcggcatgggagatgacgagttcaacgatgctatgtcagcaaaggactacagaacattggctcagcacctttacagagtacagaaagtctgcagcaaggactattattttagataccaatatgagacacaactagatgataaagaggccgcattatccatgaagaaattctatagagttacgagtttatcttcgctgcagagtttaaatcctaaaaaagtaagtataaacctattaggcgacatttcactacataatatcatatgataaagagatccctttatttcggcaatcctgcatacctgtccattaagatgagacagcttgtaataaatatccctagggatgaggatagcggtgcgactgaaatggggacagagagatgtgacaaagttctgaagaccatcccgatagaagatatcgggatcattgtgttggacaatccgaggatcaccataacccatgccttgaccgaggctctgttagagaacaattgcgctctgataacatgtgacagcagacacttgccagtcggcctgctattgcctctgtacggcaacaaagttcaagcagagcgatatcaagagcagatcaatgcctccttaccattgaagaaacagctatggcagcagacaatccagacaaagatacggaatcaagcagctgtccttgcttttgtcacaggagagcagcacaagaacatgcttgtgtgggcagactccgtaagaagcggtgactctgacaatctcgaagcaagggctgccgcttattattggaagacagtctttcctgacatagaatctttcatacgaggtaacgaagacatagtaaatatattgctaaattacggatacagtatactgagggctatggtggccagagcacttgtcggagtaggacttattcctacgttgggaatacaccatcataatagatatgatgcttactgtcttgccgatgacataatggagccatacagaccgtatgtagacaaactcgtgagcacaatcataggattatgcccctgcgaattaaacagagagaccaaggctaaactcctcggcattgcgactatggaggtagtcatcgatgctcagcgacgtccgctaatggttgccataagccagactgcatcttcactgagaaaatgtttctcgggcgaaatcaggaaaatcatctatccagtgctctgagatggacagattcagtgaatataggattatgtgggtactggtattcttcgacttgccgaccgatactaaaaaggaacgtaaggaagcggcactcttcagaaagcacctgatagaagatggattcaccatgttccaattctcgatatatatgagacactgcccttctgtcgagaatgcccaagtgcatataaggagagtaaaatcgttcttgccggaccttgggcaggtagggatattgtcaattacggacaaacagttcggcagtatggagcttttctgtgaacataagcccaaagaagccggagaaatcgtgatacagctcgaactgttttgaatcaaaaatatatctttaaaagaaataaaatccggtagttacctaccggattttattttcaagaaacagcttttaagtaattagctaccaatactttacactagttgtgctgttatcttaaatgctaagttaagaaatctgaaagcaaatcacaacccctcctttaagtacatttatgtatctgagctgttatcttaaatgctaagttaagaaatctgaaagcaaatcacaaccatacgtctagcacgcttttctgtacctctgctgttatcttaaatgctaagttaagaaatctgaaagcaaatcacaacgagcttgtagaatctgattttaattataatgctgttatcttaaatgctaagttaagaaatctgaaagcaaatcacaactcttcagcagtatatttgtcagtttgcactagtgactcccctccatactcttgtccaatcactcacattcggtataacgaaatagtcataaattgtataatagtttatcctcattttgtatagtatagctcgaaaaccattcgtattcaatcacttttttgtaattttgcgcatatgacaaaatctgcagaaagatgaaagaatacagacctcggattgccgatagaatgttgagccgcagactaaagggtgtcggtgcggtcttgatacagggacccaaatggtgtggcaagacaacgaccgccgaacaacaggcaaggagtgtcgtgtatatggacgacccggaatacatggatcaaaacattgaattggcaaatttgtcacctcgtaaaattcttgagggggcaacgccgcgcctcattgatgagtggcagcttgctccgcaactgtgggatgctgcaaggtttgaagtcgatcacagagatgatgtcggacagttcatctttaccggttctgccgtgcctgccgacaccgacaagattcaccattccggcacgggcagatttgcctggctcacgatgaggaccatgagcctttttgagtcgggggagtcttcaggtgaagtctgtctgaaagatttgttttccaagtctgattcggagattttcggtacaaatcctctcaatatagattcaattgcctggctgatttgccgaggaggatggcctcgtgccacaacgatagacaaagatgtggcattggacatggcatacaggtattatgaagcagttgtaaacagcgacatttcacgggtagataatgtcagacgtgatgcggagcgtgccaaaagaatcttgcgctctatcgcaaggaaccagtgtgcgcaagtttctgtcaatacaatctgtgcagatgtcgaagacaatgactcaacttccgccaaccgcatcacaatcacctcttatattgatgctctgaagaagatttttgtgctggaggattctccggcgtggaatccgaacttacggagcaaaaccgccataaggagttccaacacccgctatttttccgacccgtctattggcgttgctgcattgggaatagggcccaatgacttgataaatgatatacgcacgatgggactattctttgaatctctgtgtgtgagggatttacgggtttatgccgactcattggaagggtcggtatatcactatcgcgacagcaatggtctggaatgtgacgcggttctgcacctgcgcgatggacgctacgggctgattgagataaaactgggcggagagaaaaacattgaggaggctgcggagaatctgaagctgctggcatctaaaatagacaccgcaaagacgaaggcaccttcattccttatggtacttaccggcacatcgaaatatgccatacggcgtgaagacggggtctatgtcgtgccggtcggttgcctgagggattaatggtgtctcctccgaaatacacaacgaaatgacaatgaaaaagatacttttcgtctgccacgggaatatctgccgcagcccgatggtggggttcatcatgaagaaggctgttgcggatgcagggctttcgggggagtatgaaatctcctcggcggccacgtcgaccgaagaaacagggaatgacatatatccgccggcgaaggaaacgctgcggaggcacgaaatcccgttcagggctcgtacaaccttacattggacaggactaactggaagttcagcgacacaaacatcaacatccttactctggcatcatctacgacggtatctactacgttaacggacaggcctgttatctgtccggctctaaaatcaaggacaaggaaggaaaaccggagttacaaatccttgtctcgtactgtaatgcagaggaagctcttgatatgtacaaacttagggggcaggtggaaacgatgtttagaggcctgaaacacaagcggagggctgtaagcctgttcaaatacggactggactacatcttccagtgccttgtgaaccacaccaaccgctatcgaataaatgtttccaaatttttgtcatatacttaggtttatagtaatacttcacaatcctgaagattgaatatctgtcagcgatgtcactattttatgcatcattccttttgacaacgaacatagactccattcgcacaactcgttaagtatacagaataaaacgaccccgacatttttcaatattatcaaaccaaaaaccaattaggcaaggccgcagctgttggcgacaaaagctgttatcttaaatgcgaggttaagaaatctgaaagcaaatcacaaccatgagcatttaaatgattaagacaggtgtttctcattatcgtaaaaaaagaaagagaaccaagtacattggttctctcttcattttctgtcgggatgatgcgactcgaacgcacgacccccacgtcccgaacgtggtgcgctagccaactgcgccacatcccgtaaggcttaggattacgccatcttattgatgaagacagctattccgctcttgagattggcagccttgttcttatgtatgactccaatcttggctagcttgtcaatcattgcgtataccttgggtgctccagcctctgccgctttcttgtcggaagagttccttatcgcacgtatagcattccttgtagtctttgcataatacttattatgcaatctgtgcctttcgctctggcgaatgcacttctcagcagatgcgttatttgccattgttcttatttttaatatttagtagtgggtaggagaatcgaactcctattgcgagaatgaaaatctcgagtactaaccgttatacgaacccaccgtcacactcacctcgaaaccaaaattcgagggggattgcaaagatatgtaatatttttgtctctgcaaaatattttcgccctatattgagacggcatcacctatattgagacgggaagtgataggataagattacttattatccttatcatccgtgttatcggcttccttgtcccactcaaatgaatagagtatggcttctacctgcctgagatactggcgtttgtcatatttcggagcatatacgaacccgtcgagcactattatatccttgccgtccttgctgtagaaagaatgagacacaaacggtccgcccatatagtcaccgtacacatcccaaagtcctcttgtctcagcaaactgacgcccgcggaatcttatgaacctaacgtccggagtcgccacttcattggtaatcatatacgtattgtcacgcggcccagggacatttgccttaaggatctcgttgcggtgacgtattatattttcctcagtgaaattctcaatcgaggatgccggatacttgtagacaaagacaccctgtatggaatactgcttgtcatcagcaatccagatgaaatcatcggtagccttgcgaaccttgtacccagaagggaaatgcggtgaaccaccagcgagtttagatacaacaggaggaattgacggctcttcataacggcgggaattggtgatgatcctatccctttctgcctgctcgattgtgcttacgattctctccgcattggcactgaacacatttgcagcagagtccgcagaaggagcggagacttgtataagacactggggataagcccatttgtcattttgatacaacacctgtccctttgcatctggagatatatcaaagatcaggatatttctgtgaatcttgaaaaggtcagcaaatcctgtcggagttatgtgcacgagggagaaataaggctctctctgaggaagaaacggatagtcggccgcaagaacttccctggcctcagccccgagattgccgtcccagtcatccttatccattatcacaagtatctctccggctttaccgctgacattgggcagaagaggtttatcagactccttacatgaggaaagcagcagcgcgcaagaagctgcaactacagatatgatagacagtttcgtcatgattgaaaatgatttgcctaaagttactaaagttaggggctatgaacaaattcgcacttatatcagagtaaacgcgagatgtcgtttccgaaagcgaggatcatgagcagcatgagcaggaacataccgacaaactgagctgccaccatgaacttgtcactcggtttcttgccggtcagcatctcatagatggcaaacaccatatgtcctccgtcaagggcaggtatcggaatcagattcatcaccccgagcattatcgagagaagtgccagcagattgacaaagatataccagttccatgtagatgggaatatctgccctatggagatgaaactacctaccgacttgtaggcaccagtagaaggggtcgctacgagcttcagatcccgcacatagccgcctatcatgccgaatgtgtatttcacgcctgcagggatagcttgcgccactgtatagtctcgatgctcaagccccggatagtgcacgaatactccgatcatacccgccgtatctacttgaagcggtacagcgagggtatccgagcctcttacgactgaagctgttacagacttcccagcaaaagccctaagtataggggtcgcatcctgacggtactctacggctgctgtgtcgatacgaactatcctgtcacctgagataagcccagagtcatagtttatagagccggagggcaatgaatccaccacaaatgggatcgcaagggtaaacatgcccggagtggagagcacatctcctatcatattgtgatctatatagatagatacagtatcaccacctctcagcacctttgcctcatgcactgagcggcgggcaagatcagcctgcagcatactgaaatcctccggcacatagtcatcgaaactcaagatcctgtcaccggtacgaaagcccatctcctcggcaaacggattggcatagatacggctgtctttattgctcacatagttgtcgccccatatcgcaaacatggccacatacactatgatagcaaaaaggaaattattgaatacgcccccgaacatgacaataagtctctgccaggccggtttggaacggaattcccatggtttcggctcacttttgagtccttcgacgtcaaaagactcgtccaccataccgcagatcttgcagtagcctccaagaggaagccatcctataccatactctgtatcggcctctttcatctttgggaaaaggcgcgtaaaccatccagttgtcttggtgctgaaaagcttcacgcccccggcatcgaaaaacaggaaaaatttatcgaccctaataccgaaaaacttggcaaatgcgaaatgcccaagttcatgtatcagtataagcaacgagagtgcaagcagcacttggatgcactttataagtactatcatatctatctcttctttgatatctccgcacatcggagtaccgacttcgcgaaagccgtgtcgttggtatcaagtatatcttcaatccccggctcagcaatgaaactaattccgtccatcgcttcagacaccacatcggcgatatcatagaaccctatctcagatctgagatatgcagcgacagcagcctcatttgccgcattcatcgcgcatgggacattgcctccccttcggattgcctcgaacgcaagagacagacacgggaacttcccatagtctggagactcgaacgttaggtttcccaaagtagcgaaatctatcttcttgttgtccaaggagagccttgatgggaaagaaagagcgagctgtatcggctctctcatatccggcattccaagctgggcaagcacggccccatcctcaaattctaccatcgaatgtatgactgactgaggatggactacaatattgatcttctccggagccatatcgaacagccacttggcctcgatcatctcgaagcctttgttcatcatggtggcagagtctatcgtgatcttggctcccattgtccatctaggatgatgcagggcggcatccttggtagccactgctatctcctcacgcggccaattacggaaagggccaccagatgcagtaagatgcaggcggacagccttattgccacttgcaccgagaaggcactggaagattgccgaatgctccgaatccaccgggagtatcggtgccttgtacttctgtgacataggcatcactacgcttcctccagccacgagtgtctctttatttgccaaagctatgacctttccggcccgtatagctgagacagtgggcctcagtccgctgaaccctacgagagcagtcagtactatgtccacatcttccgcccctacaagatcacagacagagtccatgcctgcgaagaccttcgtatcttctccagaaagggcatccctgacataagagtatttattctggttgcagataaccactgcattgggatggaaacggagagcctgagagatgagcaagtcggcattgttattggccgtgagaagctccacctcaaagagaccgtcatgctgcgagatcacgtctaaagcctgccttccgatagatccagttgagccaaggatggccacatgtcttttgtccataatcagaaattaatgtatttggtcggatcgacggcctcgcccttgtaccagagttcaaaatgaagatgttcacctgttgtaagcgaacctgtatttccgacaagggctataggggtgcctgcaaggactttgtcaccggtttttttcaacagtttctggttgtgcttgtagactgacacgatattgtcagcatgctgtatctgtatggtatagccggagtcatcactccagcccgcacctattacggtaccgtcaagaacagacatcaccacggaattggaaggagccgcgatgtccacataggggtgcaagacctcgtcatacggctgcgtgacaacacctttaagaggtgtaaagaaatgcatcccctctatcgtaagctccctcgatgtccctttgtctatggcgaactgctcggcctgccttacattatcccgcaaaagagaatctttgccctcaagggctttcctgtccacttcattttcctgacttgcagcaggatgactgcgcactatgctgtctattgctatcggatcctcaccctcaagtactttcataagattgttggtatagaaagtccaggtatagataatattctgcagggaatccaccttaagtgcgttgtttagagtggccctcttagtcttggcatcgggatagccagggataaatgtccggagaggtgtaaatgctataagggagaacgaagcggcaagaatgacggttacaacggagactacaataacgaaaaggctctgccttgtaaatctgaccacccaaagctgcttgtgtgtcatatcatctacaagggaaatcctgaaatgctctactttcggctcttttgattctctgaccatagccgtcttatcctctctgttaaatattttcagtaactttgtacggttatggacagactcatcggcatagattacgggcgcaagcgcaccggagtggcagtgagcgatcctctgcagatttttgcatccgcacttgagaccgtacagactgcaaatataatagattatcttcaaaaatatgcccaaacagagcacatcgtaaggtttgtcgtgggctaccctataaacatgaacggacagccttcggaggcagcctctgatgtagacatcttcctcaagcaactcgcaaaggcatttccagacattccagtcacattggaggacgagagattcacgtccgttcttgcacacagagccatgattgatgggggcatgaaggcatcgcagcgcagagacaaggcctcggtagacaagatcagtgctgccatcatacttcagggttatctcgataagaaaagtggcacatcttttgcccttgaaaatgattctgtccccacaacgcagtcgagaaggctgtcgggaaaacacagtaagcaacagtagccctctgaggagcggccaacaacaaaaaatctgatatgatacaacccatatatttatttggttcagaagttcttcgcaagaaagcggaagatgtggacataagcgacaaggacttcattaccagtcttgtacaagatcttaaggatacactcaaggagtcagaaggatgcggtttggccgctcctcagataggcgtaagcaagagggttcttatagtggacggcactgggatgacagacgtgtacgactatctcaaggattttcggaggaccatgatcaatcctattgtcttggaggaaagcgacaagacagttgaatactcggaaggatgcctaagcataccgggaatctactgcgatgtaaggcgtcctgc

SEQ ID NO: 892 - DNA, 23666 bp, synthetic construct
  misc_feature 1..23666: note = Synthetic
  source 1..23666: mol_type = other DNA
ctgccttgtatgccggagaattcatatatggctcattgataacgacattgctctctttcgtaggcttgtagatgatggcgccgattccgccgtaggtcttgcccagcatgaactcgaaatcctcattgtcctcctcgggaacatacatcgtgtaagggtccaggtccgaaagcattgcctcgataccggccttttcaatgcggtcgagcgggagcgagtccacgtacgaacggttcaattccttgagtatggagttctggatttcgacccattgtcccagtttgaaattcttcgactgcccgaagaccggcgccgcagccatggtcaatgccgctgccgcaaccactaatttattgtatttcatatttttattgtttcaatgttttttcgccccgcggggccgcattgtcccgaaggcattgtccttatcgtgcaagtcctatgccatcggagcattgtacaaaaatacgaaaaataatgaaaaacgcccctcggaaatttccgggaggcgcgatattgtctatatctgtaaaatattacaggttagcgttttcttttttccagtcagcaactgcaggaacgatgccgagtcctatgatctcgtcacgcatcttgcagaggtgagcgtaggaagcgtcgagagaagcgagctcttcagctgttccctgaggcatgacatagtggcaaccggtagcatcgattgtggtaggcattgccatcatcacgttctgatacttctcgttgtttacgtatgtacctgcaggcagtgtgaacggagcgccgcccatagcagcctcgatcatcttcactgcgttgtaagcagggctctggaatgaagaacggccacggagtttgatgatagctgaaccgccctggatggtgttctgtttgatttcagccatcttctcagcagaaagacccatctctgagagaggtttgccgtcgatctttacctgagatgcgaatactgccatctgctcgccgtgtccaccgtatgtgtgggctccggtaacagagctctgaggaacaccgaattccttggcaaggttgctctggagacgggtagagtcgagagctgcaagtgatgtgagctgctccggcttcagacctgagtggataagagcggtgagagcggtaacgtcagcagggttgaagataactacaacatgctttacgtcagggcaatacttcttgatatagtcaccgaactgagcggcgatctggcagttgcctttgagaagatcctcacgggtcataccctctttacgaggagcaccgcctgaagaaatgatgaatttagcatccttgaaagctacttcaggatctacggtccaagtgatgttcgcaccctcgaaaccgcagtgatacatttcctctgctacaccatgaacacctggctcgaagatatcgtaaaggcaaatgtttggagtaagcccaagcataagggcagtctgagccatgttggaaccgatcattccgccggcacctacgatggtcaacttctcattagtcaaatacttcataataaaatgtattatttatttatacgtttctttcaattccacgcaaagataacaatttcggttgataattgtttgtctgcggaggattttcactgcaaaagttcagccatagcggcaattctgtatgatgatttgctgattttttgcgcagatctgtattttgtcgcttgtccgaaggctgcaggcccgatgcgtttgttctccacgttgccttcggcctgaatccccggtccctagaaaagtccgtaaagttccgagtcaatcttgtccgtaatcgacgcgaaatcctccggacgattctggaaatccagcccgtccgcatcgatgaccaataccttccccgggtactcggcaatccacttctcgtacctctcgttcaatccctcaagatattctatttcaatgcttttttcatattcgcgtccacgtttctgtatttgtgaaacgagatgtggaacggaggatttcagataaatcaggaggtccggcgcctttacgagcgacatcatcaggcggaacaattccatatatgtttcgtagtcacggtccgagaggttccccatcgccttgttgttcgccacgaagatatatacgccctcgaaaatcgtgcggtcctggatgatgacatcatcggaatgggagatttccagaacatccttgaaacgctgcgtcaggaaatagacttccagattgaaagaccatctcttgatatccttatagtaatcttcgagataaggattgtatgtaaccgcctcatacttaggcgtccagccataatgttccgacagcatacgggtcaatgtcgtcttgccgcagccgatatttcctgctattccaatgtgcatatcatgaaagtttctcgttttgcaaaattacgcttattttttaattttgcatagggagtgccgcttttaagtattgcgcgctttcttattgtgatttttggtaagaaactatgctgaagatattgacatttactttcaattctttcggggagaattgttcattggcttgggatgaaacaggcgaaggcgtcatcattgaccctggtttttacaatgatgcggaggcgcaggccttgttcggaaagattgccgagaagcaggtgcgtcctgtcatggtgctgctgacgcacggccatttcgaccatattttcggggtgaaggagtgtgctgacaaatatggcattccggtctacatgaaccaggaggacaattatgtccttcagcataatttcagccatgttttcggcctgaaggagccggacacgtccttctccacgctgccgctggaggatgggcagattatcaagttcggcaatactgagtttcaagtgattaccactcccggacatactccgggcggcgtgtgtttctacgacaaggctgacaaggtggtctttacaggtgacactcttttcgccggcagcatcggccgcacagaccatccgggcggcgattatgacaagttgatcgtctcattgatggataagctcatgggcattccaggagacgtgaccgtcttcccgggtcatggccacaataccatgatttccgacgagcgtacccacaatccttttctccagccgttcaacgagcccgacccggatcatctcgactgggacgccgacggcatcgaactccacggcggcgaggcgtagtgaatgttaggctggccctttccatctcggcccaggcgtccatgtctccagaggctccacttccgccgtggccgtgctgatgtgaccgttttccgtttttgttccagacttgccagacatctgcccgtccataagcgtctccagggttaccccacgaccgctgtctgcgccttcggagttacgttttgacgcgctggcgggacgcggccacgccccgtttctggagacgttgattttcaatgggttataaaaccgggcgtggaaacgtggccaaaaaaaggctgcgtttccacgcctcggttaaaatggtatctgattatcaatcagttatgaaacgccccgtggccgcgtcccgccattgaaaagggtttttcataaataccgatctttccatgtcagtcatttttacaagattgattccaagattaccacatcaaatgagggaatatatagagaatgctatccaaatcacattccatatggcccatctaacgttcgctttagatttaaatattggaacgaagcatagaatcgtcacgatagctattgcaattatcaagaaccaaatagctatgtagacactttcaaatattcctgcaaagtccatgttctcagcagcgttgaaaattcccttgaagccaatcgctaaatacgcgacgataataattaattcaagaattgtgataacccacgaaaatcgcccttttgtttcttttgtttcggtactcatagtgctttttaataattaaatgaataataagtagtttgaagagaattagaatataccaatccccattaattttagtccgaattcgaggcatacccagaagatattgagccaagcaagatattgtccccaactccgaatgccactaataaccatattggcatttttgtctttggcgaagatagtgagcaccaagccgccgcctccgcaaatgatttcaaggacgggatttaagaatacaccaattccaattattccgactaccaacgatgcaattgacaagatgtttttcatattatgcaattaatataggcctacttccttttagtcgtttcgacttttttttctgagaatattagtgaagaagaaaaccaaagaataaaatgtagaaaatcaggataattattgcgagccatattttaggatgattccttagatagccaattatgccctttgtgtttcgtatttctttatcaaacgaggcaaaatatggctcaaagtccttgtcttttgagaaactcaattttgctttattgatacaatttgaataaagaagccaataggcgtagctcaaatcttcttcccctgtcatgtttagacctgttcgaggtcctgttgctttcgatctatactggagcattgttagaaagtccagcaagtctgctcttgtattaggtacagggaatgtggatattatatccattttatttttaattgtgttaaccattccaaatgctcttccgatattgcttgcgacggaacggttgtcagaacgttcttcttggcgtttgttgaaattatctatgcgctcttgtaatttctctacagaactatttgcagcaacgttggaaaaagtatatccacattctgggcaaattgctgtgccaccgattacttgggctccgcaactagggcatttaacaacaattcctaatttctgactggtaggttggctaattggatacgcaggcttgggacccttcatttttgccaaccttccatttaggacgaggtctaattcatcaaggtcgactccctctgctagcccccgtttgtgtacaagtgctctattcttgtctgttaatacaccatccgataaagcggcatcaatgatttcttctaattctttcgaatacatgttttgtaaatttattaaatatcttttatcctctgcattatatagaacaatgcgagatagatgactaatagtattccatttccaatgacgtagtaaggtaaattgactccaaatacggcaaagcagaaatggctaataaggaatacaataaaaaatattgaagagaggattcgcatgttgatacttaaacgggtagttttgtattgtaaaccaatagcaggtaataatgttgcaataaaacaaattgcactcccgattccgcatatgatatcgttttctttgccttcggcgatattaaaggcataatatccaattaatccagcaagcgcgatgctgataaaggatagaaaagtattcagtttcatgctcttggatattatggtgtgataggtggtggggctaatgcgacaatccttagaattgcagggatttgctctattggttgccatttaggcattccgggcatccaagcgagagattcttttgtaacttttttatctgttacaagatgggagaattcgctctcggtaagaggaccgacgggttgtccgtctatgaccacatacaacaattgcaactgagaattttgtatggcttggattgaacccggaatgtacatctgtttcattgtttgattcattacttgaaccatttgctgcgccagagccattccgagtccaaactcaaccagccggtcaattgaataaaaactagtttctttcataaattgcaaatttttcttttaaggctggggaggtgttggcattctagaaggaggtggcggcggtggacatgttgaagtaaatagaggactaagctccggaacattaccagctaactcccattgtgtcatgccttgtttccagacataagtgtcctttgtcatgtgcccggattgaaccatctgctggagctgttgcatgttaaacgggcctgtctgttgtccgttgacggcaagcatgtattgaacattcgggataggtggaggcgtggccatggaatgttgcgtttgctgcgccattgtattcatcatgcccgctatttgactacccatcgcaccgccaaccatcatgcctgtcatcatccccgcaggattcattccgtttccatcgagatttcccatttgccccagacttttagctgctgagtgaagtacgcttgtctgttggtcaagtgaatgggctcccataaaatttgattcagtctgaagcctctgtgctctttgtgcttcctctcgttgaattcgcattgtttctgcaagattttctgcattcatggcctgcatatcctgcatgttactgatattgatgtctatttgcgcttgcattgtcttagacgtgagaccgccggtaagccctttaacttcttgataggaatcagagtctttatctatttcaatgtcgctgacgtcaatatgtttcatcttgacaccaaattcatccaatctatcctttaatttgaactcaacgaggttgctaatgtcatcgatttttcgttccatttgtactactggcatacccaagtcagacggaacattggaaacaatgctcttaaccttacggcagagagtctcctttatttgctttttaaaagtttccagatcgaaatcaataagtctgtttagcttaatgaaatttctgtaatcctcaagtgcgaaagttaaagaaccatgtacggttacaggaacgggaaaatcaggtaagcgcgggtcaaccacatcaaaatatggtattgcaaatttaatctgattattactctgcaagttaataaaatatatttcggcttgaaatggagattctccaccgaaagccaaaccgacgatacttgataaaacagggaaatttgcggtagttatcgtatcatcataagggccaacaataaaatcttgcaatattccgctttgttgtttgtaaacaaatacggcaacttcgccgtctttgacacggagactacttccgtagcgtatagcattctcacgacttgtagagttgacgccttgtccaaggggacgccatttccaaaccaagtattctgcttcatcgcaacgaatgacattcatcaatccgccgcttttgctttttgaacttccaaataaccccataattatttgctgcctttatatttaagtcttgtttaaataattgacaatgttattgagccatgctcgcggcggattctgccatcttgctgttaatcttcaccattctgttcatttgttctatggtcatttcatcatctgctttctcaagcttttcatagaggtcctgagctttttgcatgtaagacgcgagttctgtcaaggcgtttatatcgccactgcttgacttttttagcaatgcgatatacttgtcaacgagtttttcgtaatcatccagaaggttatcccagttgttgccagtactacttgatgaggacgcggcgtgaattgtagctgaatttacatcggcatcgggtgtaggaaagtctaaatctgcttcggcaaagaattcttcgtcgacatctacttttgtcagagaaaaagaaaactcttttccgtcgcgaagtcttgtgaatgttccagtatagctgttgtctgtcaagtttccggagaactgaccggtaaactcggctgtttcaaactctttgagagtcaatgagctgccgttttttgtgccgacaagtttcatagatgccatgttgcctttatctctctgcttgtcatagtagtacctgccggtaacttgattgtttttgctgataatggacatatgaatttttgcccccgcaacagtgccggtatagttctctattgcatctttttcgtttgagctactgtaacttgtgttttggttgtttggattatttattttgagcgtgatagagatattttccgtgtttttgacgacatttacggcattcttgtattcaatgtaagagatgccttcgtatgtgggctcaaagactagcttcttttccatgccggcaggagaggtcagtagagcgattgccgcatcgctgttctgaatagtcaatccgtatttatcattaatcaaagacatgttgtcatccaacaaatcacaagtgaaactatatatttgatgaatttcatttgaacatgtgttgttcgttataggaacaagtgccctaactgaccagtatccgtctctatggctatcctggaccataaatactttgacgtccccacagacggttatggcactttcatcagggccgaagatttctacattggcagcaggaatcatcttctcaaccgccttttggccgtctccacacgacgcaataactagtccgcacaatgcagaggacaatagataaataatctttttcatataattatgcttttataatgttaaatcaaggtcaatgtcttgaactgtggttgttttacgcagcataagacaacacgcgggcgcgacttgctccgattgaggtcctaggaaaaccttttgaggaaacaagtgacgcccgcgcaagaaatgtgcgggcgtcagctcttgttctttttcctcaaatcttattgaaatttcctaggtttcaatcgggattgaacaaatagctaacgctgtatgtctatgtagttgtcggtgacttgcatcactgacaattgcaaatataagtataaaaatattagacgcaacaaataatttcaataatcaatatggcttgtcgggaagaatctgcactattgtgtaatgattgcctattcatcttccgccacgcgaaggattattgtttccggggatacctgcctagtattcctgacaggagatccgggggcaatgaactgatccgtgctgccctggaggtggtcagacgatactttttgaccagatcggctgctgcgatacacctcctttcgatggacaagctcttgtaactgctgctgaaccggttgatgctgattccctctagggactgatataactcatcatccctgaacttcactgatttcaggattccggaatcggtttcatattcgacatcattgttcttggaaaggtagaaggaaaactgtctcggattgttgaaatactgttccatttcatgaactttgacatattgtccggggaagaccaagttattgtcgtcaagaacaaggtcctgaggcagaaggactttcgaggaaaaaagttcacgttgcatgcggatgctcagcgatgacagcttccttcctgacggaagacaatgattatcattgaaatacatgcttgcggatgaccataggtatgccgtggggattacattcatgccggcagccattggattcctcaaaatgtacccgcatacgccgcgcaaatagtcggtgtcagctacatgcttgatgctcaggtcaatgtcttcggaatgtttgatctccgaatagacctttttaattgccgcaagccttctctggagatatgccttggcaaatcttttcacatcaaggtattctcctcgtagaagaaaatggaagtggttgttcatcaggcaataggcatatatctcaatgtcatatttcaatgaacacacgagaatgtcatttactcctcttacaaaatcggtgtcgcttctgaacatgagtgtctcatacgttccggaagagcaaacatggtaaaaatcaatagtcatttctcaggtggtttttcgtgtaaatttagcaaaagcgatttgcccgacctaggaaatataggctattaattgaattaatttatgatttttatgtgtttcaataaaaactgtgacatttttgaatgtctgctgatacataattgatattcaaattatcagtactcgtcttcgtgtgtctataatttggataatattgttatatttgtgataggccaataaaaaagaaggcgaagaaggatgtccttctccaccttagatgttttcacaacggaataatccttattgtgatttgcttcagattggtgcgaagatagtattaataaactaaacaaacaataaccggcatgaaaaaaaatttaggcctcgatctaggcgtaggctctatcggatggagtctcatcaatgcggataaagacaataaaccaattgctatactaggtctcggcagcaggataatatcattgtctcccgacgaatcttctgaatttacatccggcaatgctgcatcgaagaatcagaaacgtacacaaaagcggactgccagaaagggatatgacagatatcagatgaggcgtcaggctcttactgataagttgaggaaattgaaaatgcttccggatgagcatttgataaaattgcctgttcttgacctatggacactaagggccagggcggcaactcctggcgaaaaactcactttgccggaaattggacgagttctgtatcacatcaatcagaaacgtggttatcggcattctagaagtgatgattcggcagataaagaacagagggagtatgtgcaggctatcaacaagcgttttcaggaaattagggaagaaggcgttacgattggccagcattttgtaaaaaagttaaaagaaagcgaggtcgtaaccgacaagggcgcattctacaattatcgcatcaaagaacaggtgttcccgcgtgatgcctatgtggccgagttcgacagggtaatggattgtcaaaaagttttttatcctgaggagttgagtgaagccaatattaatgagtttcgaaacgaaattatcttttatcagagaaatctcaaatcttgcaaacatcttgtgtcgcgatgtgagtttatgactagaagtttcttggacgaggaacatagaccggtgttggacgcttccggaaaattggtgatatccggtcctaaggtggcgcccaaatcttctccgatatttcaggtttgtaagatttgggaggaaatcaataacctcagtatccgtaataaagaaaacgatgaacttcatataagcccggaacagaagaaggagatattcgagtatctggacaataatgaaaagataacgtctgccgctctgtataagattctgggtatcagcaaaggtgatggctggtctgttgacaaggcgctgagcaaaggttttacgggcaatacgacaaaggtcgcaatatccaaagctcttgggaaagctaatgatgccaagaagagagacttgctgaggtttgatttgagattgaaagaaaacggcgtaaacaaagacaccggggaaatcatctgtgagattgatcctgaatgcgaaaatgaaccattgtacaaactgtggcatgtcatatattctataaatgacaaggatgcgcagaggcatgcgttgaccagtcaattcggaatcaatgatgaagcctctcttgctgaattgtctaaaatcgacttcgtaaaacagggatacggcagcaggtcggtcaagtttatgaggaaactgttgccgtcactcatggatggagccaaatacagtgaagcttgtgatgtgattggtgtcaatcattccggaagtctgacaaaatccgagaatgaagctcgtgaactgttgcaaagaatcccgcaacttcagaaaaatgagctacgacagcctgttgtggagaaaatccttaaccagatgatcaatgttgtcaatgctgttattgagaaattcggtggtgttgacgagattcgtgtggaaatggccagagaattgaaactcagcaaagaaggacgggcagctacagctaaaaatatccgcgacagggagaaagagaataaagaaattgctgaaaaaatcattgaacttggcgtaacgccttcgaaaaacaagattctcaaatatcgtctatggcaagaggccggccagaagtgtttctattgcggtcagccggttggagcaacggagtttctcaatggtctggatgtggaaattgaacatgttgtgcctaagacattgctcttcgatgactctttttccaataaggtttgcgcatgcaggaagtgcaatgcggagaagagaaattcaacagcctatgactatatgaagagtaagggtgaaaatgcattcaatgattatctgcgtcgtgtggacactgctttcagtgagcataagatcagttttaccaaacgctcacgacttctcacgcctgccgataaaatccccaaagactttatatcacgacaacttgttcagactcaatatatttccagaaaagctatggaaattctcaaacaagtatgtcacaatgtatatggctcaagtggtgaagtgacatcttatcttcgcaggatttgggggtatgatgaaatattgcactcgttggatttgccgaggtatcgggaaggaggaatgacggctgaggtctcctatgaacaccgcggtcagacccatacggaagaacgcattaaggactggagtaaacgattggaccacaggcatcatgccattgatgcattgacaatagcttgtacgcgacaaagtgttatccagaggctgaataatttgagttcgatgacggctgttgcaggcgaagcaatgtcgctcgacaaatggacattggcgcagccgcatttcagtgtgcaggaagtgagcgataaggtgggcggaatattggtgtcgttcaaagctggcaagaaggttacaactccgggggaaagatatacttatcgaggaggaaaacgtatccttgcgcaggacggcttgctgatacctaggggagcattgtctgaggaaagcgtttatggccggatatctgcccttgagaagaatgtgcctgtaaagaaattgttcgaacgtgtggaggatatcgtgaaacctggaattcgggcggtggttgaagacaggttgatggcttgtgacaatgatgttaatgcagcgtgtgcgtcattgaagaaagagccgctgtacttggatgctgaaaagactattcctttagaatatggtacttgctacaaggcgaaatatgtaatgaagtatgctctttccgcattgaagccaaaagatgttgaatatatcgtggacgaacatatccggaaggtcgtttctgaacgtctttccgaatatgggaatgatcccaaaaaggcttttgctgaaccattatatgctgatgatgccgagacgattcctgtcaggaccgtgaggtgttacacgggactggatcaggtcgttccggttaaaagggatgttgcaggcaatgatatcggcttcgtaaagcctggcaacaatcaccatattgcaatttacagagatgcagatgggaaattccacgaatgcgttgtgacattctgggatgcggtggaacgcaagaaatgtggtattccggtgattgtcagaaatccggatgaggtatgggatgttgtcattgacaagaatgttccggaagaattggcggctgggcttcctgctcttggatggtcgtttgtcatgagcttgcagcagaatgaaatgtttatcttgggcatggaagatgacgagttcagggatgcaatggcggaggcggattataaggcacttggggcgcatttgtatagggtgcagaagttggcaggttcggattattatttcagaagtcattatgagacactgcttgatgattcggccggtgcaaggataatgaagaaattttatagaatttcgagttccaaggccttgttcgcattacatcctcgcaaggtcgccgtcagccttcttggtgaaatgtcattgaaaaatgattagacgcactttatactttggaaacccggcgtatctgtcgttgaatctcaggcaacttgttattagaaagcctgaggtaaagggggatatgccgaatttcgatgagacgggcgttttaaaagatgttgtgaaaactatcccgattgaagatattggactggttgttcttgattgcccgcaaattgttgtgacacaaggaactctggcggcattgctggaaaataattgtgccgtaatcacttgcgacaagtctcatctccctaccggattgctgttgtcgctctatggaaataagttgcaggcggagcgttatacatgccaggtggaggcatcattgcccctcaagaaacaactttggcaacagacgattcagagtaagatacgtaatcaggcggcggtcttgaaatatgcgacaggagaagatcccaagaatatgattttgtgggtcaatgcggtgcggagcggagatccggacaatgttgaggggcgcgctgcggcgtattactggaaaacagtctttttaggaaatccgtactttaccagaggaggtgatgacgtagtgaatattatgcttaactatgggtatgctattgtcagagccgtcgttgcaagggctttggcaggtgccggtcttattccgacattgggcatacatcatcacaacagatatgatgcttattgtctggcagatgatatgatggagccgtatcggccttatgttgataaactagtcgtggatattgtcaatgaagaaaatcccgagaaatttgatttgagtgtaaaacgtaagttattggaaattcctgttgttgaggtggttatagatggggttcgccgtcctcttatgttggcggtgagccagacggtgaattccttgcagaagtgttttgctggaaccatgcgaaaattgtcttatcctgatatgtatggataggtttagtgaatatagaatcatgtgggtgctggtatttttcgatcttcctactgacaccaagaaagaacggaagaatgcggctctattcaggaagcgtctgatagaggatgggttcgtcatgttccagttttcaatctatatgcgacattgtccttcttctgaaaatgcacaggctcatatcaatcgggtaaaatcatttcttcctgatttgggacaggtgggaattttgtgcattacagataaacagttcggaaatatggagctgttttctgaacataagccaaaggagagcgaagatatttacattcagttggagttgttttagtctcaagtcctgcattagaaatttaaaatcgagaagaatacaaaaaatccggacaaaaatgttccggattttttagcgataaaatgttgtataacttgttgtgtaccagctttctatagtgtatatactgttatcgctggcgtaaatttaaataatctgaaagcaaatcacaaccagcaagataaagttcggcagcgcggacatactgttatcgctggcgtaaatttaaataatctgaaagcaaatcacaacaattaccgctgacatggacaaggaacaaacactgttatcgctggcgtaaatttaaataatctgaaagcaaatcacaacgaaattgcgcatgaacgaggacgtgatctcactgttatcgctggcgtaaatttaaataatctgaaagcaaatcacaacggtgcgtttgttgataagcttcgctcatacactgttatcgctggcgtaaatttaaataatctgaaagcaaatcacaacaggtgtcaagaagtagtagaatctgcctaaactgttatcgctggcgtaatttaaatagtcttaaagcaacttgcaatcatttttagaagtcggtggagaggtagccttggcggctgaaatcgacggcttcggtgaatagtttgtcgagaacctccatggctatagatagctggcgtttgtcgtagagctcgccggtgatgttttcgatgaagaaatccgtgtatccgttctttatgccggcacttccgttgcaggtgaagatgttgtcgaaagtgatgcgatacttgccatttttcatttggacgacaacacgcgcttccaaatccctgactgaaagcactgataacggcagtttcattcgactgtatccgtatcgcttatatgggatgcctccgtgacagacatagcggcagacaagagttgaatcattcaatgtttgacagttggtgaagccgtgcccgaaaaacagcccttcgaggtcatggatggttttgacgtcagaatcgtagactttctgccagattacctccctgtcgctgatgactacaaaattgtggcgatctgtaattttcgccgtttcgtttgttgacgcgttgttcttgtcgccggtaagttcgagacttgactccaaatcttgagcggagcaaatcaccggaagggctgcggccattaccaataataacaatttcttcatgactatataaatatctcaagtgtaacactagtgtaaatgtagtaatatttagtaataacctgcatcatcccagggaatttttccgccatcgtgagcgtcggcttggtttccccggaatcgcctgtcgggacgcggccacaccctatttctggaggtgctgatttacaatgagttataaaaccgggcgtggaaacgtggccaaaaaaaggctgcgtttccacgccatgtttaaaatggtatctgattaccaataagttacaaaacaccccgtggccgcgtcccgccggggatgcctgagcaggggaggacccaccatgacgcaggcatgcaaaactatctcgccccgagcaccacgcgctctgctacctggcggagataggcggcctggtcgtgaggaatgccgcaatctattgaggaagtggcgccatctgccggctgggactggaacggcttgcggaaaatcatgaggtagtttacacaggccttcaggtaggaaccgtagtcggactgatgtttgctgtcggcgctgtagaggtcaatgccgggattctcgttgcggacaatgctgaaggcgcggcctatcggagaaacctcgaaatcattggccccgaatatcttggacgcattgcggaccatcattgatgtgccgatggtcatcaggctgtcgaacgcggcgtggctgccgaaaccgccgaaatcatccttttcgaaagaccaggtgctttcgagaagcacgtgacaattgcgcgagcgggaaagaagcctgtcggtcaacttcaggaaattcgtattgacataatcgaactgggtcgtgtcggacgcatatcttgccggactctggctctgatcctggaaaaacgcgtaatcataacggccggcattgacgacattgcgcgaaaccgggagcgcgagatggtcgccaaacgtctggccgcccttcaacgtcgatttcacgcggagatagtgcccctcgttccatgcgatttccttgagcattgccgggcaaccccagtaataggtgaaggaattgccgacgcagaggacgttcagggtgtccttcggaaccgcattgccgagatactgcacatattccgccaagtagctcttcggcataatcatctcaggcacagcgctatccgtggctgcggtgtcggccttctccttgccggtcggacggaaacggagctccagttcgcctttcaccggctcaggcaggcggaatgtctgcaggatcgtggacggatgcgcgcccgcaccggtcggacggccggaacacatgaacatgtcgcccttgtaccaggtgctgcccgacttgcactccacgacataatatttgctgcaggaagcggtcgtattcacagccgcatcgaactcgatgactccgcccttcgggatgtaacccaccggaatcttgaagttgaacatgccgtcctcgtcagcggcaatcgcccggtcaggcgcttcgccagccatatagacgaccctcagcggaagtccctgagtatcaaccttcggcgcacagctctgcaatcccgccagcgccataacagtcatgatcaatgccgttttgacggctgcaaatgaatgtttcatagttacaatgttaatatcctcgtaaagttactaaattatacgaacaattcaagcccaaaaaaaggtcttggtccatccgtcagataggtgccttctgcccgaaatagggcagttgttttctgatccacttggcaggcatggatgcttgtgggtaatcgttcaatctgttgtatctcaataagatgacttcactttatgctcaatctacgcatgccaagttccatgttttttcatgagacttggcatgcaagcgtctttgtaacttgttgatatcttgttgtttagttaaatactgggctgccaacttgttcagtttgccgaaagcttctccagggaatcgtgggtcagggggaaaacccggaatcgtcgcctcaattttcgccgcattgtagatgtgactcggtggacgttatacacttatcgagaatttcattgacaacagcttccgggacgggcaggtgaggaccacaggaacaggcattcttcgagaggtactttgggttgtagaattgtgtcgtgcgcaaaaacgcctgatttgcgcacgacatggcttttttacctcgcgacgtgcgtattaaaacgttttccactcacgacacattactttcagccgccggaaaaatggaacaggcgtggaacggcgggccgaaaattatacgaacaattcatgcaggacctggagcgagcggatgttgatggtggactccgtgtggaactccaggtagcggattatggatgaggcgatctcgctgcggacacggccggacaacggaataagcattgccttaggcagatccgaacgcatgaactgctccacaaacggctgatactcaccggtgaacggaatcatgtcggtcgcctcggggcggaaacccagggcgatgcagaactccagcagaaaataaatgtggtagttgctgaaatccgcctggagcgcatccagagtcaatatctggcgtacacaccagtcgaaaagtccgtcttcctgcgccccgtcctttatggtacggtaaaccacctccgccatgaacagggacatcgtgttcttgaaaacattgttccgtattcccagaagaggatattttgccgccagagggctggcataccataaatctgatttcgtattttccgttatggaaagctccagaatgttcagcggaaggtaatacgccatcttcgccttcgcccccgtcttcaccagaaaactcttccggccgtaggctcgggtcaatgcgtgcacgacaatgaggttgtcacgtatcttcgtgtaattcaatattatagcgctgtcatccatggcggtgtctacttgccggcgtgctcctgaagccatgccgccatcgcacgcaatgccttgccgcgatgagaaatggcattcttctgttcgtcagtgagctccgcaaccgtcacgtcgggatattcgtcggcaatgaaaaccgggtcatatccgaaccctccgttcccgacttttccatatccgatgcggccttccatggttccctcgaaataatgcttttccccgttcagaatcagggtgatgacagtcttgaacctggcccttcgtgtggcgtgaggagtgctgatgccatattctctcgccactgatgcctcgtattcgtgaatagccatctcgctgagaagcttgtccatattggcatcgaaacttttcgaaggtccggcatatcttgcggaatatacacctggagcgccgccgaggatatccacctcaagtccggtgtcatcagcgaagcaatctgctcctccggtgtggtcgaaaatgtattgtgccttctgtaatgaattggcacgcagagtcgtgcctgtctccggaatatcttccgtaatacctttgtcggctggggtaacgagctcaaatccctcgcctagaatctctgatgcttcacgcagtttacagctattgcccgttgcaaaaataatcgtcatactgctttttcttttaccttaataatttcgcgtgcaaaggtatcaaatccaatcgtaacaacaatggatttatccccatttatgattagaatcgtccgaagatttaccaatttttggggattgcccgccatgccgtcccgcaataaatttgcaatcgaaaaacgagaaagtacatatatggcgaacaaacaaataattgctgccgtggcaatgatgatgacggcaagcattgctatgagcgcgcaaaatactgagaatgaagcggataaaaaagaatcccgcatcagcaatgctctcgggcgtcttaccataggcggttatggcgaggcggtgatgtcacgaaatttctatagccagcatttcaaccgctaccgtgatccggaaacctataagaacgacaaatcgcatggccgtttcgaccttccccatgtcacattgaacctcggatacgatttcggaaagggctggacaatgggaatggagatcgaattcgaacatggcggaaccgaatcggcagtcgagatcgacgctgacgaaagcggtgaatatgaggctgaaacagagagaggcggcgaagtcgcattggagcaattctggctgaacaaggccttttgggccggcaagttcaatgtcaaggcgggcgaactgataatccctgtcggagaaataaaccagtaccatctgcccaatgaatttttctccgtttatcgtactgaaggtgaggcgaaattccttccgaacacatggcaccaggtgggcctttcgctctggggaaagctgccgcagtggaggtatgaggccatcttcacctcaggtctggatgctgaacgcttcggtcacgactgcttcgcacattatggtgccaccagcccttacgaatacaaaatcggaaacgtatatgccggcgcggccagaattgacaattattccgttaaagggctgagactcagcctgagcggctactacggatatacattcagaaatactgagagaaaggcaagcgcatcctatgatgactgtcacggagccctcgccatcggcagtttcggtttcgaactgaaccgctggaattttatagccaggggcaatgctacctatgctcatctgtctgatgcagagcgtattactaccttctgcaatgcctttccgaaacacacccagcaggatggttccccatccaaacattcgccgataggtaccagtgcatattccttcggcggtgaagtcgggtacaatgtcttcggacttgtgaacaggctcaaagatgaacagaaactctacgttttcggacgttacgaggattacaacacatacgcctcaggagacaagaaagtggcttacgattatgatcatgtaaaacgtatggccttcggtatcaattacatgccgataccccagattatcatcaaagccgaatatgcaaaaagatatctcgctgtagaatataacgatgaaccgtccgtttccctgggcatagccttcgtcggctggttcaacagaaaataataattaacgaactataagatgaaaacattgaaattcatgattgccgcctttgccgtcctggcattggcgagctgcgaaaagaactccaacggagagtccggaacagtgaatcctgacctgaacggaactgatgcgatgattgcgacagcaggtgaacactggagatctgcacgtcaggactgggaatggtcggaagcattccttttcggccctgcaggcgattacggtctggacccgcacaccgacacatggccgttcgaccgtgtgcaattcgacaaatatatgaagaaatacagccctgcgactgatgcagacgatgccgccatcatggcgaacaatatcgctacaggtcagaaccttacgggcttccatgctgtggaataccttatcttccgtgaaggaaagtcccgtaagatcgctgatatgacggccaatgaagtatggtttgcccagacagcggcacaagacctctacctcagctcattgaaactcgtaagtgcttggggcggagaggtttccgatgctgaacaggcgcttttgggtgaggtggaattcgagtctgacgattacggcgctgatttcaagaatgcgggcaatgccggttcacgctattcaagcgtcactcttgcgacctgccagattatcgcgggagccaacagcatcatcggtgaggtccgtgactccaagatcggtgcccctgctaccggagcggatgtgaactatatcgaatctcctcatgcacataattcaatccaggacttctatgacaacataatgtcctgcaagcatgcactttacggcggattcgaccagaacggaaagacaccggatgccgcttccctgataggcgtctgccttacaatccagcagacgaaggccgctgctgaaaatgtgcaggcaaagcttgaggctgctcttgatgccatcagcaagatgaagaagcctttcgtagaatgctacagcgatgccagcgcaaagactgcgatgtccgcgctcgatgatctggaggaatctcttgacaagctcaatgacattctcgaaagctattcgaacaatgccaccatcgaggccaagttcaagagcgtcaatgaacaattcgtcgaaaagacagtgaagcctacttatcgcgcgctcgccgacaatgacttgaaactggtggaggcattgaaaaagattacttggtaaaagctaaaatcatgaaacacaactatttgacattggcaatgatcgctctggccgtcgcaggatgcaaaggcgaggagccggacaaggacattgacaaaatcattgatctgggccccggcacgagcagcgaacatccggcggagtattacgccggcgggcttttggggacgactacgatggtcaatgcttatgcgtatcagcagcctaccccggctgtggaacaggccggcatggggatggaattccagaatggcgagacgcttttcgagcgcgattacaatgaaaattcggatggcgccttcacgggtctcggtcctctggccgtgcgttccggctgtctgtattgtcacccgaattacgggcacggaaaacgtcaggagcgctatcgcgcaagcgacatgggaaacggttatctgctggtgatttatgacaagcagaccgagtcttacatcatgtctgtcgccggtatgccgcagacgatggctaccaagccgttcaaggccccgattgacgaggcaggcatatcgccgatcgagtggaaaacctatgtggacgagtggggcaacgagtttcctgatggcgaaaagtatgagctcatctatccggaaatcaccatttctgccgatgcgtattatgcgccggtggtcgtgaaacgcaacggtgagatggtcacgattcctgccgacagggtagcggatgaaatcggggtgaaactggaatccaccatcggtatctatggaaccggtctgacggatgcgattccggaagaagaaatcacgaagcagtggataaaggagagcgaatattataattccatcgggaagaccgatgcgctgaaccccgcttattgggaccaggccgggatgaaatggacgagcatgtacaagaataccgtgcagggcaacggcacccaatatgtccgccgttatacttatgcgctttcccgcggtccgctcatggatgctgccggtgccaatgccatctggaacatcaccaacgtgacccgttccgaccgacgttaccactatctcgacctggcaggtacatactatgccaagacagcgatgaacgacaaggaagtgcaggcggaatttccggagtatatcgaccggattgacccggaaaagaagcatccggagtggcacactgaagatgtcgcccaaaatatctacaattatctgacaggcaagaaccaggatccggaaatgtctgaccagcagttcaagaatctgatgatctggcacaggggactcgcagtgccagcggcgcgcaatgtcggtacggacaagttcaatgaaggcaaacgtctgttttccgaattgcattgcgacgcatg

SEQ ID NO: 893 - DNA, 23666 bp, synthetic construct
  source 1..23666: mol_type = other DNA
  misc_feature 1..23666: note = Synthetic
gacacccagcacagaagtcgtgaaatcgcagtcaggagagtgatgggcggaagcgtaggcgacattctcaagatgttcaatgccaagtatatacgcattgtgctggccagcttcgtaatcgctgcgccgctcagctggtgggtcatcagcagatatttcgcgggcttcgcatatcacacgccgatccactggtgggtattcgcattgtccctgcttatcgtgatggctgtcacaatgctaatcgttacgctccgcagcctggatgccgccacttccaaccctgtagattcgattaagaatgattagtttaacataataatacataatagatgtaaagacctacagggctgtcagctgcgtcacacttgagaacggatggcgcagctttttatgattgcgctgattgttcgcaaaaaaatgtatttttgtaatcggcttccggagaggggccttgacgataaaagacattgacaatgaaaagtggaaagatacttgtcgtagatgacaacaagggcatacgggatgccttgaaaatcctgcttggaggctgttttacgcaggttctgacactttcgtccccaacctcgctgacaagcaccatagaacagatgatgccagacctgattctgctggacatgaatttcaaggcggatatcaattccggaaacgaggggctgttctggctgtctgaaatcaagaaaagatggcctgagatgcccgtagtgctgtttaccgcctacgcagacatatcattggcagtggaaggtatgaaacggggtgcggcagatttcgtcgtcaagccgtgggacaacgcccggctgctcgagacattgacaggaatcagggacaggaaatccaagcctaaaaaaggcgtcactgtcaatgaggggccgcagatgctctggagttcagggatgcagcagctcaggcatgacgtggaacgtatcgccccgacagatgccactgtgctcattaccggcgaaaacggcaccggcaaggatgtcctcgcgcacgaaatccacagactttccggacgggcggacaagccaatggtctgcgtggacgccggcgccatcacggaaacgcttttcgaaagtgaacttttcggccacgtgaagggagcgttcacggatgcgaaatcagaccatgccggcaagttcgagcaggctgacggagggacactcttcctggatgaaatcgccaacatcccgatgcagtcccaggccaaacttctgcgtgccatccagaaccgatgcatcacgaggatcggtgacacaaaagctatccctgtggatatcaggctgatatgcgcgaccaatgcagacattccgtccatgatacgtgacggacttttccgtgaggacttgtattacaggctgaataccataagcgtggaacttccgcctttgagaaacagaaaagacgtaatcatcccgcttgcgatgcagttcctgacagagttttccgaaaaatacggcagggatgcagagacattgaccccgatggcgaaagccgaactggagacttacgcctggccgggcaacatccgcgagctgcgcaactgcatcgaaaaggctgtcattctctcagacggaaaggccatagacggattcgggctggacatctccaaagcgtcaggaatgactgagatcaatgccggggacacgatggaaaatatggaggagaagactatccgtgcagcaatggcccgatatgacggaaacatatcaatggtagccaagtccttggatatcagtcgccctacgctttacgcaaagctcaagaaatacggaatatgatgggcgcggaaacaaatatcggcacgttatggattgcgcttggcggtgccgtgattgctgcattgacctatatcgtgacgagagcggcgacaagacggaagatcatcggcaaaatcgacttcatgtcagatgcgctggacagtggcgagacggcgttccggtattctgagagccgatggcggaaccggcggctgaacaagtcattgaaccgtctccggtccattttcgaggctgaaaaggccgatatccgtgagcgtgagcggtatttcgggacaatgctggaccacgtccagagcggcgtcatcgtcattgacggagaaaaaatcgattattcgaatactgtggcgaaaggttttttgggaatggcggagatctcgtcgctgcggcagatcgggcggatttctccggacctggccaatgctttccgcgaggcttctgaaatggagtcgagggcatctttcatttcggagcggggcacggtacagttttccataagtgcctgtacagcaaggcttcacggcaaagaagtcagcatcgtcactttcaatgacattacccgtgagatggaaaacaacgagtccgagtcgtggaccagactcatccgcatcctcacgcatgaaatcatgaatacggtcacgcctgtcgcatcactcagttcggcattgtcccagaacctggacagctacagtgctgaggacatccgttccgcgctcgggaccatcgcgtcttcgtccgagggcctgataagtttcgtgcagtcctaccgttctctgacgcatatttccgcgccggtgcgcaaggctttctatctgaaggacctggtcaatgattctgtcaacatcgccaaagccaactggccttctgtcaatgtcctatatcgcgagctttcaagcgacgtgattctctatgccgactacggccagatgtcgcaagtgctcaacaatctgataaagaacgctgtacaggcaggtgccgggaacgtaggcataaccgcttctatcgacaaacgggagcagactgtcatcgacattgccaatgacggggagcctatcagcgcctctggtcaggagcagctgttcgttccgttctacaccaccaaaggttcgtcaggcacaggtgtcggtctgagcctctgccgccagattgtccgtctgaacggcggcaccatcaagctctcctcctccactcaggaagccacggttttcactatcgtcatgtagtcttactggtcctgtttcaggacttcgaccgggttttcggctgcggaactccaggtccgggaaattatcgagacgaaggagatgaggaaggtcaatgctgccgcgacgaggattatccaccacgggaaggctatggcattgtaaaaatcagccaggtaataacgcattgaccagatacataccggaactgcgattacgacggcgacagcggtcatcaggatgaacgacttagagagtttccaggccgcagacctgacacctgagccgaaaatcttccggagggcgatctgacgcgcctgctgctcagtgtaatagacagacatcgcgaacagccctaaaactgagatcaatatagcaagcaccatgaacgtcatcaccagcttcatagtgttccgcgtccctgtcaatgaatccgccaggaagtcatctatataatatatgtccgtttcgcgcggcacaccgatatactccttcgcaacatcacgccatgcctcgcggacagcattcaacgcctccgccctgtcgccacgcaccttcagcagatgattcatgcacacatcggaacggttctgcacagcccgatgactgtcaggcattggtttataaagaggatcacgcgcgcggaaatccgctattatgccgcagcactcaaactgcggctcgccatctttatcggtaccgacagtcctgttcccagcagtaatcccataacgccgctgcgcctcctccgtaaaccagcatgtcccttcaataggatcggaatactgttctatcacattgaacccaagcagcctgaatgccgtactgtcaaaagcaggcagctgaagccacgacatttcctcaccctcgatatgtacgccattgcttccacatgagaacggaagctgcaccgccataaccgccgtctccacctgcggaagagcctgaagtctctgatgcagagcctcctgggcagccatattgttatagccgagcgcccatgaggaaaccgacagcaaatctgtattgtaccctaccggcaaagataccagatggcgcatctggagagtcattgtcaatgcaaccgcgacaagaaccatgcttatgatgttctggcagacgataaagaccttgctgaacaccatcttgctgcggaacctgaaatcgcccttcacgacagctataggcttgaatctcgataccataaatgcaggaagaagcccagagagaaccgaaaccagcacgagcacaatgacgccggccgcaatggtagccgcatccgggacaagaactatagttgtaccaagaagattctctatccagcccttgaacagcagggcgaccagcacgccgaacagcatgcaaacaaatgtgaacaagaacgattccataaggtatctgcggacaatgctgcctgaagactcgccgagaagacgtctcgtcgccatctcctttgcccgttttcccgtctgagccacagtaaggtttatgtagttgaaaatggctgatatcagcagtatcaatgctaccgccagaagtacctcaacgatcttcctgtcaccatgacgcaacgggctgtacacgtctatcttgctgaaatagagccggtcaagccttgtcaacgtggagccccacaggaaattcccgccagaaccgtcgcgtgtgtagaaatccttccaataatccacatacttgtccagcagcttttcagccacagcgtcaggcgaggcaccatcctgcagcgtcacgaaagtattgaccataccgaaattgtccattctctggaccatgccatccagctgcctgatgctcaggaagatgtcataatactgcagttcatcataaggcccgaaattctgaatcactccggttaccgtgaacctgttttttcctacttcaatggtgcgccccacagggtcagaactgccgaatgccttatgcgcgaacttttcggaaaggataacatcattcagtcccgcaagtatgcagttcttgtcacagcctgagagcgtgtagtcaaacagctgcaggaaattcgtatcaacacagaccgcctcggcggcataatagtcgtcattgacaatgacatcggcatcgccatacgccccgactctggtccaggatgttatctcgggcaccgacgggaagaactcctctgcagtcccgtacgtcattccgacgaactcccccatgccgacagcatacagctgccgggaaagcggctgccttgcgcctacgctgaattctgtcctggcataagaagccagcaatatgacgaatcccagtgccaccgacagtcccaatgcctcgatcgcggcatagagtttatttttcgagaggaatttcagatatgtgctcatagctatttgataatcagttcatccttgtcgccgaaactgtcgtaagaggatatgatgatcttctcgccaggctccaggccttctgtaacttcgtagtactgagggttctgtcggccaatgcggacactgcgtttcgttgctttcgttccctctgcattgaccacatacacccacttgccgccggttgcctgatagaatgagccgcgaggaattatcacggcttcggccggctgtccgagctggacgttcatatagtatgtctggcccgcgcggatgttctccggctgctgtcccacaaagcggaaatccgccttgaacttgccgtcacgcacctcaggatagaccttgcggatggctgccgagtacttctcgttctgtctctcgaaagttgcctcaagaccgggcacgattctgtcaatgtaatgctcatctatctgagcttcaatcttatacgattccagattgtttatctgtccgattttcgatcccgctgccactgactgccccagttccacatcgagaagtccgagttctccgctgataggggcttttactgacagattttccttgcggcggcgtatcatgctcatattgatccgcatgttctccagactttcgtgcatctgcgaaatctgcgtgctgcggtaaaggctgtcctgtttttccctgtcaatgacgagttccagcttgtctttcgccagttcgtagtcttctgatgccttcagatagtcttccctggctatgagtttttcctcgtacagcgtcttgttctgttcatatgcccgccttgccctgcgcacttctatctgaagcgtgagcttgtcctgccttacggaaagtttctgctgttccatggaaatcaatgtgttgcgcaggatgttctccttctcggcgagttcggcttcggagttgagtatctgcatgtcaagactttcattggacagttcgacaatgacatcacctgcattgaccttactcccctcctctgcgacgattctctggacgttgccgccctcggtcgggctgatctggacggtggtcatcggctgtacctggccgctgacgcggatatagtcattgaactcgcctttcttggcggttcctgtgatgatggagctgccgtcaacgcgcaccgcagagccgttcccggttataatcaatatgacaaggactattgccaatgctgctccggcccaatacttaatggccttcttcgtgaatgccgcggccagtcctgttttcttttctattatcttgtccatgattctgattttttactgttccaaatatgatactccgttgtagtactcgacgaccctgcgcttgagctggtactgcagctcggcattgagccgttccgccttggccttcaagtagttggatgaagcggtattgtattctatcgaggatatgagtccctgttcgaatttgcgggcgttgagtttgaatgcctcgtcatacacgtcggcgcgtctttctgcctgaagcagagccgcctcagccccgtccctgtcctgaattgccctgcggacttcagattcgacatcgcggagggacttgtcatactcgaggcttgcccgctgatatgcattgcgtttcttggccaatgccgtgtgcttctgaagtctgtcgtatataggtatgttcaatgacaactgcacatattcgcctccgttgttcttgaactgatcccaataaggagttgctttgtagccggtctgccccgggtaggtgtagtaactggtggacaacccgccgtaaagtccgagtgtcggaaggaattgccatttcgcggtattcagactgcggagggcattgtccatcgaccccttggcgatcagtacggaaggcattgacctgactgcatttgctatgatgtcatcagcggcaggactgttcgcgccggtctgaatcgacgagagctccggatctatcgtaagtttctcatctactggccaatacattacatctccaagtgtaatcatggcattgtcccgattgtttgtcgcggtggtgagttcgtattctctgtcggcgaggtcggctttcatctggaccacgtcggcatagcccttcgagccgagttcttcctgacgctcagccagtttcacagcgtttctggcgttttccacctgttctgtaaggatttcggccaatttggtgtagtaaatgacattgaaataggcctcgatggtggcaaggcagaccttgtcacgttcctgctgctccttggaaatgcccattgacatggatgtgcgggcgattttcaggttgttgatggcggagaatccgttgaatatggtgaagcccgccgacacggaaaagccctggttgaaggacgtcgtggtgagatacgtattggtctcagggtcgatggaacggccccatctgtagtagccgtaggagttcccttccgcagaaggcgtaaatgctgccaatatcgcatcacgtctgtcgagtctggcgtcatcgttcttggactgctggattcgcacctgagtggagttacttaccgcatactccatgcattcgcgcagggtcaatgccttggcttgtgcttgctgggcggggctgtccgcgctggcagtgcggccctgcgtgttttccgtgagcggggtcgtccgtgtggcagtgtccgtactggcagtgcggccttgggtggtaattccctgttcgaggatctgcccggaggcagtggtcgctgcagaaatcaacgtcaagactataattggtattatcggcttcataattcgttgctgttttccttgattcgtactcattgcagtttgcaaacagctctgcattgtcgtttacgctgatgtattcattgcttatggcacatgaaacacacatcatcgtttagacatgaacgagcacgccacgtgccacatcaggcaacagattatccatcagccgattacattcgaacgtcacttatcttcttgtaaagaaactttacaaatctgtaatgaaattttacagtccaatacatatcttacttgtctgccatgacacatggtcgttttcgaacaacctgcatgtcggttttccggacatattactgagtatcaagaacatacactaacagccgaaagccaggttacccacttttttgggtaacctggctttcgctacattctttaacttattagtaatcaacacattcgcttcacaacccaaagtcaggttgttcggatttcggattagaggagacgcttacgtgacctgtagaggaatgttgggatgcgtgaaataccaaattatttcacttcttcttttaatttagccacctcctccagggacaatccagtcgccttcgccacgatctcacatggcgttcccaactgaagaaagttaatcgctacctccatattacgttcttcgcgtccttcctcgtgcgcgatttccttggcatactcaatctgattatgggtgtcacgtgctgttgtcatggcctttacgtaattttgtttgtcaatgttgtcaaggctggcgtactcggctacgtcgaagaggcggctgaagatcctgtcccgcagcgctgccggtctttccaggagtttcgacaggttcttcaggatgtagagccacttgtcgaaatcagtaatcaattcatccacgcccttgctgaacttctcgacctcgatgaagatgaacttcaacttgtccgtcatcgtcttgccggtcgtcgcctcacgcagcatatacctgtgctcgatgaggtcatcatcctcgtacctgaagttcagcaccccgaggaaatacaccccgtccagcttgtagtcccactctttcctgatgccggtctcctcatcccgctgcgccttcttgccctgtttcatgatcgggaaggaagtgtagtacaatgccctctcgaaaaagtgtttctgtgtcgcgcactgcatttcaacaatgaactcctccccattcttcgtccggcagatcacatcgaacaccgctttccggtcatcttccatgattcccagctgctcagccggaatataggtgatgtcttcaatctcatgctccggaaagatgactttcaggaattcaatgagaatgtccttgttcacttcgctgccgaagagccgtttgaaggaccagtcgaccatcgggtcgatgtacctcgccttgatcttttcatccataaaggtaaaattttttagttgttaaacaaaatttgggcacaagattcaaactcagttatcggtttctcgtgtcaatcaaggctacaatagtatgcaaaatttttccgaaaagtaaatgattcgtggcagtcaattaaaatttttacgatttttaaatgtttgatacgattcttaaatcttttatttacaattcttaaatttttagtcgatgtgcaatcgatgatgtcgctgtcaatttccgctgacagaagtggtcaataatggccgaacagaggcaagcgcccgctctgctcagggtgcttcttaaaagtaaagccgattttttccttttctctcagctttcattatatttgtgacaggctatctgaaaaaagaaggcgaagaagtgttatcctctccaccttaaatgttttcacaacggaataatccttattgtgatttgcttcagaatggcacaaatttaaaaacaatacactgaataaacaataaccgacatgaaaaaagttttaggtctggacttaggtgtaggctccgtcggctggagccttgtcaatgtagatgacaactacaaaccgacggaaatactcggtatcggcagcagaatcatttctttgtccccggacgaatcatcagaattcacctcaggcaatgccgcatctaaaaatcagaaacgaacacaaaaacgcactgccagaaaaggttatgatagatatcagatgagacgtcaagccctcacggagaagttgagagagttgaagatgcttccagacgagcgcctgataaaattaccagttcttgagctgtggacacttagagccaaagccgcaacacctggcgaaaaactcaccttgccggaaattggaagagtattatatcatatcaatcaaaaacgcggatacagacatgccaagagcgatgactccgcagataaggagcagcgtgattatgtccagaccgtaaacaagcgctatcaggaaatcaaagatgaaggcaccacaataggacagcatttcgctatcaaattgaaagaaagcgaaatcgtcacagacaaaggcccgttctacaattaccgtatcaaggaacaagtctttccccgtgatgcttatatagaagaattcgacaggataatggattgtcagaaaaccttttatcctgaagagttgagcgaggacaacattgacgagattcgtaacaagataattttctaccaaagggacctcaaatcctgcaagcatctcgtatctcaatgcgaatttatgacaaggagttttctggacgcagatcacaaaccaatattgaacagttccggcgaactcgtaatgtccggtcctaaggtggcgcccaaatcatctccaatattccaagcatgcaagatttgggaggaaatcaacaacctaagcatcagaaacaaggaaaatgacgaactgcacataagtccagagcagaagaaagacattttcgaatatctcgacaacaatgaaaagataaacgccaccgccctatacaagattttaggcatcggtaaaggcgacggctggtccgtggacaaagctctgagtaaaggatttacgggaaatacgacaaagggcgctatagcgaaagcgctcggaaaggatcacaacaccaagaagagcgatttgctgagatttgatctaagattgaaagaaaatggcgtaaacaaagacaccggcgaaatcatctacgagattgacccgacatgcgaaaatgagccattgtacagactatggcatgtcatatattctataaatgacaaagatgcgctgaggcatgcattgaccaatcaattcggaatcaatgacgaagagtcgctgcgggaattgacaaaaatcgacttcgtaaaacaaggatatggtagccgttcggccaagtttatgagaaaacttctgccggcactcatggatggcgccagatacagcgaagcctgcgacatgattgggatcaatcattccggcagtttgaccaagtctgaaaatgaagctagagagttgctgcacaagattcctcaacttcagaaaaacgagttgcgtcagcctgtcgtcgagaaaatcctcaaccagatgatcaatgtggtcaatgccgtcattgaccagttcggcagcattgacgagatacgtgtcgaaatggcaagggaactgaaactcagcaaagaaggaagagccgcaacagccaagaacatccgcgatagagagaaaatgaacaatgagatggcggagaagataaaagaacttggcataactccttccaaaaacaagattctgaaataccgtttatggcaagaatccggacagaagtgcttctactgcgggcaaccggtaggcgcagctgagtttctcagtggtttggatgtggagatagaacatattgtgcctaaggcattgttattcgacgattctttctcaaataaagtttgcgcttgcagaaaatgtaatgccgaaaagagcaatactaccgcctacgattacatgaagagcaagggcgaaaatgagttcaatgattacctgcgccgcgtggatgcggctttcaatgagcataaaataagtttcaccaagcgctcgcggcttctcactccggcagacaaactgcctaaagactttatatccaggcaacttgtccagactcaatacatttcccgaaaagccatggaaattctcaaacaggtatgccacaatgtttatggttcaagcggcgaagtgacatcatacctgcgccggatatggggttatgatgagatactgcactcacttgatttgccgaggtacagggaaggtggcatgacggctgaagtatcatatgaccatcgaggccagactcatacggaagagcgcattaaggactggagcaaacgattggaccacagacaccacgccatcgatgcattgacaatagcctgcactcggcagagcatcatccagaggctgaacaatctgagtgcaatgactgccgtagccggagaatccatgtctctcgacaaatggacattggcgcagccgcatttcagcgttcaggaagtgagcgataatgtaagccggattttagtgtcgttcaaagcaggaaagaaggtgaccacaccgggcaagagatatgtttatcgtggaggaaaacgcgttcttgcacagaaaggcctgctgataccgagaggcgcattatgcgaagagagtgtctatggcaggatccattctctcgagaaggaagtgcctgtcaagaagttgttcgagcgggtagatgacattgtcaagccaggtatccgagctgctgtcgaagaaaggctgagggcatgtgacaatgatgtgaaagtggcgtgtgcttcattgaagaaagagccgctgtacttggatgttgaaaagactattcctttagaatatggtacttgctacaaggtggaatatgtaatgaggtatgctctttccgcattgaagccaaaagatgttgaatatatcgtggacgaacatatccgaaaggtcgtttctgagcgtctttccgaatatgggaatgatccgaaaaaggcttttgccgagccactgtatgctgataaatccaagacgattccgataagggccttaagatgctatactggtctcgctcaggtagttcctgtaaagaaagattccaagggcaatgctataggatttgtaaaaccgggaaacaaccaccacattgccatttatagggatgcagacggaacttaccacgaaagcgttgtcactttctgggatacggttgagcgcaagaaatatggtttgccggttattatcagaaagcctgaggagatttgggacatcatcattgacaagaacattccggaggaactggctgcgggacttccggctcctgattggaagttcgtcatgagtatgcagcagaatgaaatgtatgtcctgggaatggaagatgacgagtttagggatgcgatggaggtgaaggattacaagacgcttggggctcatttgtatagggtgcagaagttaacaagtatagattattacttcagaagtcaatacgaaacaacacttgatgattctgcaggtgcaaggatgatgaagaaattttacagaattaagagtatcaagtcattgttcgcattacacccacgcaaggtatcggtcagcctcctcggcgaaatggcattgaaagatgattaaacgcactttgtatttcgggaatccggcgtatctgtcgttgaaactcaggcaactggtcatcaggaaacctgaggtcaagggagatatgcctgagtttgatgaaaacggagctccgaaggatattgtcaagaccattcctatagaagacattggcctgattgtcctagactgcccgcaaatcactgtcacacaaggacttttagaagcattactggaaaacaattgtgctgtggtcacctgcgacaaatcacatcttccgaccgggctgctgctatcgctatacggaaacaaactgcaggcggaaagatacgccagtcaggtcgaagcgtcattgcctctcaaaaaacagctttggcagcagactgtccagtgcaagatccggaaccaggcggctatgctcaaatatgctaccggcgaggatgccaagaatatgactttgtggggcaatgctgtgaggagtggtgatccggacaatatcgaaggtcgcgcggctgcgtactattggaaaactctcttcacggacaatcctcacttcaccagaggagacgatgatgtggtaaacgtgatgctgaactatggatatgctattgtaagggccatcgtagcaagggcattggccggggccggacttattccgacgttgggaattcaccatcacaacaggtatgacgcgtactgtctggcggatgatattatggagccgtaccgcccttatgtggacagattggttttggatattgtcaatgagagcgttcctgagacatttgacttgagcaccaaacgaaaattgctggaactccctgtaactgaagtagttatagatggagttagaaaacctcttatgttggcggtaagtcagacggttaattccctgcagaaatgttttgccgggaacatacgaaaattgtcttatccggacatgtaatggacagattcagtgaatatagaattatgtgggtgctggtctttttcgatcttccgactgacaccaaaaaggagcggaagaatgcggctctattcagaaagcgtctgatagaggacggattcgtcatgttccagttttcaatctatatgaggcattgtccgtcttctgaaaatgctcaggtccatatcaatcgtgtaaagtcttttttgccggacttgggacaggtaggaatcctgtgcattacggacaagcagttcggaaatatggaactgttctcggagcacaagcctaaggaaagcgaagacatctatatccagctggaactgttctgattcaggaaatgactttccagcggacccgccagattccgttgttgaagtcatggctgattatcttgaactcaccgacctcggaggtgttcgatacatgagcgccaatgcatgcacaatcgtcgtagtctccaatgctgactatgcgtaaagtatcagatgcgtcatccggcaacttgctcagatccacaatcgcggcggcatcttctttcgaaacgaaatgtatcgtcacgggcaatgcagcagtgataatttcattgaccttcgcctctattgttgccacttgttcttctgtgggacaggcagtgaggatgtagtcgcattagcttttcttccgctcgacatgggcattgcgtgaacgtgggcagccgaacatgttgaccatcgtgcggttaaggatatgctcagcagtgtgcgccggctcgtattctgccttgttatgggcattcaatatcggttcttccataaattcaatgattttttctccgtttcatttccgatttctgcgaagatagcaatttttctttgcctgacttctcgaggatacaggttgttttgttcgtcgaggcgacaaggagcgaaaaaccacaactgcgattcgcttctattctcaggacaatattacggattcatatactggcagaattaaaaaaaaccaatcaggcacaaaaaatccggacagaaatctgccggatttttttaatcgccaaatggcgtttaattcattacacctcaatcacttacagcaagtgcgttgttgttgctggtgtaaagttaaaaattctgaaagcaaatcacaacatggcaaggatgccttgctggtacgttgtggttgttgttgctggtgtaaagttaaaaattctgaaagcaaatcacaactgtgcttttctttttggcttgtcgggtgttgttgttgttgctggtgtaaagttaaaaattctgaaagcaaatcacaaccttgcttaagcaaaatccatatcttggtttgttgttgttgctggtgtaaagttaaaaattctgaaagcaaatcacaaccatcgtaccgttccggccgccaatgcctgtgttgttgttgctggtgtaaagttaaaaattctgaaagcaaatcacaactacatcaaggattatgtaaaaagtatcttcgttgttgttgctggtgtaaagttaaaaattctgaaagcaaatcacaacgtctataatcttccgtcttggctgttcaaggttgttgttgctggtgtaaagttaaaaattctgaaagcaaatcacaacctccctgctcctgattaccacgaagcgaagttgttgttgctggtgtaaagttaaaaattctgaaagcaaatcacaacctcgttttgttcgctctgtttgtcgagctcgttgttgttgctggtgtaaagttaaaaattctgaaagcaaatcacaactaaatgttggtactcgtaagaatccagtttgttgttgctggtgtaaagttaaaaattctgaaagcaaatcacaacaatttgattgcgtagtttacggagcgatttgttgttgttgctggtgtaaagttaaaaattctgaaagcaaatcacaactgcagaatgggcgggcgtcattgacacgaagttgttgttgctggtgtaaagttaaaaattctgaaagcaaatcacaacataactatagcaaaggagtagtgactatggcacagagagaaatcacagaagaccaattcatcgcgcactgcgacgaaagcttgcggcaacttgcacgcgaggtgcgacgctgcaacttgacgatttacgagattgcgaggctgtcaggtctgtcgtggcgctcggtcaagaaggtgagcgacggaatacctgtccgcttcgacaccatcgaccgaatcaagatggtgctcgagaggcattcaaccgctatcggcaattaaacggggaggacttgtcatgggaagaccagggaacaagaacatcgccagcatcggcagggagacgcgattcagcagcaaccagcctcggaagaaaggcaggaagccgagcatcctgaagaagctgaaggcaatcggcctgagccacgaggacataaccggcttgctcgagaatatcatcatggcgaacaagcaggaggctcaggagatgctaaaaaacccggaacttccgataatggccgtcggatacctttccgcactgattaaggaaatacaagccggaaagagcatcaccatcgaggcaatcatcgaccggctcgacggaaaggccacgcagaaggtgcaggctgagactacgctccgagacgcgcagccgccggctatctattttggagacgagggagacaatgtcgaggaggaagaatagggatgctcttttcaccgaaatacaagccgttatttcgaccttttataccgggggtacgttacattcttgtcaagggtggacgtgcttccggcaagtcctatgccgtgaacacttcacaatgcgtgagcacttaccgcgaccctttcaacatccttttcgcgcgatacacaatgacttctgcggaggtctccgtcattccggagttccgcgataaggtggtgacgctggagcttgaaaaccacttccgcgtgaaagcggcggacattgtcaacctcacgacgggagccaagattatattcagaggtctgctcgcaagctctggaaaccaggtggcaaaattgaagtcattacagggcatcaagacattcgtattggacgaggcgcaagaactcaacgatcctgaacttttcgacactatcgacttctctgtcaggacaccggacgcgccgaatacagtgatactgtcgcacaaccctacggatgtgcactcttggatttacgagcgcttctaccggaatgtgccggaaggcttcaacggcatcatcggagacgtctgctacatatccacgacctacttagacaatattcacaatctcaacccttcaatcgtacagcaggcgcggaagatggaagctgccgcgccggaaaagtaccgcaacatccggctcggtgaatgggccacgctttcggaaggaatcatatacaagcagtggaaggagattgccctgaacgactggccgaaggctctgctctgcttctacggcgttgactggggatactccaacgatccgacggcggtcgtttgctgtgcctatgacatcgacacgaagacggtctatctgcgtgaagtctgctaccagcctcgactgctcgccgggcatatcgcacggatcatatacgaggacatggaagcgtggggcgtcagtcgtgaggcggacatctactgcgatccggcacgaccggagcacatcggcgaactgcggatgaacaacctgtgcgcgatgccggcggacaacaggaacaaagccgggcgaatctcgtaccttcagtatttctcagtcaggtatgccggcgagcatatcaaatgggagagcgagcgctactcctggaagcctgacccgaaggatcggagccgctatctgagcgagccgcaggacggcaatgaccacctcatggatgccatcaactatgcttgcgtaacaaagctcagatacctcgggcagacgaacaccatcggggagggataaaaaaagccccgctccgaggagcagggcacaaggctgattatgttaaaaagaaaaggcgaccgcccagccttacaggcggacattcaacagcgagcctgctatatctttcagtgcgaggtcaagagtggccttctcggactccgtgaacctcgcttcctttccgttgacagcaagcccgttgattcgctggcagagccatgaacgggacttgccgaaataattcttcgcgatgtacgacatggaaatggcagggagcacgctcgcgagtttctcgcgaatggccatgctcttcgcttctgcgatagtctcgtcaagttgcatggccatgacttcacccactgctttcggatcctctgcacaggccgcgctcatctcagccctgacacactcccgttcactctcggtcttggcattgacgaacctgttcttcaggtcgtccatataagtcttgtctatcatatctataagttttgttccccaccttgcggtggggattgttaatgtttcagttcttctaccagttcgtcaatcttgtaatccaactcggccagaagtttttgagtttcatttcgttgttgttgctggtgtaaagttaaaaattctgaaagcaaatcacaacactgaagcctccggactcgcacaaagtcgaaatcatggatgtttataccatgaagcgcctggcttaggtagatgttcccaactgccgtttcatcgcatttgacggacactgacctcaacacatgtatggagtgtcctcactggagatatcccaggccgcaccgcgttccagtaagcccgcttccgctctgttgcaggggcctagtcgaccttaggaagatggctgagactttccctgatctgttcgtcagtcgggatggtgtcagtcatttttccgtcattgaactgctcatatgccttcagatcgaaataacctgttcccgtgagaccgaaaagaatggtcttttcctctcccgtttccttgcatttcagggcctcgtcaatggctgctcttatcgcgtggctgctttcaggtgcagggagtgtgccttccgtgcgtgcaaacaattcagccgccttgaatacggaagtctgctcgacggaacgagcctcaatgtagccgtcagcatagagctgtgacagaatgctgctcattccgtggtagcggagaccgcctgcgtggtttgctgacggaatgaactgactaccaagagtgtacattttagcgagagggcaaatctcaccggtgtcgcagaaatcgtaagcatattttccacgcgtgaagctagggcaggatgccggctccacggcgattatgcggtattgtttctcgcctcgcagcatttctccgacaaacggacttaccagaccgccgagattggaaccgcctccggcacagcctatgacaatgtcaggggtaatgccgtatttgtcgagcgccgcttttgcttcaagaccgataattgactggtgcagaagaacttggttcaggactgagccgagaacatatctgtatccgtcatgagtgacagcagtttcaaccgcttcggaaatggcacatcccagactgccggtcgttcccgggtgctccgccagaatcttgcggccgacctctgtctccatgcttggagacggcgtgacatgtgccccgtaagtacgcatgacttcacgtctgaacggcttctgctcatacgaacatttgaccatgaatacatgacaatcaaggccgaaatatgcacatgccatgctcaatgccgtgccccattgtcctgctcctgtttcggtagtcacgcctttgagcccctgtttcttggcataatatgcctgcgcaatggcagaattgagtttgtggcttccggaagtattgtttccttcgaacttatagtagattttagccggtgttcccaatgccttttcgaggaaatatgctctgatgagcggtgaaggacggtacattttatagaagtccctgatttcctccggaatagggaagaatgcggtgtcattgtcaagttcctgtttgcaaagctcctcgcagaatacgcccttcaggtcatcgatgcccatcggctgcaatgtcgccgggttgagcagcggtgccggcttgttcttcatgtctgcacgcacgttataccatgctatagggatttcgttttcttcgaggtagattttgtacggtactttctgttccataatgtttataatttaagttgttttacgtttctatacgaaaaaagccccgtcgcagtcgcggcggagcttgagttatctgaatgattcagaacaacatacggctatagcctcctacgactgtcagagtagtaagagtgccaccaccaagaattgttgttcatcataaacatagttccgtttctatttttcggtatgcaagttagaagattcaattataatatgcaaatttttttcattgtaaaatcttttggtacttttgcgatgtcgttttttatctatttaagaaaatctcattctcattgattcagaattcataatgtttagtttgcacgattgtttgtttaattaaaaacaatcagataagttagaaatattttgcaaatagtaacgaatatgctacctttgcagatacaaagttctttgttatatgaagagttctgaataacagagaactttttttcaaaagcaagttattatttttttcaaaagcaagttattatatgtataagatcgtagcaattattgagaagggaccggacgggcgatttgctatcacgtcctctcagagttttggcaaaaatcattttggcggttttggggagacaatcgaggaggctaaagcagatttccgcgaaagtgtccaggactgccgtgatttagccatagcagacggggagaaagtctctgaagagtaccagataacattccgctatgacattccttcattcttcgaagatttcgatttcatcaatgccagccgcttcgcccagtatgcaggcatcaacgaaagcaaaatgaggcaatacaagagtggggtggcattccctggggaaaagaccacaaagaaaattgtggctgcaatacatcgcataggagccgaattaagttcggtttcaatataacaaagaactttttttgagaggagccgccgtgaggttgctcttcttttttttcattgtaaaatcttttgctacttttgtgatgtcgcttatgcggctagcggggtgagatttgatgatgcaggaccatttgagcactattaaaaacactttacactatgaaacgcattctgaccattctttgtacaatgataacagctataggaagcgcatctgcccaaaatccgatggcggaggatatgtccagatgggctgacggatggaaacacgcattctcgaaggagggagtcagagaatggaagcctgaatttaccttgagatattatgctggtttggtcacttcagggccaatgcttaccggaggcatacgaatcgacgagaagcgttcattttccatctttatgagtcaaggagaaacatacgctgattatgcgcccggtgacatatattctatcggtacggggatatgtttccgcagatactggcatttgggaaagcgcaaaacattcgccatttacagcgacttgtacgctggagccggatggatatacaaaataagcggaaagtatcatctgaatacacaaacaggcgggcaacgcgaagtgattaaagaaaatgtgggcgatatgatattcatcggcggatggcagcccggtatcagagtaagatgttacaagaatcttcatctgttcataggccccacccttgccgcagaatgcctgggagcgcacctgggaatcggattctgacgcggcggcaagattgtcttttgcttatgggctctattttttatcttaagaaaaacagaagaaatttcagatccgttccagattttatttgtaatttcgtcgcgtcgcgagaaacggaaacgatgatgaaccgtaagggtttgcattgacagcggcgagggtaagccagtgtttttcagagcatttgcaattattgaagaaacatgcagccctcatgacattgacatggaactatgaagatactggtaatagaagacgagcgctctctgcaggaattgattgcgagagcattgctgaaggagcattatgtcgtggaagtggcttcgacatacggtgaggcgtgggaaaagctgtcgttgttctcatatgactgcatcctgctggacatcatgcttccggacggaaacgggctcgacctgctgaaggccttcagggaagaaggaaaagcattgacagtaatcatactttccgcccgcaactcattggaagacaaaattatcggactggaagagggcgcggacgactacctcccgaagccattccacacggcagaacttctggccagaatcaagagcgtgaccagaagaagcaacggaagcggacgcaacggaatagtctatggcaatgtcaagctcaacccggacagccgcacagtggaagtcggcggaaaagcattgacattggtgaagaaagaatacgacatccttcactatttcctgctcaggccggggcacatggtcgataaatcagtattggcagaagccgtgtggggcgacgacatatatctggcggacaatttcgacttcatctattcgcaggtcaagaatctgcgcaaaaagctggaagaagccggggccgatatagaaatcaagtcagtttacggattcggatacaaactcgtcaccaaagaatgaaactgatccacaatatcgctgtacgcctgtctatggcattgctcccggtcatcgcgctctgggcgatggtcttttacttcgtcatagtggatgagatcaatgacgaggccgacgacctgcttgaaagttacgctgaacagctgatggtcaagaagttgtccggaaagaaactgccggtcaccaacatcatgacagacgggcattacagcatttccgaagttgcggagagttatgcgaattcacataccgggatggagtactacgatgcagacttctacattcaggagacagacgaacaagaacctgcacgatatctcaagaccatattcagagaccgtgaaggaagatgttttgagctcattgtggctacacccactatcgaaaaagatgacctgataaagaccatcc

SEQ ID NO: 894 - DNA, 23660 bp, synthetic construct
  source 1..23660: mol_type = other DNA
  misc_feature 1..23660: note = Synthetic
ttcacacctgatccgaatccgtggctggattcgttcgggctgatgctgacgcttctggcgcagttcctttccgcccagaagaagtgggattgctggatcgtgtggcttgtggtgaacgtcaccaacatcaccctctacatcagcgccggactcgtgttcatgccgatcgtcagcgccctgtacctcataaacggcatctggtccctctggacttggtaccgactgtacagagaggagaaataattgacaacgaggagcttggcctccacgcaaaatattaatgaccatgacagacatattactgaaaataaccgatctgcacgccagtgtcgcagacaatgagatcctcaagggcatcaaccttgagatccgccgcggcgagatccacgccgtgatgggtccgaacggagccggcaaaagcaccctgtcctctgtcctgaccggaaagccgaactacgaggtcacttccggcacgatagagttcgacggcaaggatctgctgacgatgaagccggaggaaagagcctgggccggactgttcatgtccttccagtaccctatcgagatccccggagtctccatcacgaacttcatgaagaccgcaatcaactccaagctcaaggcccaaggcaaggagccgatgaaagccggtgattttctgaaacttatgaagcagaagatggccttcgtccagatgaagccggagttcgccaagcgcgaggtcaatgtcggtttctccggcggagagaaaaagaggaacgagatcttccagatggcgatgctcgatccgaccctcgcgatcctcgacgagacggacagcggactggatgtggacgcgctcaagatcgtggccgacggagtgaacgccctgcacaccccggaaaagtcggcgatcgtcatcacccactaccagaagcttcttgaatatgtcaggccggatgtcgtgcatgtcctgaaggatggccgcatcgtggccagcggcggttacgaactgattgacaagatagagaaaaatggctttgaacagttctaaaaacatagaccacggcaattatattccttcgcccatcgtgccgggaatgaaggtcgctgacggtgagcatattcgtaaagtctttgtgctcggttcagcagacgctgccgttggagccggtgtcgctgtttccctggtcaccaggtttgtcgaagcgactgatccttatggtattccgtccaacatcgaggtgggggccgccgcggcgctggatcttacggtggtagtactgccgggagtctcggcaaggattccgctgacgattgacctgaccggagcgcattccgaagtcaggctttctggaatatacctttgctccggccacgacgaggtgacgttcgacatcacgatgcatcaccgcactggcgattgctgttcccgacagattttcaacgggttggctgccggtgaagccaaatgcggattcttcggcaagatcgtaatcgcgccggacgcccagagaaccgaggcgttccaggagaaccacaacatactgctttcggattcggcaagagtcaacaccaagccccggctggagatctacgccgacgatgtgaagtgctcgcacggagccacggtcggcaaactgaacgaggacgagcagttctacatgcgctccagaggcatccccgaggatgaggccaaagtgcttcagatgatttccttcgtggctcctgtcctggaagccgtcccggaagagtccagtgacggaagtccgtgccggtcagccgttgccggccaggtcgagaacgccatccgcagcttcgcttagtaatcattaaaaaataacttgaacttaatttttaacgcttacttaaagaccatgattgtcaagacgaatgtcaagctgaatctggggctgagtgtcctgcggaagcgtgccgatgggttccacgacatcgagacgctgttcgtgccgtgctttgatttcggggacacgcttgagatcatcgccggcgacgactacagccgcacctcggcggcgcttttcgctgaatatggaggtcaggacgggtgcgtcggcaagttctgcgaccagaaggagaacgaagtagatctggcacagggaatatccgaggacggaaagttgatgatcacgatcgcccgcaaggagggtgtggactggaatccgatgaaagatttgtgcgccaaggcgtacaatgttcttgctcaggattttgacctgccgcctgtcaagatattccttgaaaagaacgctcctgtcggggccggcctcggcggcggatcggcggacgcggcattcaccctcaaggctctgaacgaactttgcggactcgggctttccggacaaaggctttctgaatatgcctccagacttggcagcgactgtgccttcttcattttcaaccgtccgatgatcggctcaggaagaggagaagtgcttgagccttacgacattgacctctcagagtacgagataaaggtgttgattccggaaggtgtttcggtctccaccgcagaggcctacaaaggaatcgttcctcgggaaacgcgccgcgacggatccggcgagcaggactcaactggatcaccagagcgctgcgacaggttcagcgagcagcctggcaatccagtggttagtcatcgctcaccaaccggacttggcaagccggcagagacaactggcctgaaatccgtgctggcagaaccagtctccgaatggaaagacctgctggtcaacgacttcgaggccacagtcttcaaagcacaccccgagctggccgccatcaagcagtccctctacgactccggcgccacctacgcctccatgtccggctccggctccgccctcttcgccctctacaagaaataaccgtgagcaaaagcgccgatcccgcgcaccagagacagcccacgaccagcctcgtgagcaaaagcaccgctcccgcgcaccaaagacgctgatttttggtgtttgaaatactcttcgtggagaaaaaccacaaacaaaatcaaaagagtctcttggctcagtgccgttccgagaactcgcagccacagaaggtctggttgtacatttcccattccttgatcagggcgcagcgccgttcctgaagaccgccgcggcgccagttctggttccaccacaagacctcatggcggacggactgatgggtttctgcgtttgtctccgccccataaccaatggcgcatccatcaccactggtaccgttcacccgatcgcaggcccagcgaccggcggcgtcaacctgggcgagatccttccaccgggacgaggccagggtggttgtcagcatacgatagccgttggaagaggcatagcgcgcggcacggaggagacggaacttgaaacactcaaggcaacggggaccgcgctccggcatgtcggcgattcgggcgaccggacaatcatcagcggccacacccgtctccaaccggcggacaaaggccagccaggccgcgtgatcatattcatcatcaatggttttcagaccgtgggcggcggcatagcggcgcaactcgtcgcggcggatctcatattcacggaaaggaactatgttggagttgctgaagaatattcccggacgcagcccttcgccgaccatccactcgatgatggcggtcgagcaaggcgcgcagcagcaatgcagcaggatgcgctcccccgaaaggtcgcaccctcccggctgctccggaacaaatccccttttatgaatattcccgttcggcatttctgtaacaaacataacgatttttcttgagaaacagaagtttcagacgaggctgttaaaagattgttaatcaaaagattgacccaagcatcctctactgaaaacaaggggaaagcactatatcaagacgttgctaaccaacgaattacctgccacaagattttcccgcttcacaaattcgcaaccaaaatccgattttgtcgtaagaacttttaatgctaactttaacggaaagagagacagaccggttatcggccggcctccagacagaaccggactttacgtaccggattgccaccgacaatcagaaagttgattggaaaaccattgacaaaacagaaaggctaaaagagctatgatcgaaaaggacgagagattcacattggcggagagatatgtggaagagacgggggtctccgtgttcctgacaggcaaggcggggacgggaaagacaacgttccttaaagagattgtgcggcagacctccaaacggttcgccgtcgtggctcccacaggagttgcggccatcaacgccggcggagtgacaatccattcattcttccaattgcccctttgcccgtatctccctgatgtcaaagagcttgtcacagagtatcagatgccgaagcggatgcgctccctgcggaaggaaagggtgaggatcctgcggactctcgacctgctgatcatcgatgagatctcgatggtgagagccgacattctggacgcgatcgatgacacgctcaagcgttaccggcgcaacgaccgtccgttcggaggggtgcaactcctgatgatcggggacatccagcagcttccgccggtggtcaaagaatcggaaagaccgtacatggagcaagtatattcatcacctttcttcttcaattccaaggtgttgcaaaggttgccgttcgtgacggtcgagcttgagaaggttcaccggcagagtgacaggctgtttcttgacatactgaatgaggttcgctccgggatgccgggcgacgaggccttgaacgaattgaacaagaggctcttccccggctttgtgccgccggaggacgagcgctggatccgcctcaccactcacaacgcccaggcggactccgtgaacgaggcgaagatgaacgcgctggagaccgaggaggcgacattcgaggcacagatcgagggaatattcccggaaaatgcctaccccgccgaaaccagactgcgtctacgggaaggcgcgcaggtgatgttcgtgcgcaacgacacttcgggcgagggacgctactacaacggaaagatcgcgacagtgaagaaagtcaagccggcactgatcgtggaggacgagagcggcgaaagcatcgaggtcaacacggaaagatgggagaacatccgctacggcctcaacgaggaaagcggtgagatagagggaattgtggaaggcacattcgagcaggttcctttgcgtccggcgtgggcggtgacgatccacaagagtcagggactgaccttcgaccaagtcatcatcgacgcgggcgcggcattctcgttcgggcaggtctatgtcgccctctcccgctgccgcaccctcgaaggcatcatcctgaccaccccgatcacacggcgctgcaccttcaccagcgatgaggtctcgacgttcgaaagcagccgcgagccggcggaagaggcgcggctcaaactccccgccatggccaatgaatatttcacctcaaccttgtgcgatgcctttgatcttcaacgccttcgctatctctacaacagggttaaccgaatataccaggtcaacctttcgaacctttaccccgaccaggctggcaggttcaacacagtaggtgtgggcaatgccgcccaagtaggcggaatgttcgacagctccgatggctccggcaaaagcgccccgcagcccttcgagggaatacgatccctctgcgacacggcgcagaaattccagaagcagctccgctacatcacctcgacaatccatagcggcacggcggaagagttccctctcctgcgggagcgcgtcaccaaggcctgcgaatatttcacctcacaattccgtcctttggcctcgttcgccgctccgctgactcttgtagagattgacgacaaagaggtcaggaaagccttcaaggccgcctccgaggaatttctggcagagcttagattccggatgaccctctacgagactatcctgtcggaaggcttcagcacgaaagcataccataagttaaagacggacaacgagttgtcggatgccagatcgttaaaggcattggtcaggtcgctgatttccacacctgagaaggcttcggcatccaaggagtcgattcagcaagctcaacgcccagacgcggttggtgagcctgtcgaaccgtcggcccttcgacaggttcgggaaccggatggagaatcggccacctacactggcagcatccatcctgaactggcccaggcccttgtggaatggcggcgtgaaaaataccagaaagacaacgtccccgccttcatgatcctccaccagaaaacccttctggccatagccgacctcgcccccacaaccaaagaggaactcctcagcgtcaaaggcttcggcaagtcaaagtgcgaaaaatacggcgaagaaatcctggagatcatccgaacggccatgaacagtcccggcagttagcggcttaccgttttgtgtccaatcccgcagccagtgggctacattattgcattcgataattcccgaacaatccccgcagccagtgggctacattattgcattcgataattcccgaacaatccccgcagcaccgttaggcgacattctaaggccgtttcgtagcccgagagtgttccgcggcactattgggcgacgttccgagccgaaaccgtcgccgaagatggcttgccgcacactcaaagcttgcggtaatcaagaataggcatcttccgaagaagtcaggcaaacacgttgctattcaacaaagaggagagccgcggggaagtccttggcgttgagatcgccgggagcctgccacttgagggcgaaactctcgccaccgtagccttcgaagtaacggatacggtacttgtgaaagcctttctgaaggaatatgctgccggaggccacggtgtaacctgtacggacattgttgtcacaagccaggactccgtcgatgtagaaatccgaaccgtcgtttgtcagcagagtgaacgtgtacaagccactttgctcgatcttcataacaccttcgaacacatagccgaaatagtcttttccttcgccctcggaaatattcaaatcccccttctgtccactaagcgtgaccttttccaacttgtcgatctcctcggttgacgacatgtcggctccctcgaagtacttgaaattgacaccttgcctacgcgccttggcctttacggcagcggcataaggaatattcctttcatagactccgcttacgctgccgcctctcttgcagatcgccttgacgcgggcacctccagccagcaccaccgggttgccgtcatagcaggtcgattgttcggtcggctcgcttccgtccaaggtgtagtaaatcgtccccatgctcggggcaaaacggaaactgatgccgtcatcatcgatggccagactctcctccttaaggaacggagccgctatttcccccgcctccagcaggaatgacagaggaaatgaagggtggcttgttgagccacagtacacattatccaccttgaaaatatgtttcaagtcctctttccggcgcttcgactcagcatagcctccggcaggcaggtagatgttctcattgctgttctcggcgctgaggtaaaacggaaccgaacagctgttgtacaaacggaagagaacctcgccgctttccagcgtacggaaacgctcgacctttacagccgccttgatgaaggagagcagcagactctcttcgccgcaaagcatgttgttcgcccaggcaatggttctccgcgcgcgcaacgcctccttgatcgcttcgtcactcttgtctttcgcgaatattatcgtaagatcacgatgattatccttctgatcatacagcatgtaggtcggatagtggctgtcggtgcagccaagcatcgcaagattgtagttgagcgcatggtcaatggcaagcggatagaactccttgtggttgaacacctcgatgccctggatggttccgtccttgatgtggccggcaatgtagtccgacagatcgctgttctgatccggccagcccggatggtttgtcgtaatgaaagcgtcctcgccgcgcgctatctccaacaccttgtcgcattccttggtgtcaaaaccctggctgagcctgtacttgttgaggtcgcccgtaaaaagcacattgatgtgtccaaccggctcgctgcctgttatctcgaaccctcgcactatcttgaggtcgaaatccttcgccgcctcgacagcacagtccaccgccacattcatgtcatcagatcccctataaaccctcggatgcgaatgatgatccgtgatggccagaatgtcaagcccttcaaggtaagcctcatacaccctcatctcaggtgtcacttgcgcatctgaatagattgtgtgcatgtgcaggtcagccgtgtaggcattgaagccgtcaacggacggaaggtcgatcttgcgcgggttgaaagcctttctgtcagtaccaagattcttcccatagaagtccatccactggtaatggatgttttcctgagcattggcacagatcatgaccaacaatagaatgattgtcgagaatcgtttcatgttatgtgattttgtctttcaaaagtacaaaaaactcgcatttttaatgtacttttacaacagttaataataagttgccgcagatttggcaaagttttttaacgattatttaaccacatattcaaaaatcaatgcaggagaggcacactgacagggaacggtatttcaaggagttggcgcagacttccaaggaattctacatcgactacctccagaatttcaagagcgtcggagccggaacgcgcgttctggagatcggctgcggcgagggcggaaacctcctgccgttagccgaagcgggatgctccgtcacgggcattgacctggccaccaacaagatagagcatgccaaggaatatttcggcaaaatgaatatgtcgggagagttcatcagcgggaattttctgaatatgcctcctcgggaagaccgcttcgacatcgtgttgatccacgatgtcatagagcacatcgagccggaggacaagcctgcctttttctttggtctgaaaaaattcctaaagcccgacggaatcgtgttcttcggcttcccggcctggcagatgccgttcggcggccaccaacagatctgtcggagcggtgtctgctccaaagttccgtttatgcatctcttgccggccagcctttacagaggctatctaagaatattcaaggaagatccagccaggatcgctgaactgctgagcatcaagcgctccaaaatgacccccgaaaagttcgagcgcctctgcaaagagactggctttcaaattgttgaacgcaagttgtggttgatcagcccccactacaaggccaagttccatctccgccccacccgccttcgtatgggcctcgaccacatcccatacctccgcaactacttctccacctcttgcttctacatcgtccgtcccgaaccccacctcaagtgagttccgtccgtcccaccagcagactgccttacaaagtcaaacagacaccagaaaacgcttacccctaaagatttgctttcagcacggcgcacacgatgctccaggccacctacagtttccgaggcagctcacacggaacccaaagccgcccgcagatttgcagccggaaccgtcctccagcacaccccaaaggatgatccgccgcaattctgtcgcaggaattacgcacttccgccgattcggccaacaagaattgctcctcaaaccttgccgcaaagccctcctacgcacacaaggctgcaattctacaaagagaatccgagcggccagcccgatctctattgcagttaaagacaaacaaaccaagtaatttcactatatttgtaacaagtcctctgaaaaaaagaaggcgaagaagaaaactcctctccaccttaaatgttttcacaacggaataatccttattgtgatttgcttcagaatggcacaaatataaaactaataaacggaacaaacaataaccaatatgaaaaaagttttaggtctggatcttggtgtaggctccgtgggctggagccttgtcaatgtggatgacaattacaaacccgctgaaattctcggacttggcagcaggataatttcattgtcccctgacgaatcatcagaattcacatccggcaacgccgcctcgaaaaatcagaaacgtacgcaaaagcgtacagccagaaagggatatgacaggtaccagatgaggcgtcaggcactcactgaaaagctgagagaattgaagatgcttcccgacgaacgactgataaaattaccagttcttgatttatggacacttagagcaagagcggcgacacctggcgaaaaacttactttgcctgaaataggaagagtactgtatcacatcaatcaaaaacgcggctacaggcactcgaagagcgatgattccgctgacaaggagcaacgagattatgttcaaaccgttaacaagcgttttcaggaaatcaaagacgaaggcacaacaataggacagcatttcgccataatactaaaagaaagcgaagtcttcaccgaaaaaggcccgttctataattaccgcatcaaggaacaggtctttccccgtgatgcctacatagaggaatttgataggataatggcttgtcagaaagccttttatccagaggaattgagtgacatcaacattaacgagattcgaaacgagattattttctatcagaggaatctcaggtcttgcaaacatctggtgtcacgatgcgaattcatgaccagaagattcttcgacgcggaacataaaccgatcttgaacaactccggcgaaatcgtgatctccggccctaaagtggcgccaaaatcatcccctatatttcaagcgtgcaagatttgggaggaaatcaataatcttagcttacgaaacaaggaaaatgacgaactacacataagtcgtgaacaaaaaaaagaaatttttgaatatcttgacaacaatgaaaagataactgccaccgctctctataagattctaggcatagggaaaggagacggatggtctatggacaaagctcttagcaagggagttacgggcaacaccacaaagacagccattgccagggctctcggcaagatgaacaatcccgcaaaggaaagcttgctgagatttgatctaaggcttaaagagaatggtgtaaacaaagactctggcgaagtcatctatgagattgaccccgaatgtgagaatgagccactatacagattatggcacatcatatattccattaatgacaaggaggcactgcgacaggcattgacaaatcagtttggcattaatgacgaggagtctctgaaagaattgtccaacattgactttgtaaaacagggttacggcagccgttccgccaaattcatgagaaaacttctgcctgcactcattggcggtgccaaatacagcgaggcatgcgacatgattggaatcaaccattccggcagcttgacaaaatctgaaaatgaagcccgtgaactgctgcacaagattcctcaactccagaaaaacgaactacgtcagcctgtcgtggaaaagattctcaaccagatgatcaatgtggtcaatgccgttattgatcaattcggcgacatcgacgagattcgtgtcgagatggccagggaattgaaactcagcaaagaagggagagcggccactgccaagaacatccgcgacagagaaaaacagaacaacgagattgctgaaaagatcaaggaacttggcataacgccttccaagaacaagatcctgaaatatcgtctgtggcaagaatctgggcaaaagtgtttctattgcggccaaccggtaggggcggcagagttcctcaatggcctggacgtggaaatagagcatatcgttcctaaagcgttgctttttgatgattcgttttccaataaggtgtgtgcctgcagaaggtgcaatgcggaaaagagcaatctgacggcatacgactatatgaagagcaagggtgagaatgagttcaatgattacctgcgccgcgtggatgcggcattcaatgatcataaaataagtttcaccaaacgctcacgacttctcaccccggcagacaaactccccaaagacttcatattacggcaactagttcagacccaatatatttccagaaaagccatggaaatactcaaacaagtatgccacaatgtttatggttcgagcggcgaagtgacttcttatctgcgccggatttggggttatgatgagatactgcattcgttggatttaccgaggtatcgggaaggtggaatgacgaccgaagtttcctatgagcatcgtggccagactcacacggaggaacgcattaaggactggagtaaacgtttggaccacaggcatcacgccatagatgcattgacaatagcctgcacgcggcagagcatcattcaaagactcaataacctgagttcaatgaccgccacggcaggagaatcgatgtctcttgacaaatggacatctgctcagccgcatttcagcgtgcaggaagtaagcgataatgtaagcaggatattggtgtcattcaaagccggcaagaaagtgaccactccggggaaaaggtatattcaccgtggagggaaacgtattcttacacaggaaggcttgctgataccaagaggcgcattgtgcgaggaaagtgtttatggcagaatactttctctcgaaaaggcggtgcctgttaaaaaattgttcgagcgggtagaagacatagtcaagccaggaattcgggcgatggttgaagaacggttgcaggcctgtaacaatgatgtgaaagtggcgtgtgcttcattgaagaaagagccactgtatctggatgcggagaagactattcctttagaatatggtacttgctacaaggcggaatatgtaatgaagtatactctttccgcattgaagccaaaggatgttgaatatatcgtggatgaacatatccggaaggtcgtttctgaacgtctttccgaatatgggaatgatccgaaaaaggcttttgcagaaccattgtacgctgatgaggccaagacgattccgataaggaccgtaagatgctatacggatttgcgtcaagtcgcccctgttaaaaaagacgccaatggcaatgatatcggatttgtaaagccgggaaacaaccatcatattgccatttatattgatagcgatggagtgtaccacaaaagcactataacattttggaaagcagttgagcgcaagaaatatggtttgcccgttattatcagaaagcctagggagatttggatgatcatcattgacaagaatattccggaggaactggctgcgggacttccggatcctgattggaagttcgttatgagtatgcagcagaacgagatgtttgttctgggtatggaggacgacgagttcagagatgcgatggagggaaaggattacaagacgcttggggctcatttgtatagggtgcagaagttagagcacctaaatttcagaattcaatatgacactattcttgatgattcgaaagcagcaaaggacatgaagaagttctatgaaattagaggttttaaagcattttgggcattgcacccgcgcaaggtctccgtcagccttctcggcgaattgtccttgaaagatgattaaacgtacattatactttggaaatccggcatatttgtcgttgaaactcaggcaacttgttatcagaaagccggaggtcaagggcgacatgcctgacttcgacgagaacggcactccaagggagatcataaagaccataccgatagaagacatcggcgtgattgttcttgattgcccgcaaatcactgtcacgcaaggacttttagaggctttgctggaaaacaattgcgctgtggtcacttgcgacaagtctcaccttccgaccggactgctgctgtcgctctacgggaacaagttgcagacggaaagatattcctgtcagataagtgcatccttgcccctcaaaaagcagctttggcagcagaccgtccaaagcaaaatccggaaccaggccgcaatgctgaaatatgccactggagaggaagccaagaacatggcactgtggatcaatgcagtaaggagcggagatcctgacaacatcgaggggcgtgccgctgcatattattggaaaacacttttcattgacaatcctcgcttcacaagaggcggcgatgatgtggtgaatattatgctgaattacggctatgccattgtaagggccgttgtcgcgagagccttggccggggctggtcttattccgacgttaggtatccatcatcacaacaggtatgacgcctattgtctggcagatgacattatggagccgtaccggccttatgtggacaggctcgttctggagattgtaaatgatggtgttccagaagcatttgatctgaaagcgaagcgcaaactattggaacttcctgtaaccgaggttgtcatcgaaggtgttcgccgaccactgatgttggcggtaagccagacggtgaattctctacagaaatgcttcgccggaaatctgcggaaattgtcttatccagacatgtatggataggttcagtgaatatcgaatcatgtgggtgctggtctttttcgatcttccgactgacaccaagaaggaacggaagaatgcggctctattcagaaaacgtctgatagaggatgggttcatcatgttccaattctcaatctacatgagacattgtccttcttctgaaaatgctcaggttcacatcaatcgcgtaaaatcatttctgccagacctagggcaagtgggaatattatgcattacggacaagcagttcggaaacatggagttgttttccgaacataagccaaagaagagcgaggatctctatattcaactggagctgttctgatgagatccccggcgctgctgtcaaacaacatttgtcttgtataactcttgggaaaagcggcattccacagatttcggaaacataaagtttgaaagaatcgctgcctcacgctcacgacagaatccaaaaaccgaaaagaatacaaaaaaatccggacagaaacctgccggattttttaattaggcaacaactcttaaaccattgcttttcaaccgcttggagagaaaacgttgttatcccaaccataaagttaaaaattctgaaagcaaatcacaacattcttcgatctatgatttccgccgctgaggttgttatcccaaccataaagttaaaaattctgaaagcaaatcacaaccgcgctgacataatatctcttgacttccatgttgttatcccaaccataaagttaaaaattctgaaagcaaatcacaacgaacgggaggttcgccgcccacgccgagaggttgttatcccaaccataaagttaaaaattctgaaagcaaatcacaacgacacaccaacgggatgtttaccattatcagttgttatcccaaccataaagttaaaaattctgaaagcaaatcacaaccccgcacaagcgatgaagtttgctcttgagttgttatcccaaccataaagttaaaaattctgaaagcaaatcacaacaacttactaatctcataagatattttatgagttgttatcccaaccataaagttaaaaattctgaaagcaaatcacaacgtcctgaatggacagcgtctcactttgaatgttgttatcccaaccataaagttaaaaattctgaaagcaaatcacaacttcgcttcaatattctttacagccttgttagttgttatcccaaccataaagttaaaaattctgaaagcaaatcacaacttgcagtcgtgtgatattttcaggtagagcgttgttatcccaaccataaagttaaaaattctgaaagcaaatcacaactccaacgccgcggacatgttgcgccttttggttgttatcccaaccataaagttaaaaattctgaaagcaaatcacaacagaccggaaggctgtattctgtaaagatcggttgttatcccaaccataaagttaaaaattctgaaagcaaatcacaacgccgggacgccgtgtccgagcatcacgagggttgttatcccaaccataaagttaaaaattctgaaagcaaatcacaaccgacgccgacggcgagattatagaatctgggttgttatcccaaccataaagttaaaaattctgaaagcaaatcacaacaacgcccgtgcctacaagaagaaccgagaggttgttatcccaaccataaagttaaaaattctgaaagcaaatcacaacttgtcatatctttaatgtttatgtttatgtgttgttatcccaaccataaagttaaaaattctgaaagcaaatcacaacctgggggacatccgtgttctcgatgaagtggttgttatcccaaccataaagttaaaaattctgaaagcaaatcacaactggctggaggatgggagtatcgggaggatggttgttatcccaaccataaagttaaaaattctgaaagcaaatcacaactcgtttcgctttttcgccaaaaacctcttggttgttatcccaaccataaagttaaaaattctgaaagcaaatcacaaccatcttcctcttgatgagaatgaaggttttgttgttatcccaaccataaagttaaaaattctgaaagcaaatcacaacctagcgttcggttatcaaactctgtctttagttgttatcccaaccataaagttaaaaattctgaaagcaaatcacaactaaatctagtgagaataattgaatatgccaaatttaattggcttattcctaatgacttatgtgacttatacacctgaagacatgaaaaaaccgctctgttgaagcggtcaaaagggtatttagcctagaatgtccgagccgtcgtcccaccgttggaacatcgggtctttctctatggcctctatttcctccttggtgtgagttcgctcgaattcttcgacctttctcaaatgtgccatctgggaggccttccacatctcctcaaactcctcgtccgtgggcattcttgttatcctctgtctcataattcctgtatcgtgaaatagtagatgtcgtcttccttatcaacagaaacaaactaaagcgacttcctttgtcaaaaagcacttcttgttgattttcagatgtaaagataccattaaattgtgagatattcgatatgtacctcccgttttttgacggaatttcaatgtggcaaacagtatcgttgcgtttgcttctttaaaaagacatctatcctcgaaaatactgccaattctttaccaacttaatttttaacgcttactaaatatcaccgttcccgttgctgtgtctgtcggaacaacggtgactcggggtgtcgtcacgcgctcgattgctgacaacagaagacgatcggctcctggaaaagtggtttcttagggggtatcatcgaaacaatttatgttttttataaatcgtatgtgtttcttttcgttttgcggatttgaaattactaacttgcgggcaggttccggaaggggttccgggccgaatgcgacaacaatgaccagactacgcatcaacgatggagacttcaaagaacaaagaggccgtaaggcgggagccggtggccggacaaccattaaccaagagaccattagacatggtgccttcgaaaaggaggctccggagcaggggacgatgtccgccggggatcagtaccggaagcggtaccggcactgccggcggctgatggggagggctctgagcgcggcaggccaaggggacagagaaagggtatagagaaggttgccaagtcgttgctgtctttgggtgtccctgtagatcagatcacggcggccacagacatgaccactgagcaggttgaaactctgaagtaataatttcgtaacatataaccgattggtagtaagtaaagcacgcttgtggtctggaaattcataccacgtgcttgcttggtcgctaacttatatgataagtgccacgccgagacaatggtcgtggaaagggaaactggactatgacggggaactttacttttacggaagtctttaccgcgctcggcgaccttttgatgccgcgggagtgcattgtctgcgggcggattctcacccttcgcgagagtcacatctgtattgactgtcttgccgacctgcccagaacgtttttctcgaatatgccgcacaaccaaatggcagacagattcaactcactgatccagcgggatttggatgcaaccggaggttttgaggaatattcccgggccacttctctgttcttttaccgttcccagaccggctacaggctgatcacccaaaggttaaagtaccaccacgactaccaggcaggacgttatttcgcatcgatgcttggccgggacatgtctgcgtcttcgctttacagtgatgttgatgccgtgattcccgttcctttgcattggacgcggcggtggtcaagagggcataatcaggccgagatcatagccgatatcctggcgcgctcgctcaaggcggaacttcgctcagacatccttagtcgtccgcatcgtacccgcacccaaactaaactctcggtcaaagacaagactcgcaatgtcgcaggcgcctttcaggtaaaccggctgaagaatgtcactgaatattcgcacatcctgctggtggatgatgttttcacgacgggggcgacgcttcatgcctgtcacagggcgttgagagccgttttcccgccgcacgtccgcataagtgtcgccacactcgcctgtgtgggaatatgacaggaaccttacttcctgcttacgaatcataaggagaaacgttttaaatctgtgatttacctaattaacgtgctttggaagccgtgagccgccggcttattaaaaccaactaaaatttcccttattgtttatagaactggaaataaaacggttaagtggaataatcggtgaaaaatgcaaaaaaatattaaaaaatatttgcatgtataaaaaaaagctgtacctttgtactcgggttgagcaaggaggttctctccccgatcaacctattggttattagttttagtgttattaattatgtggttagagtgagagtccacgcgggatgcgtcgacgctcattttttttgtattctcccctaccctcatccacgggaaaggcagttccggtggacaaactgggcaagaccggacggccatccacgggaaaggcagttttggtggactaactgggcaaggctggacggccatccacgggaaaggcagttttggtggactaactgggcaagaccggacagccatccacggaaaggcagttttggtggacaaaccggggcttcgccagggggacagtgccttgggcttgccgccacacttgcccaaccgccggactattcgtaaatttgccggtagaaatattcgataactatggtagagattggaataaaaggccatcaggaggaaatcgtgacggaggatttgaccgcgagccacatcgggagcggaactgtcagggtgttcgcgacacctatgatgatcgcgcttatggaacgaaccagccgcatgagtgtcaagccttatctggaggatgggcaggaaacggtcgggactaaagtggacgtgacacacgtttcctcaacaccggtcggactgaaggtctggtgcgaaagtgaggtcgtggatattgaccgaagaaggatcgtcttcaaggtcgccgcctatgacgaaaaagggctcataggtgagggtacccatgagcgctttgtgatagacgtggccaaattccaggccaagacggaggaaaagattaaagacaggtagtcctaagaacaaagactacttctttggagagtcaagaatcgtcacattatccccagggttcccaggcatctcaagccagaaccaattgagtttggtgttgcctttcttgtcttcggccaccgctccatagaaaagtttttccccggctttccatccctggcccaaattgctgaacttgtggatggacgtgttggcgtaggttccggcctgatgagtatcatagcattcgatcacatactcgctgaatgctgattcggtgtcgtgaccgcctccgatcacattgacgttttccgtcgtcgtgtaataattggcggcaaggctgttaggcacattatggattatcagagtgttcttctccgcgaagaccctgtactcaaaggcaaccgctacccaaggtgttgtcgcggcagcttcggtcgtgaactcaaacgcagcctcgttggatgccacaagaccggactctgctgacggaactgtctgtacataaataatgtaggctgtagaggctgtcaatccggcaagtgtcacgaacggatccccgaatgccttgtcggcatcgccgttcaatgtcttggatggatcgtccttcgccacaatcctgtacttgtaggtagctccttccacaacattccaagtaacgctcacgccgacatctgtaatggcacttgccctgaactcgggagcctcggcgcgaggtagaatgccggtcttaaaggtgactttgccttcttcagaattcaggtaatttgtctcaggggcggctacggcagagaccgtgaagacatattcagtgtcctctttgagattagagaaagtcttggccacgtcagtgaagatagtctcctcggagaccaccgtcgcaggatccgcggcctcacacagagtccatgaatagccggcagcattctctacagccttccatgtgaccgcgcactcaacggtcgtggactccacaaccgctttaggctcaggggtttgaagttgaattttctcggcatccttgtcgcatcccgcaacaacgagcacagaggccgcgatggcggcctgaacaaacagattacttttcatgtctttgttttgttaaattcgttgccgaaagttagaaatagttttggagaatccaatcatctgatccagataaattgtcataatttgtttaagtaaccttcaaataataacctgcatcatcttaaggaatcttttcggtctatatctcttttctcatcagtcatgtgccaccggcacactccttcttcgaaaatagatctatcctcgaaaatcttctcttaatctgaggcaacttatttttttcatgttactaagaaagcgtaaagaaataagttggtaaagatttggcggtattctcagacaatcaaatcaaaacagctttctgtaaaaagggcgaaaacggattccggaatattcctgagttttttgtaaatttgtagaatcgcgggttgcggaagagggatccgtataatacggatagggttcatttaggacatacattgacatggcaaaaggaaaggtgctggaggacactccgctcatcaaacagtttttctctgtgaaggctcagcatcctgaggcggtgctgctttacagggtcggagacttctacgagtcttattccgatgacgcggtgctggtcagcaaggttctgggcatcgtccagaccaagaaatccaacggggacaagggctacatcgagatggccggattccctcaccacgccattgatgcctacctcccgaaacttgtccgcgccggctacaaggtggccgtctgcgatcagttggaagacccgaaattcgccaagaaacttgtcaaacgaggtgtcaccgagcttgtcacgccaggagtagccttcaatgaccagcttctggaccagaaggagaataatttcctggccggcctcacattcgacagggaccggtgcggagcggctttcctggatgtctccacaggctcgttccaggtggctcagggatctttggactacataggcacgcttatcgcctccctgaacccgaaagagattgtggttcagaggggtttcgagaaaggggtcaaggaaaggtacggggatggactcttcatctccacaatcgaggagtgggctttcgtctacgatgccgccgtcgaaaggctcaggaagcagttcggcgtggagtccctcaagggattcgcggttgaaggctttcctttgggaatatgctcggccggggcgctgatggtctacctggagcagacccagcacacggggcttaagaacatctgctcaatttcccgcatcgacgaggacaggttcgtgtggatggacaagttcacaatgaggaaccttgagatattcaattccgcagccggcggcgagggcgtgtcgcttgttagcgtcatcgacaaatgcacctctccgatgggcgcgaggcttctaaggagctggctcgcgatgccgataatggacatcaaggagctgaacagccgctacgacgttgtgcagcacttccttcagacaagggacgaccttgacaaggttcaggaatatgtcggcgagatcggcgacctggagaggatcatctcccgtgccgcgacaggtaggatcgctccccgcgaggtgatgcagctcggcaggggactctcccggatggaaccgatagcgaagctatgcaaaggccgcggtgtcaaagccttggacacgctggtgggcggcatgaagaactgctcggagcttctggagcgaatcagcgggacgatgacagccgagccggcggcagccgtggggaaaggagaggtcatcgcctcgggagtggacgccgagctggacgagttgagaggcatctcctccggcggcaaggactacctcctgaagcttcagcaatccgaggccgagagaacaggaatatcctcgctcaaaatcagttacaacaatgtcttcggctactacatcgaggtccgcaacgctttcaaagacctcgttcctccggagtggatccgcaagcagacccttgtcaacgccgagcgttacatcaccaaggagctcaaggaatatgaagagaagatcctgagcgccgaggatcgcatctatgccattgagaccaggatttatggcgatcttgtggccgagatccagaggagcatccctttgatccaggcgaactgccggatcatcgcccgtctggacgtgctgacgggattcgcccaactggccaatgacaaccgctacagccgccctgaaatgaccaaggatctgacacttgagatcaaggcgggccgacaccctgtcatagagacacttatgccggcgggcgaggaatatgttcccaacgacatattccttgacaacaagaaacagcagatcatcatcctgaccggtcccaacatggccggtaagtcggccttgctccgccagacggccctcatcgtgctgctggcccagatcggctcgttcgtgcctgccgaaagcgcccggatcgggtacttcgacaagatcttcacaagggtcggggctacggacaacatttcccgcggagagtcaaccttcatggtcgagatgctggagacctcgatgatcctgcacaacctttcagagcgttccctggtgcttctggacgagatcgggcgaggcacctccacctacgacggaatgtcgatcgcgcgtgcgatcgtcgagtacatccacgagtacggccacggggccaagacgcttttcgccactcattatcacgagctcaacgatcttgaggagacctattcaagagtccgcaacttccacatcgccgtgaaggaggtggggtcgcaggtgatcttcctgcgcaagctcaaggagggtggaa

SEQ ID NO: 895 - DNA, 23654 bp, synthetic construct
  misc_feature 1..23654: note = Synthetic
  source 1..23654: mol_type = other DNA
ttccgtaatctttttcaatcttgtcgattgttgcctggagcgccttcagtctggcggcgttcgcttgggctccttctgcttcttttgccatacttaatacctttagatgttatacttgcgggcatcctgaaccgcatttacaaagataacaaaactatgcggaatatcacgcaaaaaatgctatttttgtgccgatgaaaaatcggcttgttctcctgctgttctttatgggcctgtccattcaggcgcagcccctttccgcagaactctttcagctcaaaaggctggacattcccccgggacaatactccggcatctcccacgtgagcgaggacatctatgccgtcgtccacgacaaggcggcgggaggcgggctgttcttttttacgatcggcttcaatgaagacggcacgctcggcccggtatcggcctttgagaccgacgccggcggccccctgggacgggacaacgaagatgtcgtgtatgtgcctgaaacccagacgctttttgtttcgtccgaaggcgaccagagcatccgggagtactacctgaacgggcagcccacgggacggaggctccaggtgcccgcccctttcctctcacccgggcgaaacgccggattcgaggcgctcgcctatcgggaaggccggttttggaccaccaccgaggctccccttccctccgaaacgctgcatcgcctgcaaagtttccatctgtccacgctgaaggccggaaaaacgtggtactaccgggccgatgagcctgccgtccccgccgccgagtcggcacgcgcccaggcctatgttcacgggatatcggcccttaccgccctgccggacggccgcctgctggtgctggaacgggaagtgtatgtgccgcgggggcgtcttctggatatgatccaggctttcacctgcaccagcctttttgtggttgacccgctgaaagacgacggagaggtgctggaaaaaacgctgctcacacgcttccacacctctttcataaatctggccaattacgagggaatgtgcctgggacccgttcttccggacggaaggcagacccttctgctcctggccgattcccaggacggcggacaaggtctcaccggagaatacatccaggtactgacccttaaactgacccctaattgatttccgaaagttccagccagcgcatttccgcctggtccaactcccgctgaagttccccgtaacgggttgcggcttcctgcaagctcgccgcatccagcataccggaagaaagctgctcctccagatgcaatttctccgcttccagggcgggaaggcgatcctccagcgctttcaactcctgctgctccttccagctcagcttgcgctttgccgctgtcttcgggacatgaagctttgcgggcggctgcttttcttcggactttttctgcccggcttcaaagtctttgatgaaactgcggtactcggtataattccccacgaaatccttcactatgccgtctccgcagaacacgaaaaggtggtccaccagacggtccaggaagtggcggtcgtgggaaacgatgatcagggagcccttgaactccagcaggtattcttccaggatttccagcgtaacgatatccaggtcgttggtgggttcatccaggatgaggaaattgggctgcttcatcaggatggtcagaaggtaaaggcgccttctctccccgccggaaaggcgttccaccgggttttgcagcatatcgtgcggaaacaggaagcggttcagaaggtgggtgtcgtttaccgtctccagtaccgtctggcccggtttgaactgcatcccgcgctggtggtaatagcctatcttcagggattctccccggtcaatcaccccttccaccacaccgcccatttccggcctccagccacccgtgataagattcagaaaggtggttttcccggtggcgttccgtcccacgattcccactctttcgtaccgctggaaattgtaggtgaaatgcttcaggtagtatttttcattccagcggaaactcacgtcccggcagttgatgactttattgcccagataggtgccggcggcttttgtttccgacaggtccaccttctgctggatatacgaatcctgggcccggtctttgatgtcccagaaagcctgcttgcggtatttggcttttccggtgcgggcacagggggtggcgtgcatccattccagttcccggcgatagaggttccgcacccgttcggtctcggcattgaaattgtctatccgctcctggcgcttctccaggaaattcatatagtcgccccgatagatatagatattcccccggtccatctccatcaccgtattgcacacccggtccaggaagtagcggtcgtgcgtgaccataaaaagggtgcagcgcctgtgtttgaggtggctttccagaaactcgatggcatcgatgtccaggtggttggtgggctcatccatgatgtagaaatcggcctcgccggaaagcatcctggtaagcgccacccgcttcacttccccgccggataggtctttcatcagcttgtccgggtctgtcaggccaaactgggagagaagctgagtgacccgcagctcatactgccacagatggtccgaatccaggtcccgggtccagtcctgagagctgtccattatctgccggaaaatggatttctccgggtcgtagcggtactcctgctccaaaaaagcgatgcggatatccttgaggaacaggaccttgccgccgctgtcggaggcatcggccccggccagaatcttcagcagcgacgttttgcccgtcccgttgggggcaatcaacgccaccttgtcgccttcattgatattgaagccgatgttccgaaacagcaccttggggccgtaactcttggaaatgttctctatttgcagataacttgccacaaagacatatttacggattcttacaaaacaggcacgctaaatcactcccgatcccagcatctcctcgccgtcataccagacggcgaactggccgggggaaatcccccgctggggagcgtcgaacaggatgtacagcccgctttcgcggcggatgagcgttgtgctttggagcggctggcggtagcggatgcgcacgcggtagcgtctcatttctccgggctgcatgacaaggtcgggcctgatccaatggatttccccggggactacccggaggcagaatcggctcaagcctttgtgggcgtgcccttcccccacataaacgcggttgacttcggtatcggtggcaatgacgaaaaccggttccgtatggccgccgacgcccagtcccttccgctggccgatggtatagaactgcgcgccctcatgcgttcccacgattttcccgaaagggttctctttgtaccgcgttttcttgatgtgacgcctgccgctccggtaggtttcggtctcaaagcggatatcgtagcggaggggcattgccagccgcgtcaattcctcatccgtcaaggccgatagctttgcctcctcgaacggactttcgccgaggggccggccgtccgaagtcaggaccttctcttccggagcgtagcggacagttctttccaggacggcatcggccttcaggagcccggagagcgtgttttgctgccagttgtacagggggtcggcggtgtaataggcgtcgtacacctccaccacgtctccttccaccgaagccagtttctgcttcagaaaggtcggaagatccaccttccccacaaagcagagcccctgggagtctttcttctcggccgatggcaggtccgcctccctggcaatgcgccggacctccggcttggagatgtccccgatggggaaaagggccttggaaagctgctcctgggtgagctggcaaaggaaatacgtctggtccttgttcgggtccgccccctccaggatacgataaatctccctgtcatcctgtacgcagcgaaggatctccctccggcaataatgcccggtggccacgtaatcggccccgtacttccgagccagctgaaggaaggcgtcgaacttgatttcccggttgcacagcacgtccggattgggagtccggcccttggcgtattcgtcaaacatatagtccaccacgcgctgacgatattgtccggacaaatccacgaaatagaagggaatgcctatcttccgggccaccatttccgccacgaagcgatcttcctcccactcgcagtccccatgaagggtgctttcggcatcgtgccagttttgcataaacattgcaaagacatcgtagccctcccgtttgagaaggtatgcggccaccgacgagtccaccccaccggaaagccctacgcaaaccttgattttgcttttgtccatcttgcaaaggtacgcaaaatccccgaattccaccataagcggcaggccatggggtggaaacggccccatcgccccgcagacagtctaacggagcttgtccaaaagcagttgttccatccgggcgtacccggcggcgttgggatggacggtatcgccggagaactcgggaaggatttttccgtcggggcccgccaggacctcggcataatcgatgaaggtgatgccgtgccgctcgcaataagccctgaggcgggcgttgagggactgcaccttctcgaaagtgtcggtgatttccggccgccagcgcagcgaataggagggaagtagggcgcagatgaccgggcgcactccgttctgccaggcaaggtctatcatactgaggatatttgcgtatgtaaggtcttccacatacgggtctcccatattctgggcaatgtcgttgattccgcccaggagcacgaaagcggaagcgtgaatgtccaggacatcctgccggaatctaagcagcatctgggcggtctcttccccgctgattccccgcccgacaaaaccgttctgcgcaaagaagtccggacgctgggaggcccagccgtcggtaatggaatctccatacagcacgatacggggggtgcagcagacagggggaagcgcctcattggcggcggcataacgggagaggtgggccacattctgggcctgggcggcgaacagccctgcaaaggcggcaaaaacagacaggaaacgtttcataaaactcaaatttcttcaaatataagtattttttcgtacttttggggcatgaattatctcatcaattcctgcaccgatccgcactggaatatggcgcacgacgaattcctcctggagagcctccgggagcaggttttctgcctgtggcagaatcggccctcggtcatcatcggccttaaccagagcccgtatgccgaggtggatctgaaatatctggagagccgggacattaccctggcgcggagagtcaccggaggcggcgccgtctatcacgacctgggaaacctcaattacagcatcgccggtcccctggccgatatggaaaacgcctacgggctgatggccgaaacgctgcaaagcctgggggttgacgcccagaggtcgggcaggaacgacatcctcgtggacggccgcaaatgctccggctatgccaagcgactgagcagggaccggatgatgattcatggcaccctgatgtgggacgtgaacctggaaaccctcaccagggccctggccgtccccggcagcaaactgcaggcagccggcattgcatcggtccgaagccgcgttgccaacctcaaggattatctgccccgcttccacgaccttcgggcctttcaggacgccctgcaggagaaactggccggagacagcccggaaatccggctcactccggagcagatccgaaacatcgaccaaatggccgatggaaagttccgcagctgggaatggaatttcggccgctccccttccgccagctttgccgccggccgcaaattcgcctgtggaaccatccaggtacaatataccctccggcacggcgttttcgagagcctgatctttggcggggactttttggggaaccgtccggctgagcagctggcggccgcccttatcggccaaaaaccggaggcgctgctccggatgtccgttgccgactatttcgacggcgtcaccccggaagaattggccggcctgttctgattcatcttttttgcctatatttgcaataccataacagaaacttactatgtccagacctggtaaacccttcgggtggattatcaccctcgttgttttggccgccctcgcaggagtggggtatttcaagtacctctgggtattctccgacgggaccaaaaccggagaactgaactcgctcaccctcacgggctacgttttcaaaacctatgaaggagagatgattctcaccggctacggcagcaagaacgcctccggaacggtccagtccaaaactttcaaattctccgtggccgataaagaagtggccgaaaaactctcccagatgaccggcctccgcgtcacggtccactacaaggagttcaagggcgccctcccctggcgcggctacgaaagggccatcgtggacagggttgaagaagaccccgtcggctccacccattaccgtaacgaagatccctttttcctttaagtcatgataaaacctttcctcgccgctgcaagcgtccttctcgcctgcggcatcgcctattcccaaaatgtcgtcatcgatacccgtcccgcccacgaagggaaggacctcacgatggaagaagccatctacaagggtgcaggctattcccggatgccccgccttttcctgcaggccgatggtagcattggcgacaagcccgcagtcaggccgcaggagcgctataccctgtttcaggagcgcggcagcctgatggcccgggacaatgaaaagggagaaagctttgtcatcgccccctccgacgggcccaatctggttttcggagaaagcgtgagccggaacgagttcggtatcgacgccggctggtatatgagtccggacagttccaaggtggccttctaccggaaagaccagagcaaggtgagctggttcccgctgctggacatccgcacccgcaccggagagctccggcaaatcaagtatccgatgaatggaatgcccagcgaagaaattgccgttgggatatatgattttgccagttgcagcacggtctatcttcaggtaaacgattttaccacagaacgttacatcaccaatatcagctggagccccgacagccgctacgtctttgcccaggtattggaccgcagccagcatcacctgaaactgaaccagtaccgctcctgtgacggcagttacgtgcgcacccttctgaccgaagacaacgaagcctgggtggaaccgcaggaccccatccatttcctcaagggaagaacggacctgttcctctaccgcaccgacaaccgggacggctaccgcaacctctacctggtggacaccctgggaactatccgccgcctgacggccgtggatgccgatgtggcctatgtggacaacgacggaacacaggtcttttacacctcggcggaggtttctcccgtggagaatcacctgttcaaaataggcctgaaactcccccgcaggaatagcgtgaaaaaggccgggatcggcaaacccgtgcaactgacggccggccgaggctggcaccgcatccaactcacgcccgactgccgctggatgctggatgcatggtccaacacctccacgcccatccgggtctatcggcgttccacggacggaaaagtgaatgagctccatttcgagggcccggatccgctggagggatacgcctcctgccaggtggaactgggaaccgttcccagcgccgacgggcagttccgcaactactatcggctcatttaccccaaggatttcgatccttccaggaaatatccgctcatcctctatgtctatggagggccgcacagccagctggtgcaggatacctggcttggacaaatccggatgtgggaaatgctcatggcacagaaaggctatctggtctatgtgcaggacaacaggggcacaccgaaccggggttccgcctttgaaaaggccatcaaccgccgctgcgggcaggaagagatgaaagaccagatgataggcatcgaccggctccggagcctcccctatgtggacagcgaacgcatcggcgtacacggctggagctacggcggttatatgaccatttccctcctcacccactatcccgacgttttcaaggcaggcgtcgccggcgggccggtcatcgactggaagtggtacgaaatcatgtacggagagcgttatatggacaatcccgagaccaaccccgaaggcttcgagctcacctccctggtgaacaaggccaaggacctcaagggaaaactcctcatctgccagggcgccattgacgatgtcgtggtatggcagcacagcctcagcttcatccagcagtgcatcgacctggaaatcccggtcgattacttcccctaccccgtagccaagcacaacgtctccggacgcaaccgcatccacctgatggacaaggttacgcagtatttcgaagactacctgtagcctatccgttccggcatttccggcggtcgggacttcgatgagaactttttttcgtatctttgctccgtggacagatttgaaatcatacgccccgttgccggagatgcatttcccgatgcgttgtcctccctgttctcacgaatggaggagtatttccgtaaagaggctgcccaaggccgttttcccgtatttgtccgcttcttcctgagcgacgcgcagaatcaggcaaaagccctttgggaggccctggagggaaggctcccttccgtcagcaagccggcggtttccattgtggagcagcccccgctcgacggcagtcgtatcgcggctctggtgcagacatcagcggaaaaaccaaaattccttttccatagcctgcgcctgacggaagaagaagctgccggacaggactcctacacccagtcccgtctgcttttcgccaaatacctggaaatcatccgcccgctgggccttgaactgaagacacactgcgtcaggacgtggatatatgttcgcgacattgattccaattatgccggacttgtgcaagcgcgcaatgacgtattcgccgaagagggactcagccacgacacgcattatatcgcatctaccggcatcggcggtgcgactgagggacgcgcggccgtcgtggcaatcgattttctgacccgccctgacatccgtgaaccggacaagacctacctgaaggcactcacgcatctcagccccacgcacgattatggcgtagccttcgaaaggggggtccggctgtctgacggacgtgtttttatcagcgggaccgccagcatcgacagccgtggacaagtcctttacgagggagatgtcctcgcccaggcggaaaggctcctcgaaaacatctccgtgctgctcggggaaggaggcgccaccttggagatggttccttattttgttgtttacctgcgtgacatttcggattattccctggttgacggctatatgcagcaacgctttcccaaggtccccagaattatcctggaagctcgcgtctgccgtccatcctggctcatagagatggaatgcgaaatccctccgcgagtttgcttgtagaatccggacccgcccccggggctcaagcggcaggaagaaatcaaaaaagatttggaaagaacaaaaagattacatatctttgcaatccttttgagggcatagctcagttggtttagagcgcttgcttgacaggcaagaggtccgcagttcaaatctgcgtgtcctcacaaaagagaaagaccggaatcccaaattccggccttttttgtatcttagaaaaatagagaaacctatttgtaaaggtcgaaacaaatcactatttttgtaaaaaggcgaagattactccccgccttgaatgttttcacaacggaataatccttattgtgatttgcttcagattgtgtgcaaatataagaatatttctttttctttcaaaaaactatgaaaaaaatactcggccttgatcttggtgtcggttctataggttggtgccttatccaaacggacaatgatggaaatccacaagccatcctggggattggtagtcgcattgttccccttagcacggatgacacgaatgaattttcttccggcaatgccatatccaagaatcaaaaaagaacacagaaacggacaatccggaaaggatatgaccgctttcaactccgtagacaatatttaaccgaggaactcagaaaattggggatgctcccagatgaggctcttatcaaactacccgtactcaagttatggcagttaagggcagacgccgcaacccctggcaaaaaactatcgttgccagagattggccgcgttctctatcatataaaccaaaagagagggtatcggcattccaaaaacgacgaaggagaagataagagccaaagggaatatgtgcaggcaatcaatgaccggttcgccaccatcaaggcagaacaaaagaccatcggccagttttttgctcaaaaattgtccgcgagcgccataacaaccgataagggtcaattctataccttccgcaccaaagatcaggtctttcctcgcaaagcatacgaagaagaattcgatcagattattgcttgtcagcgcgtctattaccccaaactcctgacagaccaaactatccgtcgcctgcgtgacgagatcattttctaccagaggccactaaaatcctgcaaacacctgattagccgctgcgaattttctctgagagaatacaaaacagccgacgggaaaagcatcatctccggtcctaaagttgctccgcgttcctcccctcttttccaggtctgcaagatttgggagtcggttaataatatagaactgaaaaaccgaaatggagaatcctacccgtttacagccaaggagagacaagtattatttgacttcctcgacaacaacgagaaactcaccgtaacggatctcaaaaagattctgggactaagcgtaaaagagaaatggtggggtggcaaagccatcggaaaagggattcaaggtaacatcactaaagtcgcactcaaaaaagcactgcagggacacgaagacctgctctcttttcagttaaaaagtgccgggtcacacttcatcgacactgagacaggcgagatcctacaggaaatcactccagaattcgagaaagaacctttataccgactctggcatatcgtatattctatagaagatccagccgaaatggctgccgcactttatcatcagttcgggattcaagacccgaatattatcacgcgcctgaccaagatagatttcgtccagcccggatacggcaacaaatctgcccgtttcatccggcagattcttccttatcttcagaaaggaatgaaatacagtgaggcctgtgactatattaatatcaaccactccaatagcctgactaaagccgagaacaatgcccgggaactactcccgtatatgacgccgttgcagaagaacgatctccatcagccggtcattgagaaaattctcaatcagatggtcaacatcgtgaacgctctgctggacaaacacgggagtttcgatgaggttcgggttgaactagctcgcgaactaaaacaaagtcgcgatgaacgcaatcatgcctatctcgataacaataagagagaaagggagaacaaggttattgaggcacgtattcgggagatgggaatccgcacctcgagaacccgagtacagaagtaccgcctttgggaagaagcaaagcatatttgcttctattgcggtcagcctgttggcgttaaagaattcctccaaggggccgatgttgaaattgaacacatcatcccccgctcactttttttcgacgactccttctccaacaaggtgtgcgcctgccgtaagtgcaatgcggagaaagggaaccggacggcctatgattatatgctgcaaaaagggcaaaatgagttccaagacttcaccagacggatcgaggaggcttttgagaggaaagaaatctccaagaccaaacgcgaaagactaatgacaactgctgatgatatccctgtggacttcattgaacgacaactccggcagtcacaatacatcgcgaagaaagccgttgaaatgctgaagcaagtttgcagaaatgtatggacgacaagcggcagcgtaactgattttatcaggcatcagtggggttacgacaagatcctccacgaattaaattttgaacgttatgattttgccggtcaaacagaaatcatcacttatgatcatcgtgggcagattcaccaggagaagcgtataaagggatggacaaaaaggcttgatcaccgtcatcacgccatcgatgccctaaccatcgccagcacgaaacagtcttacatccaacgccttaaccacctcaatgcatcccgtgataagatgtttagtgaacttgagagccagacagatgaggtcaaggagaagtattcccttttggagaaatggatgagggagcgccctcaccttccgactgacaaagtaatggaagcggtggatggcattcttgtttctttcaaagctgggaaacgcgtatctacactcgggaaacgatacacttataaaaatgggaaacggacaatcgcacaaagtgggattgtagttcccagaggagccctcagtgaagaaagcatctatggcgccatttcctgtctggaagataacgttcctttaaaggtaattttcgaaaaacctgaaagcatcttcaagccctatatcaaagagaaagttgaagaacgcatcaatgagcataatggggactggaaagccgcactaaaatccctcaagaagaagcccatttatctgggagataacgagacaaagcctctggaatacgccacctgctggaagaaagaattcgttatccgctacccccttattaatatcaaaaagaaagatgtcgattatattgtagattcgcatatccgtcagattgtcgccgagcgaattgaagctgttggagaaaaagaagcattcaaagagcctctttatgccgataaagccgggactattcccatcaaaagcataaggatgttcactaagttgaatgaaaagtctgtcgcccctgttaaatacgaagggtgcactcccgtaggtttcgtcaagttgggaaacaaccaccacatcgccttgtatcgggatgcttcaggaaacttatccgagcatgttgtctccttctggaatgccgtagaacggaaaaaatacggaattcctgtgattatcgaggatactgctgtgctttggaatcagatggccaagaagaatctaccagagcatttcttaaacagtcttcctcctgccggtcttaaacttgaaacaagcctgcaacaaaacgaaatgtttatcctaggtatgccagaggaggattatcagagagccatcagggagaaggactataaacagctgaataagtacctgtaccgagtgcagaaaattgccacccaagactattattttcgatttcacgtggaaacggttttggacgattctgccgaagctctttccagcaagaaatattatcgaacacgaatcggtgcatttatgaagttgaatccccacaaagtcctcgtcaacctattgggagaaatcgccgaactatgataaagaaaacactttatttcggaaatccggcctatctatcctgcaagtcgaagcagttggtcatcaaaaagcctgatgcaacgggggatatgccggattttggaattcccgatgccttcacggtaatcaaaaccatccctatcgaggatatcggggttatcattctggaccatcaacagattactgtcacccagtcgcttatgtcgacacttttggacaacaatagcgcaatcataacttgtgatagcaaacatctgcccacaggtcttattcttccactaaccggccacaccattcagaatgaacgcttccgtagtcaactggaggcatcgcttccgctcaggaagcagctttggcaacaaacgatagaatacaagatacgtaatcaagcgtcaatgctgtattactccacaggacagtaccacaacaatatgtcggtctgggccagctccgtcaaaagcggagatagtggtaatatggaagccagggctgccgtttactactggaagacgctctttcctgacaatccggatttcatccgggggcagtatgaggaggggccaaacaacttgctcaactatggttacgcaatccttcgtgctattatcgctcgggcgcttgtcggtagcggaatgttacccacgttcggcattcatcatcataaccggtataacgcttactgcttagcagatgacattatggagccctacaggccatttgttgataaagtcgttttcgatttgattaagcagggatacggggccgagctggacacatcagtaaagcagaagatactcaccatcccatccgttgaagttctaatggacgggatacgaagacctctgatggtagccgccagtcagactacagcatcacttgccaagtgtttcaacggagaactccgaaaggtttgttatccatctttcgaatagtggatcgcttcagtgaatatcggattatgtgggtgcttgttttctttgacctcccaacagagaccaagaaggagagaaaagccgccgcaaagtttcgaaaagatttgatttccgatggttttctgatgtttcaattttctatctatattcgacactgtccctctgcagagaatgccgaaacacatatcaagcgggtgaaaagctttcttcccgatttaggtcagattggaatcctttgtattacagacaaacaatattcccggatggaactgtattctgaacacaagattcgcaaagcacaggaggaaggacttttggagcttttctgagaacagaaaagaaaaagactcattataaagcataaaatccagtcttttctgactgaattttatttttcgacaataggcattaacattctaaaaatcaagcaattacaccgactttgctgttgctgcaatgtcaaaggtacaaaatctgaaagcaaatcacaactaatgctgcaaacgcttgcaaaggtacttagctgttgctgcaatgtcaaaggtacaaaatctgaaagcaaatcacaactaatgtcgctttgctcctcgcggctcatttgctgttgctgcaatgtcaaaggtacaaaatctgaaagcaaatcacaacgaaaagcctgatggcgtagtaatacctgggctgttgctgcaatgtcaaaggtacaaaatctgaaagcaaatcacaacacgacgcaggaagcggcgacgccatctggcgctgttgctgcaatgtcaaaggtacaaaatctgaaagcaaatcacaacagactgctgtacctgttaatagacaaaatttgctgttgctgcaatgtcaaaggtacaaaatctgaaagcaaatcacaaccgacagctcttcgtccgtacaacggggctcgctgttgctgcaatgtcaaaggtacaaaatctgaaagcaaatcacaacaggaactgataggagccctcgttcgggtatgctgttgctgcaatgtcaaaggtacaaaatctgaaagcaaatcacaacccttgaaggcgtcgaagagcgtctccagcaactgttgctgcaatgtcaaaggtacaaaatctgaaagcaaatcaccgaaaaaaagagtggatgttaaatgaaatgctattttttgccctttttctgttttttgcttttaagaaattctttaaggacgtcttcactgacaccaatggagtcaagattcgtcttgatatgtgttcttctaacggggctaatatgagtttggacaataactggtctcgtcattccgtcttttgaccacttctcatgacctccttctattgactctttttctaagccaagatacttaaggaagcgccgaaatacctcaatagatatgttgtccagttgccccattaacaagaaatcgtaatcctctcgtttgactttgagaagttcccgcgagtgatacgcttggcttgctcattgaaaaaaaggcttgaatctaactccagtcccgtaaacacggtcttaggcataactgaacttttcgtccaattatgacgaatgaggtcttcttccagcgtgccatgttcccttgtgtataaaatatactcacggaggactatctgaaaagactctttcgcctcttgtatgcttcttccacatcccgaaagatttaatgcgggagcaaaggaaacaacgactccatctttgtcctcttggaaaagaacctcaaggcatatctcgattttattaccgtcgctttttatgtaattcgtcgccatttgttattttcttagcttggcaaaaatgcaaagaataatcgggatttgcaacatttttcctcataattcaatgttttaccggagtgcaaataaattgtcaggctgtccggtcttttttgtatctttgcagcgcatcaattaaggatttccgttttgaagaacctgcgtttatacttttttctgacccttcttctctccgcctgttcggtgaagctggacctggactctgacatcctggaaggagaaagctcggccgtgtgctggatgggggccctgcccgacagcacccctctttcggagctctccatcccgggcgcccacgatgcggcatcggcctccatcacggcctggacttcctggaccaggacgcaggaactcaacatcgcccggctctggaactgcggagtcagggcattcgaccttcgccctgcctgggccgatgggcagctgggcctctaccacggcaagtacacggcccacatctcccttccggaggtgatgcgggtgctccttctcgcccttgaaaagcatccggccgaggcagccatcgtcatcatccgccacgaggaggaagccgacggcaacgcccccggctggaaggatgccctgggggcttacctccaaagcatcagcccgcagcttgtcgattattctcccggcctgacccttggggaccttcggggaaagattctggtattgagccgaaacgagtacgcgggaggccccctgggcggatacatcaaaggatggtcgcacagcatcggggctgcgtcccagaaaagtgcctcgctcatcggcaaggacggttccgcctctcccctgtgggttcaggattattatcatccagatggagccgaagacaaatgggcggccgtccagggcctcctggattcctgttttgcagccggggatgagcgtccactggtcatccaccatacctccggctacatcggcacccttcccgattaccgctccaacgcccgggacatcaaccggaaggccgcagagtatatccaatccgccggcaaacccaccggtatcgtaatgatggactttgccggaacagaccgatcttcaggaaaagacgtcgccggtgcccttctcgtccgcacccttatccgtaacaaccaggtttattttactacgatttcgtccacgaagagccactctttggagcgaggagcgaagaagcggatgtaacgggcgcgttccgaaatggggacgccgtaaagaatgtaggagatgaccggatccttcatttcgttgaaggcctctccggccttggagaagtccctgccgtcggccgatacccagacttccaccttcccgggcaggaagatgccgggaccggggacgcacataaacgtagcaccaacatagtggatgtcctgcacggattccaggtctatggtcacgtccacatcgctcaggaacccctgccagcggtcgtccttgtaggcccatccaccgcccaggccgtccgtgagggtggccgggcccgctgcggcatacttcgaatgccagggccgagcataagtcaccggtttgcccagggccaaatgatggtatccgtgcttataggcctcgcgctctcccctttcccggtgcaagtcgaagaccttgtaccccttgtccgccagtctgtcgttccagaccgtcaccctctcgcgaaaatcggaatgcgccacaggagaccagccgcgctcggccgtagcggccacacggggatacatcatatattccgtgtgttccggcgtaggaatgtgctcgtgccagagattggcctggagacccagcagcagcggatgcaaattttcgggaatctccgcaagcggatcatagccgtacaccgtatccagcgagagatagccgccctgcccggagggttcataaagcggggcatcctgtgcattgttgatgtagcagtagtttccgggggtcataatggcctcgtgaccttctttcatcgcctggatgccgccctcgatacccctccagctcattaccgtggcattcggggaaaggccgccttccagaatctcgtcccagcccaggagttttctgccgtgggcattcaggtatcgctcgattcgcctgatcagataactctgcaattcctccacggtggaaagtccctccgccctcatccgggcctgacagtcctcacaactgctccagtcgcgcttggaggcttcgtcaccgccgatatggataaactccgaggggaacaagtccattacctcctccagaaccccctccaggaaagtgaacgtaacctctttcccggggcagaactcttccgaaccgtttttgcagcccagctccggataggcgaaaatcacctcccgactgtggcccggcatctcgatttccggaaccaccgtcatcccgaggcgcttcccggcagcaacgatttcacggatatcggccttggagagatagcctccggaggcctccggactcccctcctctgcgtagcgcaggccaccgtccacccattgcctccagctctcgcccacccgccaggctgcccgggaggtgagaagcggatagcggtctatccggagccgccagccggcatcgtccgtcaggtgcagatgcagttgattaagctttaccgacgccaaggcctccatctgcttgagaataaaatccttattccggaaatggcgggaaatatccagcataaaaccccggtacgggaagcggggatagtcgtacacggtacagcagcggtccacctgagagagcgtctgcagcgccctgaggcaccctgtttccgtattggcctctatccggtagcccttgggcgttaccgtaagaaggtaggcctcctccctggcaaaagccggcaaagaagccgtcctgcgggcaaaagatgccttcccaatcttccgggaaagctctttggaaaagttgggagtccccgctgtctccgtcagctgaaccggagcaggaataacggggaaaacctgcgcacgggcgcccagagagaggataagcgccaccataagaagcaaatgtttcataaggcagtttttttgacggagtgaagaatctacgctctagtcttacttctccaatttggactgggcataggccaaggtgagctggaagactttcttccgcgtggatggggcttcgaacatcgcgtcggccattatcttttcacagatgctgcgaaggccacgagcgcccagtttgttctgaatggaggtgtcaacgatcaaatccaagacctcgggggccacttccagtttgatgccatccagctcaaaaagcttttcatactggcgcaggagagcgttcctgggctccgtgagaatgcgtttgagggagtcccggtccaagtggtccagataggtgataagcggcagacgacccacgatttccggaatcagtccgtaggcgcgaagatccatcgcatccacatattccagcagattgtccttgtcgatgcgctgcttctcctcggccccgaagccgatgacctgggtatttttcctaagggcgatatgccgttcgatgccctcgaaggcaccgccgcagataaagaggatgttctgcgtatttacgtgaatgaactcctgttccggatgcttgcggccacccttgggcggaacattgacaatgctgccttccaggagcttgagcatcgcctgctgcacgccttctccggacacgtctcgggtaatggacgggttgtcggacttccgggcaatcttgtcgatttcatcgataaacacaatgccccgctcggctttggcaagatcgaaatcggcctcctggaggagtctggtaaggatgctctctacgtcttctcccacatagcccgcctcggtgagcgccgtggcgtccacaatggtgaagggcacgtccagcatcttggcgatggtgcgggccaggagcgttttacccgtaccggtgggtcccaccagcaggatgttgctcttttccagttccacatcggtttcggactttccggacagattgtggttcacccgcttgtagtggttgtacaccgccacggccagcacctttttggcccggtcctgcccaatcacatactggtccaggtaatctttgatttcctgcggcttaggcgccttccccaatttcggggccgatgcctgcttctgccggtgctctccctccagctcctcgacatactgggcagccagtttcgcgcagtccgaacagatatagccatccagtccctgaagcaggaacggaacctcagcgtctgtccggccgcagaaaacgcagcgacgaccgccgtcacggatggttttcctggccattagcgatttcttttacggaggatttcgtccaccattccgtaggcgagggcttcctcggccgtcatccaataatcgcgctcgccgtcccgggccaccttctcgaagggctggccgctgtgctgggcgatgatattgaacagttccgtacgggttttctcaatctccttggcggcgatgaggatttccgtcgcctggccccgggcaccgcccagcggctggtgaaccagcacgcgggaatgcggcagggcgctgcgctttcccttttctcctgcgcaaagaagcacggcgcccatactggcggccataccggtacacacggtggcgacgtccggctggatcagctgcatcgtgtcataaatgcccaggccgctggttacctggccaccgggggtattcaggtacattgtgatgtcggcgtgggaatcgttggacgccagaaaaaggagctgggcctggatgatattggccacatcgtcgtcgatgggaacacccaggaagatgatacggtccatcatcaaacggctgaacacgtccatctgggctacgttcagtttgcgctcttcggtgatggtgggattgatgtaaccgtccacgacggactggtaacgagaaagggtcatcgaactgatgcccctccccttcactgcgaatttatcaaaatcggtcatagcttcttcacttcgttcagaatgacatatcgcgttcagaatgacattacttcaactcgcggaacttgtcctgggagattttcttgttctggaggctcacctcctcgcggacgcgggcgatggccttgttgtcctcgcactgctcttccagacgacgcagctgattttcatcctggagaagattctcggcagaagatttgatgatgttctccggaactccggccattccgtacatggcatactggtaggccacgtaagattcggcggcggcctgcaggtcttcgcgggtgaccttgaggtcgaacttcttcatcagatagccgcgtaccagctgccacttgaagtcctcgatgaaagcggggaattccttctccacctgctcagcggtaaacttgccttcattggcatagatcagccagcgcttcaggaaggcttccgggagttccaggccggccttcttgacgaagtacttgcgcacatcgcttccgaagcgatagttggcttcctgctcgtgactgcctttgatgcgctcctcgatcttctgctcgaactgctcgggagtggtgactacatccttcccgaaaatcttgtcgtaggtttcctggttctcctcggcggccacataggtttttacattcacaaccgtaaaggtaaacatcggattcaggccctccagctgggatttttcaagcttcagcattgcggcacgatcggtctcgttctcaaatgcggcgttaacgtccagttcgaacttatcaccggctttgcgtccgatgaaggctccgcgagcggcctctgcgacatgggagatagagacgtaaacaccctccgccttgtgggtatcgttggcgatatcggcaatgacatagtcattctctccggccttcttgccctcctgcagggaaccgtactgctgcagcatctgttcacgggtggtttttttctccgccacggtgatgttgatatcgtaatacggaatcttgtcttccttgcccacagtgaaattcagttccggggtctgggcgatgtcgaacttgaaagtgaagtcctcaccggctttccaggacagctggggctgatcctcggaaggaagaggctctcccacgatgcggattttctcttcctggatgaagttgttcagctggtccgacaccagaccgttcacgctctcgtagagcgcctggtctccgtacatccgctgaatcagacccaagggggcttttccggggcggaagcccttgacatcggcccggcgcttgtattcgttgaggcgtttacggagcggctcggcataatcggccgcggcaatctcgatggtaacctgatagttcagggcatcgggttgagttttgcttacgttcataatatggttttattgtttatttcgcttcaaggggcggcaaagatagtaaaaatatgccgaactatcaacgtttgcgcttgggataggcaacgcgcgtgtggtaaatctgctgcaggtaggtcttgagcattcgtttcatcaggttgagatcgtgcagagtgatgtcggcgtcctccaactgtccggccttttcctttccggccacaatcccttccacaaaactgtcacaagcctcgggcgtgaactccttcatcgttcgtgaagccgcctcgatggagtcgcacaccatcagaatcacctgctccttggtggtgggcttctttccgtgataataaaagaccgatacgtccgaagggtctccgcccccattgaggtacttgttcataaaataagcggtgttggacgtaccgtgatgtgtcaggataaagtctttcaggacatccggcaagcggtgctcctgggcgatggccagaccgtcgtccacgtgacggataatgtcctcggcactttcctgcggcgtttttccgtcgtgatacttcgtggctccgggagtggtggattcattttccacaaagcagagagggttctgcatctttcccaggtcatggtacagggcgccggccctcagcagcgggacattggcgtccgtggcgcgtcccacggcatccaccaggttcatcacctgcaggcagtgctggaaggtgccgggcgccttggcggccaactcctgaaggaggggggtgctggtatcggccagttcaataagacgggtgacggagaccaggttgaacagtttctcgaagaggtagataagcggatacagggccaccgtggccatcgagccgacgaagatgaaggcgatatcagcccaccaggcggcggtactgcccgcatcgatcaggcggaagcccagatagatcaggatttccacgccgaagatgatggccgcattgaggaactgcctcca

SEQ ID NO: 896 - DNA, 23639 bp, synthetic construct
  misc_feature 1..23639: note = Synthetic
  source 1..23639: mol_type = other DNA
ccaaatcgtgtggactcctcagggattaccacacgattgttttggagactcaaacgcatgtgcgtgcgcgtatatttaataatgtgttatgcgcgtgaacgagtattccaaaatgaaaggagaaataataattatttattaatcattattcattaaaaacaaaatgagaacaaattttgatcaacttctcgaggctggcgcacactttggtcacctcaaacgtaaatggaatccggcaatggctccttacatctacatggagcgcaacggtattcacatcattgacctcaacaagactgtcgttaagattgacgaggcagcagaggctcttaagaatcttgcccacagcggacgtaaggtactcttcgttggtacaaaaaagcaggctcaggaagtcgtagctgctcgtgcacaggaggtacaaatgccgtacatcactgagcgttgggctggtggtatgctcaccaacttcccgaccatccgtaaggctgtgaagaaaatgggtcagatcgacaagatgatgaccgatggtacactcgagaacgtttcaaaacgtgagaaactgcaagttacccgtcaacgcgagaaactggagaagaaccttggttcaatcgctgatatgactcgtctgccgagcgcagtattcgtagtggacgttatcaaagagaagattgccgttgcagaggctaaccgtctgggtattcctgtattcgctatcgttgatacgaactcgaaccctaacaacattgatttcgtcatccctgctaacgatgatgcaacaaaagctatcgatgtaatccttggcgctgtatgcgaggctatcaaagagggtctcgaggagcgcaaagtagagaaagctgacgagagcgctgcagaggagcaggctaacaccgaggctccggcaccgaaagagcgtcgtcagcgtatccgcaaagctgccccgaaagcagaggctgagaaagtagctcaggctgctgctccgaaagaagctgcagaataaattgaaagtttgtttatcggttgatgggtggataagtttattcgtggtttaacccgttaaacggttaaccagtttaactacccattaaccaataaactcataaacccattaacaaaaatcaaagatttttatggctgtaacattagcagatatcaaaaaactgcgcgatattaccggcgcaggtatgatggacgtaaaaaaggctctcgaagaggcaaacggcgatttcgaggttgcgaaggacttgctccgcaaacgcggacaggctatcgcagctaaacgtagcgaccgtgaagcatcggagggttgcgttctcgctaaagtaaaaggtaacttcggcgctatcgttggcgtgaagtgcgagaccgacttcgtggctaagaacgaggacttcgttggcatggttaaactgattctcgatgctgctttggacaacaaagtacagagcaaagaggatctggctgctcttatgatcggcaatttcaccgttgcagagatcatcaccgagcgttccggcgttactggtgagaagatggagttagcagactatgcttgcttggaggctccggtagtagatgcatacaaccaccttggtaacaagctcagctcgctcgttgcagcagaggctggcgctgaccaagagaccgttcacggcatctctatgcaggtagcagctatgagcccgatcgctcttgacgctgatcacgtagctgaggaggttaagaagcatgagctcgaagtagctattgagaagaccaaacaggacgagatcaacaaagccgttgagaacgctatccgcaaagcaggtatcaacccggctcacgtagacagcgatgatcacatcgagtctaaccaagctaaaggctggatcaccgctgagcaggcacagcaggctcgcgagattaaagcaactgttgctaaagaggcagaggctaacctcgctaatcaggcaaagaagatcgagatgatcgctcaaggtcgtctgggtaaattcttgaaagagaacacactcatggagcaggcttacatcatgagcgagtcgaaagaactcgtaaaagatgtactcaaagcaaaaggtgtaattatctgtgacttccgtcgtattacattggctgctgaataattcgctccaattcacgacaaacatcgcagtgcccgcaaggcactgcgtttttttctccaaaatacgctaacagaacttgctcgcggcagaactgtgtctggtcagcatattcgagcatggcgcgcagtttggagatgaatcgttcctgacgctcctcaaagatagcaggcgacaggtaaacatccgtctgacgctccatcgtcatagtaaggctgcatcccacagaacgagggatgtacgtaatgatgccgcgttgagccaatgtgaccaggatctcatgcgtctttttgtcatccgcttcgcggacgtattgcaaatcggtgtagataccggtataggaacgcatcagcagatccaataactcggcttgttcgcgtgagaggttatattcgcctaactgatgacgaggcactttgatctgcacacgcggctgcgtctcgtgctcttcttcaaaatcaatatatccggcgtgtgtgagaatatgcagggcggaataagtctgtatgaccggcagatgcatcacttggcaaagctggcctatatgcagcatgaaacgatgccctaaaccgcttccggcgcctatttgtagaaaatccatggtcttgtgatagaccgattctacaaactctttcggcgggtacgtatctacagcgcgtttcttcagtttcgcttgatcttccgcttcgttatacagaagcacggcatacgctgtttgtccatctcgtccggcacgacctgcctcctgataataactctctaaatgcgatggcagatcgtaatgaatgaccaagcggacatcgggtttgtcaatacccataccaaaggcattcgttgccacgatgatacgtgtcttgccttccgtccaagcctgttgacgctcattcctttctttggttgtcaatcccgcatgatagaaatctacagaggtgatatcctcccttcctttcagggaagggtcggagttatgcctctttaaccactgggtgagttcttgggcacgtttacggttgcggacataaacaatagcggaacccggaacgcgggagagtatatgtgctacttgttcctctttcttctccgttcggcgaacgacataaatgaggttctcgcgatggaaagatttgcggagcacgttcttggacgcaaagccaagcttggtctgtatatcatcgatggtctccggcgtagctgtagcggttaatgccaagataggcacacccggtagttgctcacggatcgcggctatatggagataggaaggtcggaaatcgtatccccattgcgatatacaatgcgcctcatcaacagctatcaaaccgatgggcaagtcagcgagacgctttttaaactcctcactctcaagcctttccggagagcaatagaggaaatggtaaggtccatagagacagttatccaacgccacacgctgcttgtcccaactcatgccggtatagacagccgcggcatgaataccacgcgcttgaagattcgccacttggtcacgcatgagtgcgataagcggcgtaataacgagacagagacgtttgtccggattctcatgccctttgacgagggtgggcacctgaaaacagatactcttaccgccacctgtgggcatcagagcgagggtgtctttgccggacaatacagactcaatgatctccgcctgcaacggacggaaatcatcgtaaccgaaatatgtcttcagtgcttcgcgtgctgtcatcgtcttcaaaaaaattttgcgctgcaaaattactgcttttttatgacatatgcaaaaaaatacataaaaaaattactgaaattcttgcatatgtcgaaaaatagtagtacctttgcactctgaaaagaaaaatgtctaacattctaaaataataaaactatgatttctaaacgtttagaggacgctattaacgcccaaatcaatgccgaaatgtggtcggcttatttatatctgagtatgtctgcttattgccaagacaaaggctatgccggcatggctaattggtttgctatccagttcaaagaggagcaagaccatgcgcagattttctataactacctcatcagccgtggcggacgtgtgctgctcaaggctattgatgcagtggagaccgagtgggcttcgcctttagctgcttttgagcagacttacgagcatgagcaacatgttacttcgctcattaacaatctgatgcacattgctgtagaggagaaagactacgctgcacagagccgcctccagtggttcatcgacgagcaggtagaggaagaagagaacgctgtggagattatcaacaaactgaagatgttggacggtaacggttatggtctctatttgcttgatcaggagcttgccgcacgcgtttatgctacgccttcgcctcttgcagctaaagcataagacggatgaagcgatataaagctatatttctcgattgggatgatacgataggtgattggacgaacgccgagcatttggcgttgcgtgatatttacaccacgtatcatcttgatcatttatacgcctcttttgacgattatttagcagcgtacaagccgtataacttggagttgtggggcaagtatgggcgtggagaaatcaccaagagttacttgcatttcgagcgtttctaccgtccgctgctgatccaagacgaaccggagctgtgcgggcaacggaaagataagttatcgcataggataggggatgagtttctccgtctgacgaatacctatttccgtctcatgcccgatgccgacagggtcgttcggtatctcgcttccaaatatccgctgacgattgtcagcaacggattcaaagaagtgcagtattataagttcgaacattccggtttgtcggactgtctcactcacacgctcgtcagcgatgagataggtatcaacaaaccgcaaccggaaatcttccgcattgccttggagcgcaacggtgtgaaggctgacgaagcaatcatgatcggtgacagttacagttccgacatagccggtgcaaaagccgcaggcattgaccagatctggttacatgagggcgagacatccgagactgccaccttcatcgttccgcgattaacagatataatgaatatcctctgaatatgaaaaacaagctatttcttttcctcgcttgctgcctgttgtgcggctgttatcaccgcacggacgctccgcgcggctcttgggcaaaaggagctgacatcagttggctcagtgagatggagcacgactccgttttccatgacgattgtatcgctaccatgcgtgcgatgggtatgaacgccgtgcgtctgcgcgtgtgggtcaatcatacaacagggtggagtaataaacccgatatgttatcgcttgccaaacgtgctgctgagcaggggcagcgtatcatgattgatattcattactcggatttctttgccgatccaagtcaccagactatccctgccgcttggcaaaaatacgactatccgacgatgttagaggcggtgcgtgaacacacgctggatgtgctctataagctcaaggaagccggtatcaaacccgaatgggtacaaataggcaacgagacgcccaacggcatgttgtggccgatgggaaaggtgaataaagaagaaggcgaatgggaacattatgccggctttacggcgatgggctatgaggctgccaaggaagcgtttccggatattacggtcatcgtacatgtcgataatgcgtacgagcaacgcgattggttctggacgcagatggcggctcatggcggcaaatgggacatgatcggtctgagccactatccgatgatgagtgcttggaatggtggtaagacttggcaggaaatgaatgagttagcggagacgaacattcgtcggctcatcagccaatggcattgcccggtgatgattgccgagatcggtatgttcgctaacgacactacttctgcaaccgtcatggcggattttgtgcagcgcgcacaagctatcgactcctgtgcaggtatcttctattgggaacccgaagtgtttggaggttggagaccggcggagtatattccgttgggatggggcagctatgacatgggcgcatttacaccggaaggtcaaccctccgaggtgatgaaaatcctcttagaaagtcatcaataaattgaaagatggatatagtactcttgattttagctttctttatgatgctgatcggtctgattggctgtatagtacccggtttgccgggaacaccgattgcgtatatcggtttgtggatagcacaagcgacggaaaagatccatttctcatggcagttcctcctcatttggggcattgtggtggtgattatctctgtgctcgattatgtagtaccggcttggggaaccaaacactatggtggtacgaaatggggagtctggggaagtacgataggtgttttcgtcggattgttcttcggcgcaatgggtgttatctttggtccgctggtaggagccgttatcggcgaactcatcagcggtaaacaactcaacgatgccctcaaagcaggctggggtagtttcgtgggcatcctctttggtacgatcctcaaacttatcgcctgcggtctcatgactgtcgccctgatacaagctgtttggtgattctctttgttctcgctacatttaacgaaaaaataacaattttttcatatttatttgcatatatcagaaaaatgtattacctttgcagccgaaatcgtgttcaatattaaaaacacaaataaaagtattgtgttcattgcaaaaaacacaaatacgatatttttgtacattgaatcaaacaaattacaatatgaagaatctaattgacaagcacgttcgttattataaacaaacgcccatgacgatcattcgtcagtgcggttccgagatcaactggaatgtcccattgttagctttacgaggtccaaagggagtggggaagagtacgattatgcgccaatatattcgacttcattactctgtctcggataggtcggtgctctattgctcatgtgatggggcatactttgcttcacatactttattggatttggcggatcagttctataaaaccggtggaaaacacttgttcttagacgaaatccacaagtatcctaattggagtcgcgagataaaggagataaccgacttgtattcagatatgcgaatcgtaattagcggtagttcgttgctgagcttgcagcaaggagatgctgatttaagcagacgatgcatcaatcatgacatacaggggcttagtttccgggaatttttacttttttataagaatattgaccttccaaaatataccttggaacagattcttgccaatccttggaccttagcagaagaagtgaataatcaatgccgaccacttcagtattttgcagagtacttgcaatatggctattatccgtatttcatgcaacttaagaacactgtggattattattcggcaatagagaacaccatcagttatattatagatgatgaactgcctcggatatgtaaagtgtcagtggaaaacacgcggaaaataaaggcgcttgttaatatctttgccaattctgttccgtacgatattgacatcaaacgtctgtccgttcaaagtgagttgcagcgagctacgattttggagtacctaaattacatggataaggctaaaatcattcgcttggtttattccgattatgtaaatgcaaaaaaaatgcagaaaccggacaaggttcttatggataatagcaatatgctctatactttagcggtacaagttccaaatataggcactgtacgagagtgttttgcttccaatcaactatcattcagtcatttagtggagtatggtaagaatcacggtgacttcaaggtggatggtaaatatacctttgaagtgggtggagtagataaggattacgaacaaatagccgatttacctaactcatacatccttgctgatgatatggagtttccttatggacacaaactacctctttggatgataggcttcttatactaattctcggctatagcatcttaaccctttaacgtcacgtagtgaccatcttaaccctttaacgaaaaatccacgatttttacatatttatttgcatatgtcaaaaaaaagtagtaattttgcatgcaaaattgttttatcgcaatgacaactttatcacatagcgaaaaagaggctattatgaaagacatgaagtctttcgatgagccgatgccggcagttggtatcttttggtacgatcctcaagagcacgacttttgggaaagatatatgaccgaaaaaacgaaaaatacgttataccgcatagaccggacggccggtcttgtgttgaatatagatgtttataccgtcctctttcttgttgtcgtatgtggaatttacaaacttttatcatcctacggtattcatcttaacacctattcggtttggtctgctcttttctttttatatacttatgcagggtacgcgtgtgcacttgtttttgcagcctgtatcctatgccgaatcatactcagtccttttgtaaaaagcgaagaagaggaaatctttgaacagaaaattgagtatgtgctgcaaaataagttgcagaaaccggccgaaccttcgacctattctccgctttgtgacctgacccaagagcaagaagaacaagtccagcaagtcctgcgcgatttaccttctcatccgaacaaaccggattatatcaatttggccgtcatcgcgcagtatctgaccgcgctggagaaaatgggaaaagccaagcttatagacaaacacaatctgcgtctttgggtcgcacaaatcactgacaaaaatgtgccggcatccagccaattcaatgaggctgttcccagtactgctccttccaaagtgagcaaggcacaaaaagagttggagcgtcttcttcaataattcgattttttcgataaaacccatcgaacttttggcatttcccgccgaaagtactacctttgtgcccgaaattttaaattttccgatatttatgaaacagaaatttttatttatggcatttgttgccgctttgatcatcggttgtaaaaaagaagagccggagataaatccgcaagctaagttctcttacacaactgacgaattgaaaatctccttcacaaaccattctactaatgccacatcttacgaatgggattttggcaatggaaaaacatctcagttggtaaatcctactattacatatgagaaggagggcacataccatgtgagtttgaaggcatggaataatggtaaatctcattctaccgaacagtcggtaacggtgtcttacaaaaaaccaacagcacaatttacctataaaattgaacaacctctcaaggttgtattaaccaacactacttctaatgctacttcttatgagtggaattttggtgatggaacgtcatctactatcaaaaatcccattcatacctataaaaattttggagtgtataagcttactctcaccgcaaaaaacggtactaagacagacacctatcaacaaacagtaacaatagaagcccctacggtttgctatttttccgggtttgaggtaacaaaaattccgtctaataacgtgtattaccaaatacaattgaccgatgactacgttctgtctaaaaccacctacgtatggacgaattggttcttgctatcttcggcaaatttgccctatacatatatgttcaactcaccggtacaacttaacatatctaatacatatatcgcaagattgtacaaacgttccagtaaaccgtccggtcaagctgacggtaaaggagattattccgtatccatcacatctgcacaactcaagtcatatcccgagcagcttacatggactactacaaatataggaataaaattctatttcaaatggaaatgatctcaagcacccgtggtaaatacctcgggtgctttttgtttttatacagtttagagcgatttttcttgcatatgtcaaaaaaatgtagtacctttgcagccgcaaaggttaacaatgagtattctatgataaaacacattctcggattagatttaggtgtaggctcaataggttgggccttgattgagacagaagatgatcagccgaaacaaattatcggcatgggtagtcgtatcgtacccatttccaaagacgatagtgaccaattcagtaaaggacaagcgataagcaagaatgctgatcgcacagcccgtcgtactacacgtaaagggtacgatcgctatcagttaagacgtgcattattaacgaaggtgctccgccaaaacaggatgcttccggaacgaatggatgagaatgtaatagacttgtggaaactacgtagtgatgctgcgacagaaggacaccaactgacattaccgcagataggtcgcgtgctttatcatatcaatcagaaacgcggatataaacatgctaaggcagacgataatgtggatagcaagcagacaaaatatgtagaggcagtcaaccaacgctatgcggaaattcaagaggccaagcagactgttggtcaacatttctatctggaattattgcgaagcaaagtagaaagcgggaatggtccgtactatactttccgtatcaaagataaggtttttcctcgtgcggcttatattgcagaattcgaccagattatgaaagtgcagaaggtgtattaccccgaagtgctaacagatgaatttattgacactcttcgcaataggattatattctatcagcgtccgttgaagtcgtgcaaacacttggtaagtttgtgcgagtttgagatgaaaccgtacaagacgaaagacggtaaaattgtctatggaggtcccaaatgtgcgccgcgtacatcgcctttagcacaactctgcgcgatgtgggagacggttaataatatcacgctgactaaccgcaataatgagcgatatgagttctcattggatgaacgaaaacaattggtagaacacctctgtacgcatgaggcacttaaactaaccgacctctataagatactaggtattaccaaaaaagacagttggtatggaggcaaagctatcggaaaaggcatcaaaggcaacgcgaccttgaaccaattacgtaaagctctaaatggcaaatatggtgagtggttggaaatgccgattgagcgcattgatgccgtagatgatgagaccgcagaagtgttctggcaggttagtccgaaagtagaagagactccgttgttcaaattgtggcacgcagtctattccatacaagatgcagaagaattatccaagacgcttcgcaataagttcggtatagacgatcaagaagttattaatgccttgtgcaaaatagatttcgtcaagcccggatacgccaataagtcacataagttcattcgtcgtctgcttccatacttgatggatggaatgatgtatagcgaggcttgtgcgaggatcggtatcaaccattccaattcaatgactgcagttgagcgagatgcacgtcagttgagtgatcatattgaactgctgcaaaagaacgcattgcgtcagccggttatagagaagatcttgaatcagatgattaatctggtgaatcgtctgcaacaagaatatggcccgattgatgaggcgagggtagagttggcgcgtgaactcaagcaaagccgtgaggaacgtgaaggagcttataggcgaaataatcagaacgagcgtcttaacaaagagattatagccaaaatagaagagatgggcattcgtccttcacgctcgcgcatacaaaaatataaaatgtgggaagaaaataaccaccgttgtatgtactgtggcaagacagttagtttggcggaattcctcaacggtgcagatgtggagattgagcatattatcccgcggagtatcttgtttgacgatagtttcagcaacaaagtgtgcgcatgtcgagagtgtaaccatgagaaaggaaacatgacagcgttggactatatagaaacaaaacctgctgcagaacaagaagcttataaacaacgtgtggatgaggcgttcaaagaagggcgtatcagcaaaaccaaacgtgatcatctcttgtggcaccgttctgaaattcctaccgatttcatcgaacgccaattgcgtcaaagccagtatattgcagttaaggcagtcgagattttgcaacaagggattcgtcaggtatggacgagtggtggtagtgtgaccgatttcttgcgtcaccaatggggatatgatgagattctccatacacttaacttgccgcgataccgtcaagtggaagatttaacggagatggttcattatgaacatgccggacaagaacatgacgaggaacgcataaagaattggtcgaaacgtatagaccatcgtcatcatgcaattgatgctttgacggttgcactaacaaggcaagcctatatccaacgtctgaacacattggaggcatcgcatgacttcatggagaagcaagtcaaagaggcaggtacccaatataacgaaaagaaatccatcttggagaaatggattctcgaacaaccgcatttctcggtggatgatgttacgcagagcgtggatagtatccttgtatccttccgtgccggtaaacgtgtgaccactcctgcgcgtcgcgcgatttatcaaggcggtaaacgcacgattgtgcaaacaggtctgcaagtgccgcgaggcgcattaacagaagaccacatatatggaaaactcggagacaagtttgtatataagtatgctcttactgatcaatcaatgcacccagagaatattgtggatcctaccattcgcgcgatagtacaaaagcgtgttgctgaacgtgggaaagatgctttcaaagaaccgctatattctgcggaaggcatggagataaagagtgtgcgctgttatacctcgctttccgagaatggtgtagtgccggtgaaacaagacgaacatgggcgcaatatcggttatgcaaagaaaggtaacaatcatcatgtggctatttaccaagataaagatggtcaataccaagaaatggtagttagtttctgggatgctgtagaacgcaagaaatacggagtcacggtagttattaccaatccgcatgacgtgtgggatagtatcatggacaaagatatgccgcaagagttcttggagaaactgcctaaagacgattggacgtatatactctctatgcaagaaaacgagatgtttgtgcttggtatggaagaggacgagtttaatgatgcgatagatgcgaaagattatgcggctttgaataaacatttgtatcgaatacaaaatattagttctctattttatatttttagataccatacagaaacgaaagttgatgacaaatatgaaggtattgcaaatggtcgtaacgcaagtatgtcactcggggctttagttcccattagaagtttcaaagccttgtttgcgcaattcccgcacaaagtaaaaatcgatataatgggtcgcattaccagagcatgattaagcgtgtactttgttttgagaatcctgcacgcttgagtctcaagttggcgcagatggtggtcgagttgcaagatgtaacccgcacgttgcctatagaagatatcggtgtcgtcattctcgatcataagcaaatcacaattactcatgcacttattgatgcgctactggctaataatgtggcaattgtaaccagcaacgacaaacatctgcctgtaggtctgatgctccctttagacggaaatactttgcaaagcgaacgtttccgtacacagatagatgcctcagaaccactcaaaaagcaaatgtggcaacaaacggttgttgccaagatattgggtcaagcgcacgtgttaggtacacagcatatagagcatacaaacatgctcaaatggtcaaaagatgtccgttctggagataccgacaatatggaagcgcgtgctgctgcctactattggcgtaatatgtttgaaaaagatgcctttattcgtgatccgcaaggtctaccgccaaacaacttgctcaactacggttatagtgttatacgagcgatgatggcgcgcgcattagtcggagtgggattattaccgacattgggcattcatcatcatagccgctatgacgcgtattgtttggcagatgatattatggaaccgtatcgtccgtttgtagatctaaaagcgttggagatgtgggaaaaaggggaagtgacaagcgatatattctccgagcaaaaacgtgaattattaggcataaccactatggatgttaccatttccggtcatcgtagccccatgatgttagctatccaaactaccgcacaaagtgtgcagaaatgtttctctggagaagctagaaaaattatatacccagattggtaacttctttgatatgtcattcaaaaaaagtaaacatatagtccataaacaatggtcatatacagatcctcattctcccacacgttgtgtatgtcattcaaaaaaaagtaaacatatagtccataaacaatcttcctgaacggagccgaagcgatcactagttgtgtatgtcattcaaaaaaagtaaacatatagtccataaacaatcgtcacatccgacatgcccacaaggtgattgttgtgtatgtcattcaaaaaaagtaaacatatagtccataaacaatgatgattgatggagttctaatagtgggaatgttgtgtatgtcattcaaaaaaagtaaacatatagtccataaacaataagaattggaaataattgagttgctcgattgttgtgtatgtcattcaaaaaaagtaaacatatagtccataaacaatttctccggatacgaaagcgcattcagatagttgtgtatgtcattcaaaaaaagtaaacatatagtccataaacaatatagcgtgtgtcgttaaaccgcttgttctcgttgtgtatgtcattcaaaaaacaatatagcgtgtgtcgttaaaccgcttgttctcgttgtgtatgtcattcaaaaaaagtaaacatatagtccataaacaatgctaccaaatgactcgacgtagcgtttcttgttgtgtatgtcattcaaaaaaagtaaacatatagtccataaacaataatgtacattataataatcagattgaatctgttgtgtatgtcattcaaaaaaagtaaacatatagtccataaacaatgccgattttaaacttaacgcttaccacgtcgttgtgtatgtcattcaaaaaaagtaaacatatagtccataaacaatgtggtggtaccgttagccttgcggactgcagttgtgtatgtcattcaaaaaaagtaaacatatagtccataaacaattcgagcgggtagcgacaaaatgcagatggtgttgtgtatgtcattcaaaaaaagtaaacatatagtccataaacaatactcaataactttacgttcattagttaattgttgtgtatgtcattcaaaaaaagtaaacatatagtccataaacaatggtcatcagctacgacaaacgcgcggatcagttgtgtatgtcattcaaaaaaagtaaacatatagtccataaacaatccggtccaatacggatgtagtaagtgagttgttgtgtatgtcattcaaaaaaagtaaacatatagtccataaacaatagactattcataaattacttaaacacaacaagttaaacattgttttaggattagaaaaagcagcactttcgagtactgctttttcgctttataagtcactttttgatttctaaaaaagctccaactgttgcacgggttgatcgacttggatctccttgcaacactcaaaaatttgcatatcaccaaactgtttatctgttatccgaagtatcccgatcttaccgaatggaggcatccatttcttcacgcgcgcaatatgtacatctgcgttctccgcactcggacaatgccgcagatagatactaaactgaaacatggtaaagccatccatcaagagtttcttgcggaatagggcatactccttcctgtctttcttggtatcagtcggaaggtcaaacaaaaccagtacccacataattctatattcactaaaacgggtcataggctgcaaaattacaaaaaatcatgtatttatgcaaaaaaaaatccaaaatatttgcatatgtcacaaaaaagccgtatctttgcacaacttttttgaatgacatacacaataaggattattccgttgtgaaaacattcagggtgggagacaactctcgcccttttttgatgtctctcagtatccgtccgatccgttccatctgtgggagaataatatcgataatatcgctcattttgacttaaagataacgattttcttttaatttggataatttgtgaacgattttttgcatatttcaaaaaaatgttgtacctttgcagtcgcaaaaatacaaataccactatgactcatacatttgtagcaagccggatttccggcaaggggaatgccattttcccggacaaactgatcatcgatgacgacaaagtgacctattacaaaggcaaaatcatcggctatgatcaatcggttatcatgcgtgagcgcatcggttctgtgaatatctctatgcacctgctctttggtgacatcgtcattgagagcaaaggcagccagacaattcatgcagaaggattcacacgttctgacgccaaacggattttggaactattgtcgtaaattactactgttgcgttaaatttgttgaatatatatgtattctattgataattaattgattatgactatatcgtgatttatttctttgtgtcttttgtgaataataaaaatctgcttcaactatgtaatctgtgaacgataaagatactaatttttgatccatttggggtaattttagacgaatctcatttcaaaaataactttttcttacttttttcgcggaaatgtttgcatatatgcgcaaaaagtagtatctttgcgcaaaattatgaacattaatatatcaagttcctatgaaaagagcactattacctaagcatgagagattgcttcgcgagttgggcgagaactatcgtttagcacgcctcagacgtaatttgtcctccgagcaagtagccgaacgcgcaggtattgcgcgcaatacgcttatcaaaatagaaaacggagatgagggtgttgctatcggttattatctgcgcgtgctgatagtgcttggattagaggaggatttgcgttccgttgctcaagatgacattctcggtcgcaaacttcaagacgcagggctaacaatctcaaaacgtgcatctaaagcgaaataactatgcaaaccatttacgtctatttcgatgattttcgtgtagattccccaatgcttatggggtgtctgtttgcacaaccatctcgtggaaaagagattttctctttcgaatttgacaaggaatggttgaaaacgccatattgtcgtttgttagatcctgatttacaactttttacgggacgacaattccttgctgatacgaaaacgaattttggcatttttaccgattcagctccggatcgatggggtagagtgttgctcgaacgccgcgagtctatccgatctaaagacgagcaacaacctcgcctgacgctcatggagagtgacttccttttgggtgtaaatgacgccacacgtatgggcgctattcgcctgaaaacgaatatagaaggagcttttctggatgatgacaaacaatataccacgccgcctttcacttctctacgcgaattggaacaggccagttggcatctggagaatgacaacgatccgaacatgcgcaaatggttgcaaatactcctgactccgggctcttctttgggaggcgcgcgaccaaaagcgaacgtgttggatcctaatggctcactttggatagcaaaatttccaagtcgcaacgaccgacaggacatcggagcatgggaagccgttgttatgcaattagcgcgggcttgtggcatcaatgtttctgattttgacatcgtccgtttcaaccaacatgctactttcttgacgaagcgttttgatcgtactcaggatggtaaacgcattcatttcacatctgctatgacaatgcttggctattcggatggtaataccgatggatgttcatatctcgaacttgccgaatggattagtcgcaatagttgtcaggttcaggaggatttagaagaactatggaaacgaatcgttttcaatattgcaatcagtaactgtgacgaccatctccgaaatcatggatttctcctgtctgaaaaaggttggaaactgtcacctgcttatgatctaaatccctcatattttggatccggactaagcctcaatatcgacgaacattctaatgcattagactttggtttggctgccgatgtagccccatattttggattaagcgccactaaatctgcgcaaatcatcacactcgttaaacagcaggtttcctcatggcgcacatgggcaaaacattaccacattcctcgtgaagaccaagaaattatgtcgcaagcctttaagataaattaagcttaaaagtcaaatgaataccgaactgatgcacattctatcctccaaacttaaatagaaagaaatgtaagctatgagaaagaaaacgaatatttataccatcctcttaatggcaatcatcatgattgcctcattcgtcgttgccaataacacgaacaacacctccaatacgtccaacacgtcagaaacggaaatagacactcaggcaccttacgaaatcccgcgcttaaataattatcagccggaacaagtgattgagcacttgggctataccgtcagttataatccccaatggcttgtgcccaactgggttgcctatgagttaaccaactccgaaacaattggtgaacaggagcgttcgaatcatttcaaaccggatccgttagttaagggagatcctgtgacgaccggcgattattccaagtccggctatgatcgcggacacatggctcctgcggcagatatgaaatggtcagaacaggcgatgcgtgagagtttctacatgaccaacatctgcccgcaacttcataatctgaacgccggggattggaaagatctggaggagctggcacgtgactgggcacagacttacgggagcatctatatcgcttgcggacctattgtggaagccaactatcaaacgataggaaagaatcattctattgcagtcccttccgctttctataaggtctttcttcgccgaacaggcaaaggctgggcatcgatcggttttattatgccgaacaaggcaggcaaccgacctttgatgacatatatgcataccgtcgatgaggtcgaagaacaaacgggcttggatttcttctttcatctgccggacagcatagaatctcaagtcgaaagcacctattccctttccgattggaccctttcccgcaaataaaaccggtatgatgaacaacgaggatgaacaatggcattggcaagagccggagactgcatggaaaggtgtgggaatataccacataaccatggtcgtgtccagtagaaagcctttgctgggtgaattggtcattcctgacaatgatccgcagcaggcgagggtagaatggtcagatcttggtaaacaagtgctctggcatatgttggatttacccaaacggagaccggagattcatattatcagttattgtctcatgcctgatcatctccatgctatttggcatgttaccaagacgatgccgacgagcatcctctcggtcgttcgtggcttttggcaaggcgagaagaaaatagggcgcgcatatagtatgtctattaccccgcatttaatgcgggagaacgaacataccgcagatccgctctttcatgagatgccatttgtacggccgctctcacggaacggacagttaaatacgatggtgaattatctcatcctcaatccccagcgactcgcaacgaaaaaactcatgccgggattctttcgagtgcaagatgggattgaaatagccggacgcacctatagtggagtggggaacgccaaacttctacaggaaagacattttatgccggttcatgtgcggcggacaatggtggacgaggcggagcacggagcagatcaacggcttcgggactataagaacagttgtgtgctggctgcaagaaaaggctcggtgatggtctcgccgttcatcagcgaacatgagagagcggtgttggaggtgcttctaaaggagaaacatcccattatctacatcgcagataacggtttcggacagtatttcaaaccctcagacggtttgtttgaagcagtggcagaggggcgtttgcttattctatccccatgggagtacaatcctaagaaaaaacaagtaactcgtgctgagtgtgtcgccatgaatcaaatggcagaagagatttgcagcatcgtccattgttccgaatgacattctgagtcaagttaccatcatcaataagtccgtattacatcacaaaaacaataaatctgcatcaaaagtgcagattttttttgtgtctgttcaaaaaaagagagttttatttgcgtaattcagaaaaaagtattacctttgcagccgcaaagctgcaaatgccaagccgctgtgctctacagcgtaaaaaagggagtacaagtgcaaagtgttgcacaaaatgatattattaattagcgtttgctatttgttctatagaattggaatgtggaagtttcatataagatagaaaacaagtcgcaacgtccgttgtgtgcgggcgtaacttgtctatcttagggcattccacagcctcaattcttgcgagttattgcccgcttttttcgtggctgtggaattatattaggatagtagcaaatgtgtaaaacaaacgctactatgacagagcaagagtacttgcagaagattcatgagttggagaagcaggtattgcgtctccaaacagaaatcaagaaaaacagcgagacgcaatatggtttgcgttggatggatgtgcccgaagcatttgaggcggaagccgagaatgctgttcccacattggaagaggttcctgataaagctatctcgaatgatgatggcaagcccacacatattctgattgagggtgataattttcacgcactcacgtgtctcaactatacccataagggacaaattgatgtcatctatatcgatcctccgtacaataccggcgatgattttatttataaggataagcgtattctagataaatatccagatggttctattgtccctgcagatcatcctttacgtcatagttattggctgtcattcatgcaaaagcgtttagaactggctagaaatttactttccgatagaggtgttatctttatttctatagatgacaacgaacaagccaaccttaaactactttgtgatcaagtttttaaaggtggagagtttgtatctaacatcatatggcaaaaaaactatgcgtccaaaaacaattcacaaggaatacctgctgcaacagaatatcttataacgtatagtaaagccccagattggacacctaataggcttgcaagaacggaagaaatggatgctaaatataaaaatcctgacaatgatgttgctccgtggcgaagtgataatccatgtgcaccgggagctgtaagtcaccaaggaatggtatatgctatacaacatccatttactggggaactattatatccatataatggagcttgttggagataccaacaagaagatttattggaaataatgaatggttggtgtaactatgaactcaaaaatctgaatgacgacgaagaaagagctaaggtgtgcggtataacggcagataaagtaagaaaagaggtaaaaggaattgtacttgctcaaagtttagaagaatcaagaaaacaagctaacatagttttaaatagaggacaatggccgaagtattatttcacaaagaatgggaaaggcggaattgctcgtaaaacgtatctaacaaatgtagaaggtcgcttagttacctctttttggccatttactgaagtaaatcacacggatggtgcgaaaaaagaactgaaggagattttcaataaggaaattccatttgacactcccaaaccaattgatttggttaaacggatagaagaaattgcttcacaaccttcttctatcatcctcgatttcttcgccggatcaggtacaacgatgcacgcgacgatgcagttgaatgaggaagatggcggacataggcaatgtatcttggtacaacagaacgagaataatatctgcgaggcagttacgtacgaacgcaataaacgtgtgatgcagggctacaccaacgcaaaaggagaagcggttgcaggtctcggaaactccatgaaatactaccgcacggcgtttgtgggcgagcataagattaccgacattaccgatgcggacaaagtggctttgacgcagaaagccggttgtctcttggctttgggagaaaacaacttagaggagataaagactgccaaatcgtatcagattttccaactccgcaagggtgacaaaccgacgaatgattttggttatactgcggtttatttctccggcaacctcctgcaatttgcggatttccgccgagagatagagcagatacaagcagctcacacgttaacgcgcatcgcggtctatgtcttcacatggggcgatccttctgtttttgagaatgagtttgatgacctttcgggtattaccatcaaaccaattccgcaaccgattttagagatttatcagaacatccaccaactataatacgttatggctcaatttaatatgcttgcgtttcagcaaaacgcagtagaagaattaacggcacagttcaaagccatctggtttgccaacaatgatttcaaacacgagatagtgtttaagtcgcccaccggcagcggtaagacgttcatggtgtctaatttcatcaacggtttgcacacgcagcccgattggaatgaggatgttgcgtttgtgtggattacgttctcggacgatctggcgatgcagagtaagcagaagttctttgagtattttcatccgaatatcggcaatcagttactgaccgtacaggatttcaaccaaggtgtgcttaaacggaatgacattctgttcctgaactggcagaaactatcgaccgagaaagccgacaaacgtgttcttcgtcgtccggaagatgagcgcttatacaaagaatccggtttctatttcgaagatatagtggagcgcacgcacgcggaaggacggcagattgtgatgattattgacgagagccacaagaacgtgaccgaccttgctatcaagaccgttattgatccgttgaacccgaagattattctcaaagtgtcggctactccgacttccgaaccttcgattagcgatgtacgacgcaaccgcgcaggatttgtagaggtggagcgacaagacgtggtggcagcgggcttgatcaaagaagaaatcatctcgcagaccgaggaag

SEQ ID NO: 897 - DNA, 23498 bp, synthetic construct
  source 1..23498: mol_type = other DNA
  variation 15816..15817: note = n is a, c, g, or t
  misc_feature 1..23498: note = Synthetic
  variation 15662..15669: note = n is a, c, g, or t
ctgctcctgatacctacgatctcattattctcgaccctcctgcttttgccaaacatcggggggctgtccgcaatgccttgcaaggctataagcgtctcaacgcaaaagccatcgaacgtattcgcaaaggtggtttgttgttcactttctcttgttcgcaagtcgttgataaggaaatgttccgtcttgccgtcttcagcgcggctgcaatgacggggcgtcgtgtccgtatcttgcaccaacttacccaaccgcaagaccaccccgtcaatatctaccatcccgaaggtgaatatctcaaaggacttgtcctgtatgtagagtgaaatcttatatatgtagagactggttggtatcttcgcttgggtctctgcatgatttcatctggcgaaaatttggaacgattggggattgtttcttatctttgcaatttgattacgggagtgtgtccgtatgttgcaagatacattccgttgtcactatgatagaaataaatttacatactgatatgaaaaagaccttgtttatcctgtctgcgtttgtctttacagcgttgactgcttttgctgcggaaaataccgaagacaaccgcgtgttgcttactattgacggcgaaccggcaacggttggcgagttcatgtatatctaccaaaagaacaatagtgcctcgcaggcggaggatcaacgctccctgcaggactatttggacttgtttgtcaactatcgcctcaaagtcaaagccgctcaggaggcgggcatcgatacaacggaagccttccgcaaagagttggcaggctatcgcagtcagacaacaccgcaatacatggtaaataagcaagccgaagaagcaatcgttcaaaaggcctacggacgtatgcttaacgatcgtttggtgcgccatatagctgttcagtgtacttctcacgcaacccctgaagaagaggcggaggcattggctaaaatccaaaatgcttatcagcgtgtcactacggggcttcctgtcaaggtgaaagggaaaatcaaaccgggcaaagtggaagattttgccaaagtggcggctgatgtctccgaagatccgtccgtagcggaaaacgatggtcttgtaggatgggtgactcctttccgctttgtctatccttttgaagaggctgcctacaccacggaagtgggagccgttagcaatgtcttccgtacaccgtttggctaccatattctcaaagtggaggacgagaaaccgcacgtggaaatacatgcggaacatatcatgaagatgacaccccgtggcgatgattcgctttcccttgtggcaaagcagcagatcgattctctctaccaattggcattgtccggtgcggatttcgaagaattggctcgtctcaattccgaagaccgaggttctgctcagcggggtggtgatttgggatggttcggaaaaggacgtatggtacctgagttcgagaaagccgcttttgcgctgcaggacgaaggtgatataagtacccccgtgcagtcgccttatggttggcatatcatcaaactgttgggacgtcgtggaacacccgacttggcagagattcgcgcggatgtcctcaagcagatacgccgttccgagtatcagaaacagatcgacgaggcttttatccaaggtctcaaagagacctattcgttctcggagaatcccgatgcgcttgcaccattctatgcattggctgaaaagtacaacgtgcgcgactccgcattcctggcggaggctgctgccttcgatggcgtgttgtttgcttatgctgacaaacagcgtacggcttccgattttgcggctttccttgcacagaacacattctcgcagcaaaccgcaccggaagcaatccttgcggaaaaatacaatcagtttgtggagaaatgcctccgtgaacaggaagattcccagttggaaaacaagtatcccgatttccgtaatctgatgtgcgagtaccatgatggtacgctcctcttcgaaatatcattgcgcgaagtgtggcagaaagcagggcaggatacggtcggactcaatgccttcttctcgcagcataagcaagactatatgtgggatgaaccccgcttcaagggttatgtggtttactgcaaggataaaaacacggccaaggtggcaaaacgtatcctgcaaagtgctaaccccgactctgtcgcatcctatttgaatacccgtctcaatctggatagtgtcacgtatgtacatttcgacaagggactcttcaaattaggcgataatgctgcggtggataagtatgtgttcaaaaaaggtgattataaacccgaccaagaatatccggtcgtctttgtgtcgggtaagcaactcaagggagcggaagaacctgccgatgagcgtggcaaggtaattgctgcgtatcaagactatctggaaaaacaatggttggaacgcttgcataaagagcatgaggtaaagatcaatgaagaggtcttccaatccttgttgaaatgatgagatgagaaagtattcatcttggatactgcttttttgccttgtgtcagccaatcttctggcacattggttcttctttcgtatcgatctcaccgatgataaacgctattcgttgggagaggaaacgaagacgctcctgcgcaatgcaggtcgggtggaggtggatttgttcttggatgggaaacttaattcaggcttcctgcgtctcaaaaatgccgctgtgcaaatgcttcgtgagttcgatgcctatggtgatgtcagcctttcggtctgcaaccccgtgaggatgacagagacggaacaacagtctttgacggaggaactggcgcgatatggctatattcctaccgctgtgtacgaacgcgaccggtctggtaaaacctccgaaacgattgtctatccctatgcccgccttcggtgtggcggaaattcaatgattctgtgcttgctgcaaaataatcgtggattgtccggtgccgaaaacttgaaccattccatggagtccttggagtatttgtttgctgaatccattgagtccttgtcttcctcggaacgcaccaaaatcgctttcttggagggacatggagaattgggcgaacgtgccacaatggatgttcagcgtatggtctcctcctgttttgacatctatcggggaacgttgacttcggaagtgggctgtctcaacccgttcaaggtagtggtgatagcagaccctcaattgcccttcacggagcaggataagtatatcctcgaccaatatatcatgcagggagggcgtgtcctctgggctctgaatggagttcgtttgtcggaagatgtgctgtcgaaaaatggtttcactccaatcctgccgatggaactgaatgtgcaagatatgctttttcgctatggtgtgcgggttaacccgcgtttggtggctgatttgcagtgtttgtctgttcccgtggatgtctctccaaatcccgctcaaccgcaatatgagcctatcccttggtgttatgctccgcttttgctgacctcctcggaaagccctattacgcacaacttgatgcaattgtcgtctgcctttgtctccgatatagacttcgtaggcgactcaacggcacagaaacgggtggtcctgttggcgacaagcaatgcctctcgtcttgtcggaacacccgctgaaatagatcttgcagacttgaccatcaacccgcaagcctttacgaaagcctatatccccgtggccgttagtctcgaagggaagttctcgtcgctttttgcacatcgtatgatgccgcagggattgattaccgatactgtcaaattgaatgaaacggcatattccaaacaagtgattgtggcttccggaacggtctttcaaaacgattggcagaacaaccaaccgttaccttgtggctatgatcgctattcaaagatgcagtttggtaatagggacttcttcctcaatgcattgttctggctcgccgatgatacgggtttgattaacctcagacaaaagacgatccctctccggctgttgaatacaacgcttgttaacgaaaaaaagaatatatatacagtatatgcccttggcttgccattgacctttttggcactgacggcggtggcggtcttcctgcttcggcgtatgcggtatgaacattgactgtgataatctaaagattttatctatgcgcgaaacgcttatactgctcgtcttttccgtgtgcctcgcttttcctggcactgctttggcgcaagcccaaacctgtcctgttgataccgtcaaaggcaaagtgtactacaggtacgcagcgcagaagggagaaggtctgttccgtatcagccagaactttggagtatcgcaagaggacataatacagtgtaatccgaccttgaagagcgaaggtatcaagttggggcagattattctcataccctgcgtgcagaaaaccgattcttccttgtatattgtccatgagatacagccgaaagaaactctttacagcttgggcaaacgctatggagtgacaataaatgaaatagtcgctcttaatcccgagacgaccaagcgtatggcaattggcagtcgcctgctcataccgcgtaagcaaatggtggcagccgcatcgcaacaaaaaacatcgcagcaggaaaccggaactcaagtggttcgtgggaaggaggaggtgaaaacgcgaaatccgcaggaggagaaaacgacaataaaacctgaaacagagaaatcaaagaaaaaacggcaaccggtgggagaaagtacggaggtggtgaaaacggaaggaaccgccatggtcaacgatacggttttggatgacgcaactcccacgccgacgcctctgcgaattgcctatttgcttcccttgatgacggatgtggcaccccgtgacccgtccatcgaccggttcctggagttttatgaaggtgcccttcttgcgctgaatagcgcaaaagacagtggacagcggttcgaagtatatgtctatgatacggagaagagtacgtcaaaattgtctggtatccttgctaaacccgaatggctgaacatggacgccataataggacccgcttatccctcccaagtgagtgtgatctcgcagtttgcctatgaacatcagatacctgtgatcataccgttcaccaacaaggtgtccgacttggaacgcaatccgtacctgatacagttcaatccatccaatgaaaccgagaacgatgtgctgattaagtacctctcagagaacaaaaaacagccgaactgcatctttgtcaattgggacgaagcgaccgctaaaatcaaacaactgcatgcgcagttgcacaaggcggggctgcaatgtattatggcggaaagccggtgtgtcgggaatgactcgctgtcctgttttttgcaggcggatgtggataatgtgctaatccttccctctgagaagtattccgatgtacagagccttttccgctatgtcgagtctttgggtaataatgcttcggtgagcctgttggctttctatgcatggaaagagcagccgcttccgttgcctgctttctattccaccatcttccatggtacaaaggggctgtcgttggagaaaatatcctattctatgaacttcaggcggtatttcggcaatgagttggaaaacgaaaccccgcgttatgactacctgggatacgacatcactcgttataccattcagttgcttcagcagaagcagacgggctctcgtcttcttcctgtcgaacaactccgctatcggggcttgcaatcggacatagagtgtgtacgggtaggggaacatggaggctttgagaaccgttctattcagatacagacacgatgaagcggtttctgctcggcatattctctctttgctgtgctctctctctgatggcgcaaccgcgtcttgcggagaaggaatactatgtaggagcgcaggccggtgttttggcatccatggttcgtttctctccttcggtggcgcaatctgccctcaatccctatttgggcacaacggcaggactggtctttcggtatagtgggcataagtgctgcggattgcaagtggaagtcaactatatgcagcgggggtggcatgaaaccgatacggattatcgaagggaactcaattatctcgaattgccttttctgacgcatatctatttcggacgcaagttcaggggatttgtcaatctgggaccgcaaataggcatattggtcaacgaacagcatcagggtatgcctgccgataagaaaacgcagcactatgctgccgacacacgtttcgattggggagtcgctgggggcttgggagcgatgtatcggagtgttgccggtgtatggcagttggaggtcaggttcaactatagtttcggtgacatctttagtaatcataagaccgactattttgccaattccaatcccatgaacctctctctcaatctggcgtggatgtggcaaattcggaaagacggacactccaagaagtaacttcagcaataattctgccaaataaaggtgtttcgcgggggaaaactttcggggatttgttgtatctttgcatacgctaaacatatatataactacacagatgaaaacaaattacgaagtgcgttatgccgcccatccgttggatgcaaaacagtatgatacagcgcgtttgcgtcatgacttccttattgagactttgttcgttcccgacgaggtgaatatggtttactccatgtacgaccgtatgatagtaggcggggcaatgccggtaaaggaaaaccttctcctggaagcaatcgaccctctgaaagcacccaactttcttacccgcagggaaatcggaatcttcaatatcggaaaaggggaagggcgtgttcatgtgggcgatgaggttttcaccttgtcctataaggaggctctctatttgggtcggggcgaccgtgaggtgcgttttgagagcgtcaacgcggacgaacctgctctgttctatttcaattccacaacggcgcacacaacctatcccgacaagaaggtgacgaaggctgatgccgtagtggcgcacatggggtcattggatggatcaaacgaacggaacatcaataaaatgatagtcaatcaggtcttgcctacgtgccaactgcagatggggatgactgaattggcactgggtagtgtatggaatacaatgcctgcccatgtacacagccgccgtatggaggcatacttctatttcgatctgcccgaagatcaggctgtctgccacttcatgggagaggtcaacgaaacccgccacatctggatgcataataatcaggctgtgctttctccggagtggtcaatccattctgcggctgctacccacaactatactttcatctggggaatgggaggtgagaaccttgactatggcgatcaggactttgctttgataactgacttaaaataacaacatactatgaaccagtatctcaatttctctcttcaagggcgtgtggctcttgttacgggtgcctcttatggcataggttttgccatcgcatcggcttttgctgagcagggtgccactatttgtttcaacgacatcaaccaggaactggtaaacaaaggccttgctgcctacaaggaaaaaggaatacccgtccacggctatgtctgcgatgtaaccgatgaacccgctgtgcaggcaatggtcaaagaaatcaccgaaacagtcggtcctatcgatattttggtaaacaatgcaggcataatccgccgcgtacctatgcacgagatggaagcgtccgatttccgtcgtgtgattgatatcgaccttaccgctccttttattgttgccaaggctgtactaccgggtatgatggaacgcaggcacggaaaaattatcaatatctgctccatgatgtccgagttgggcagggaaaccgtcagtgcctacgcggctgcaaaaggaggtctgaagatgcttacacgaaatatctgttccgagtatggacaatataacatccaatgcaatggcatcggacccggttatattgcaacacctcagactgcaccgctgcgcgaaatccaacccgatggatcaagacacccgtttgatgctttcatctgtgcaaagacacctgcaggaagatggctcgacccgcaagaactcacaggacctgccgtattcctcgcttctgaagcaagtaatgctgtcaatgggcatatcttgtacgtggatggtggtattttggcatatataggcaaacaaccgaaatgaaaaggatagttctttggatctcgctcgttgctttgctcgcaagttgcaacagagaggtgcaatatatcatcgtgtccaacccttctttggaagaacgcttcgatgaactggtggaagtggcggctgcggatctgcaactgactcgccaaaacgtcggaaaatatgcgctgtatgatgagaacggagaccaagttcctttcgaagtggtttgccgcgatagcgtacctgtttccgtcttgttccaagtctctgttcgcggtggtatgcagaatacctacgaatggaaaaaaggaaaaccgctgtctccggaaactaaggtctttgcacgcttcgtgccggaacggaaagatgacttcgcttgggaaaacgagtatgctgcttaccgtatgtacggacctgcgttagccaatgaatatccgagcaacggagtggacttgtggctgaaatgcaccgacgaattgattgtcgactccttctattacagagagttgcagcaaggctactcctatcatgtcaactggggaaaaggattggattgctataaagtggggcatacgctcggctgcggaggtactgctccttttgtcggcgattcgctgtatgtgggtgaccatttcaatacttggaaaatcttggagagtggtgctttgcgcactgtcttcagtttgtcttacgataacatggagcaaatcattacggtgcaggcgggtacgcctttctgccgctcgcaagtggtgtataaaccgtttgcaatgccggatggcgccctgcaggatactttcagggtagcggcaggtatctatttgcatgacgtgatggataatgtttcctattcggcgcaaggcaattggattgcctatgcagagaatgctgtgagcgatgcgggagtaccgcagggacgcaactatgccgctgtgattatgccgtctgcaacgggtgttctcgtgcaggataacacgcttctttcgttggcgccgtatgtcgctggagatacgcttacctactattttgcagggggatggagtcaatggcagttccatgaagattccgattggttctcggaaacggttcgcagaaccaacctgcttcgctacccgctcaaagtcaccgtcaatactaaacggtaatcggacaatcatatcatgctattcccgtgctcgtcaaaccgagtgcgggaatacttgttttttatgcatttccttacaccctttctctcgcagattctttcatagaaggattggatgtctgtttcatctgataatatatatgcttgctgcttttgttttcttagccgacctcgtcgagacctcaacgacctctcaacgacccctcatcaagttctcggcataattctctttgtatagcaggctacccttaaaatttgttgcatctggttccgaatggattatatgatgaatatctgtcgattgcaatgaatagtcgctgtcaagtattttgatctgaataccagattctatgacagcgacgtgttccgctatgagatcgcaaatgatattacctgcaatcctttcctacatccactacacaaataaaaaagggcgagacaaacgtccctccctgaatgtttacacaacggaataatccttattgtgtatatcactcaaatatgtgccgcaaagataatgtatatttctaatacttgcaaatggtataatgaaaacattgtaatactattgtaattttgtatatttgccacatcaaacagatgaaccttatatataactaacataccatggcaacaaagaaaatcctcggcttggatttaggcaccaacagcatcggctgggcactcattgaaacagaagatagtaaccccaaatccattctggcgatgggcagtcgcattgtgcccctaagtacagacgatagtacgcaatttgcaaagggacaggcaattaccaagaatgcagaccgcactcaaaagcgaaccgcccgcaaagggctcaatcgctatcagatgcgccgtgccatgctgactgaagaattgagacgccatggtatgttgcccgaaagaacagatgagaatatcatggacctttggcgtttgcgtagtgatgcagccacggatggtaaacaactttctttgccgcagataggtcgtgtcttgtaccatatcaaccaaaaacggggctacaaacattccaaggcggataattctgctaataccaagcaaacgaaatatgtagaggcggttaatcaacgctaccgtgatatacaagcctgtcatcagaccattgggcaatacttttatgagcagttgttgtcaagtgcggttcaaacaccttcgggatcgtactatacgtatcgtatcaaagacaaagtacttccacgcgaagcatacatcgctgagtttgaccaaattatgaaagtgcagcgggtattctatcccgatgtgctgacagacgagttggttgatacgttgcgcaatcatattatattctaccaacgtccgctgaagtcttgcaagcatctggtcagtctgtgtgagttcgaaaagcgtccgttcaagcgggaggatgggcagattgtctatagtggtccaaaatgtgcaccgcgcacttcccccttggcacaattttgcaccgtatgggaggcggtcaacaatatcactctcaccaatcgtcaaaacgaaacgtttgaaatcacgcaggaacaacgtgtcgcgatggcggatttcctcaatcagcatgacaaaatgggggtaaaggacttgcagaagatattgggtatctcgcccaaagacggttggtgggcaggcaaagccatcggcaagggactgaaaggcaacaccacatttacgcaactgcgcgaggcgttgggcaatctgcctaatgccgaacacttgttgaagatgaagttgtctatggtggatgccgccgtggataccaccacgggtgaactcatccgacaggtctcgccgcaagtggaggaagagccgttattccgcttgtggcatctggtctattcgttacagaatgaggatgaactgcgcaaggctttgcgtaagcagtttggtatcgacgatgaagaggttcttgacaagttgtgtaagatagactttgtgaaacccggctatgcaaacaaatcccataagtttattcgcaaactgttgccctaccttatggagggataccaataccatgaagcgtgtgcgcatatcggtgtcaatcactcggatagccttactgcagagcaaaatgcggcacgaccgctattagacaaaatacctctcttggagaagaacgaactgcgccaacctgtcatcgaaaagatactcaatcagatgattaacgtggttaatgccctcaaagcggagtatggtgacattgatgatgtgcgcattgagttggctcgcgaactgaaatcctccaaagacgagcgcgaggcggcattcaaacgcaacaatgagaatgagcggcaaaacaaaatatatgagaatagaatacgtgagtatggcatacaaccgtcccgctcgcgtattcagaaatacaagatgtgggaggaaagcaatcacctgtgtttctattgtggtaagcctgtgaatgtcacggatttcctcgcaggcgcagaggtggaaatcgagcatattatcccgcaaagcgtgctgttcgatgatagttacagcaacaaagtctgtgcctgccgtgcttgcaatcaagccaaaggaaacttgaccgcgcgtgagtttatggagaaacactccaaagaggaatatgattcttatctccggcgtgtggatgatgctttcaatgcacaccgcatcagcaaaaccaaacgcgaccatctcttgtggcgcaaggaggatattccgcaagatttcatcgaccgccaactccttcagagtcaatatattgccaagaaagcggcagagattcttcgtcaaggctatcgcaatgtgtacgccaccagcggcagtgtgacggatttcctgcgacaccaatggggatacgatgaaatcctgcatcgtcttaatttgccccgttaccaacaggtggaggggctgacagaagatgttacctacgaccactgcgggcaagaacaccaacaggagcgcataaaaggttggacgaaacgcctcgaccaccgtcatcatgccattgatgcgctgactatcgcactcacgcaacaaagtgtcattcagcgactgaatacgctcaacaactcacgtgagcaaatgtttgacgagttaggaaaacgtactgatactcccgaatatacggagaaacggtctttgctggagaaatgggtagacgctcagccgcatttctccgtacaggaagttacggacaaagtggatggtatcttggtctcattccgtgcagggaaacgtgctgctacgcccgctaaacgtgctgtctatcagaatggtaagcggcatatcgtgcaaacagggttgcaggtgccgcgtggtgcgctctccgaagaaaccgtgtatggcaaattgggcaataagtatgtggtgaaatatccgcttggtcatcagagtatgaagatggatgacattgtcgatcccaccattcgggagatagtacgcacacgcctcaatgcctttgggggcaaggcgaaagacgcttttgccgaaccgctctattcggatgcggcgcatcaaatgcaaatcaagacggtacgttgctatacgggactgcaagacaaggctgtcgtgccggtacgtttcaatgcgcaaggtgaacctgtcggctttgtcaagatgggaaacaaccaccacatcgccatatatcgtgatgccaaagggcaataccaagaatcggtggtctcgttttggcaggcggtggagcgcaagcgttatggcatacccgtggtgatagagcaaccgcacgaagtctgggataaactgataaacagcgacaatatcccgcaagattttcttgaaacgttgccgcatgatgattggcagtttgtcgtgtcgttgcagcaaaatgagatgtttatcctcggtatggatgacgctgattttgaggcggctatggagcaaaaagactatcgcacactcaacaagtacctgtatcgtgtgcagaaaatatcctccaaagagtactgtttccgttatcatacagagacaagcgtggatgacaaatacgatggtgttattaataaaagtattagtatggaattacaaaaattgaaacgcctaactagtataagtgccttcttctcccaacatccccacaaagtccgtgttaaccttttaggcgaagtctctgcattatgatcaagcgcgtcctctgtttcaccaaccccgcctacttgagcctccgcctcaagcagatggtcatcgaaatcccagaagtggtctatggcaagggtttgctcgactcgctccgccaacagggggtgcgcaccgttccaatcgaggacatcggtgtggtggtgcttgacaacaagcaaatcactgtcacacaagcccttatagcggaactccttgacaacaacgtcgccatcgtcacctgcgacgaccgtcatcatcccgtcgggctcttccttcccttggacggtcacaacctccaaaacgagcgtttccgcgagcaactcaacgcctccgaacccctccgcaagcagatgtggcagcagaccgtcacctccaaaatcctcggacaagccttcgttctgcgcacgcaacacattgagaaccagaacctcctcgcatggtcgaagtctgtccgctctgatgacgccgacaatcttgaagggcgtgcggcggcatactattggcgcaacatcttcggcgacacctctttcgtccgcgggcaggagggcgacccgcccaacaacctcctcaactacggctacgccattgttcgtgccatggtggcacgcgcattggtcgccgcaggactgctccccacgctcggcattcaccaccacaaccgctacaacgcctactgtctcgccgacgacatcatggagccctaccgcccctacgtggacttgctcgtgctggaactccgccaacgttaccccgacatctcccaactcaccaccgacatcaaacgcgacttgctgggtatcagcacgatagacgttctcatcgaaggcaagcgcagcccgatgatgattgccgttcagactacggcaaacagcgtccaacgttgtttctccggcgagtcccgcaaaatcatttaccccgattggtaaatgaagaaaccgttacaccaccataaccatattattatgcgccccatattatatcgtatcttcttcgggttaattacggcaacgacacggcaacgacacggcaacgacagccgagtatcacgagggcttgccgcgaccatgacgaatgaattttgtgaacaatgtgtgataatacggcgcagccgtccgttttataaaaattcctaactatatatttttcaacatcttaaatcaacaattctatggcaaaagcagatttggaagtcccctttgcgggcattcacggcagaatcggtcacgacagtgaaatctactacacccaacgttacggcaagactgtcgtctccaactatcccaagcaccgcaaccccaagaccatttccgaccaccaaaaggcactgaacaccaatttccaaactgcagtcaagcgtgcggctgccgaactcgccgactctgtccgccgtgcctattggcagaatttgttcgaccaccagcccgccccgcccaaatacaaagtcctccgcaacttcatcatcgcccaactcaccaagaatcccgaatgatattccttccggttcttctaaagagaacttgtaggagtgacaatgcaaatagtaaaatggctataaatcttcaaataaatcgtacatcgtaaatttgcaaatcgtacatatttgatgagtcgttttagtgaatatagaattatgtgggtattggtgtttttcgatttgccgacggatacgaagaaggagcgtaaggcggcagccaagttccgcaagcagttgctggaggatggcttcacgatgtttcagttctctatttacctgcgccattgcccgagcgcagagaatgccgacgtgcatatacggcgtgtgaagggcaccttgcccgaatatggaaaggttggcatcatgcgcattacggacaagcagttcgccgacatgctcttgttcgactgccaacatgccgcccccttgaaccaacccgtccaacaacttgaacttttctgatagtaaacaaagtgcaacttagtagtaagccagaaacggcttataggaatagaaaatgcggtcattttgaccgcattttctattcctaaagtgacgtgtaagtaactgttctacttcgcgttgaacatattctgttgtgttcagtgggcgaagttacaaaatttgagtgatatacacaacgacgggctttttatagttatgaaaattatggttgtgttcagtgggcgaagnnnnnnnnatttgagtgatatacacaacgctattattctacatatctgcaatgccggggttgtgttcagtgggcgaagttacaaaatttgagtgatatacacaaccgttgtccgttgataaggttattttatttgttgtgttcagtgggcgaagnnatttgagtgatatacacaaccaaagtaataattattcatttggcaaatacgttgtgttcagtgggcgaagttacaaaatttgagtgatatacacaacgtaagttatgtaagagttttgtagggaaaggttgtgttcagtgggcgaagttacaaaatttgagtgatatacacaactgcagcgtggggcatttattgcagcaatacacgcacatcatacgctcccccatcttgcgggggcgtcatctgacatcttgcgcgtgtaagtatgctgcgatgattgttgcgcacgattgcatcagcgtgagcggggtggaatagtccccgcaatagaatcaaagatgagatgaggcgcacaaactctatatgaaaaacgcacccacgatggggcgcgtgccgatgcaccacggcggatggtgcaaagtattaacagaaaaaccgaaaaagcaatgaaaaaagcaatttttgtatttgtttttcgtttgtttgaaatacgtataactattaaacgtatcaagtaaacgacccgggggcgggtgaaaaaatgcagaaccgcccgcctccgctttcggtttttcaacgacaaaggtactgcaagtttgcgaaacgtgcaaacactttgcacaaaaaaaagcagacaaaagggcgtgcgaggcttgctgctgttgccatagggtaaagtattcgttgtttgtctattaggctacaaaggtagtgtcaaaaagcgggatttgcaagggggaacggaatttttccgtgattttatgcccatacaaagcgtgtggattgcggagactaccgaccagagtttgctgtgtttctccaccccatagtaggtggacggggtactgccaaactggcggtaactattggcaatacccgggttcatactaccttcaaaatcaaatatcagacctttatcttttgctatttgtatggattgcagtgtcagccatgccattgcgcctgagtgtgcgtaatccgcattgtatgtgggcagcaagtagtagcagacatcagtatcccataccaagaagattgccgccaagatacacccttgagggctgcgcgctgcgataatacgcccctgtttgcgggataaggtctgctctgcaagtgcggtaaaaaagccttccgaatagtcaatggttttgccccgttgcgacaagaactgccgatgtgcggcgtaaaatccggatatggacaagtcgcacattgttataccaccctgtacggcttttttgatttgccgttttttgttggtggagaaatgctgctctatggcatccatgttctgtgtggtgtcgatacgataagacactcgctctttgagggtaaaaccattggccagaaaggcttctcgcaacatcgggtcaaaatacccttgtatggagaatataaggagatggcgcttgcggcagtagtctgttatctgtttgattaacaagcaataaacggctttcttatcgaccttgtctgctatccatacccacgacagctgtgtgtgtgcgggcatcagtacacagcgcattcccgcacgacggagaatatgaaagggaagcatacagacgggttgccccgtatcgggatggcgcacaatgaacacatcccagtcttttccgagtgccgtggcttccatccaccaatactgaccaaatacggggatgggggtgtggaggcataactctctgtatatctctttgttgctcatcggatatgctgcttgataaggacgcgcaagtactctcctcgcacgacttgttcgccgctgaaagtggtgccttccatccaaactctgttgtacaaaggtggcgttgcaggctcgaaattcttggttccgaatacacaatccataccctgttgcagggtgtgcaatgcgttttcactcagcgactcctgcccgaaaggataggcaaacaggttgtgagaggggtgaaacatctgccggagcgtactcatacattccgttgtttgccgtatttgctcggcttccgataattctgcgtagtgcggatggtcaatgctgtgtccgcctatctcaaagcccatatccagcaactcttgtatctggtgtcgggtcatataaggctgctcattctgcaagaacgtctcaaaatccacacccaactcctgtgcgacaagggcaatcctgtcttgttggaaataggtgatatccagcatatcctgcacccattggctgctcttgttgcgacgaagtccttcctctatcaggagactcaccttatagcgataaaaaaggcgcttgttgtccatgcagccgctattcaggaagaatactgcgggtatgttacgctcccgaagaataggggctatcgtggtgtaaatctcgcgtaatccgtcatcgaaagtcagacagaacgagggctcgcggttggcgtttgccgtggcaatctcgtgccatgagatggggcgatagtgcgcctgtaagaaatccaagtctctgcaaaacgtgtcgatattccgataccggtacaggtgcctgatatgtgccaacggagaatcgctaaccacgtgatagtaaggcaacaatacatagtttcccgtctgctgcataagccgctgcatatccactatgcgggtgatgaaagaggctgcgtagaggggtcttctcataagactttcctgaataagtgcataagccaacgataggggtaaaatagccacttctccgttttggagacctcggcgtatcgggttgccttggctccgaagttcttgcaatctgtctccatagatgtgaaatcaaagactacgcctttctcgcgggcgagtttgagggcttcgaggacgagcagtgcgccggcaccggagtccttgcgggcgggtgagtagcagggtatcaggtagtacatcgtgtgcgcgtcccacaccacaaaggcagcggcgcacagggctccgtcggcgttgcgtatcgcgatgatttggcactgcccgaggcgggaggctttgcgctccagcacaagcaaaaactcacgggtgtaactgatttgctttgcctgctcgcgcatgcagtgttcgtggaagcggtagaagtcctccacattcagcgtcatgtcggcatgcagcgacagggcgcgttgcagttggcgtttcttgttcttggagaaggcgttgatgacacggtcgaggtcggtgaggtcctcaatgcggtaggtcacacgctcgcgcaccttgaaaccgagggtgcccatcacggcgggcgcggggctgccgagggggtagtgctggtagtagtaggcgaggtgcaggtcgtccagttggcgggcgaaaccttggcatatcgtgcgcaccgcgtcggcgttgtcgcgcacgtcctcacgcagccagatgcctccaatctgcgtcatctgcggcatgacgatatagcgcagccgccaccgctgacgcagcaggtagggcagcgcggcgcgtatgttgccgtcagggtcgatgtccagcagcacgtcccactgcttgcctgcacagacagcagacatccaccagggttgcataaacaacgggagatcgacttctttctcgcagaactgggtatagcgttcgatattttccataatagagagttcttgtaatacctatcggcaaagttaggtcttttcttgcaaatttgcaagtctgttatattcttcgtacttttgtcttgtcggttcggcttcaataatgctgacgacaccatatagaatatgaatacgtttggagagatattccgtttcacggatttcggagaatctcatggcatggctgtgggaggtgttgttgatgggtgtcctgcgggggtacacgtcaattttgatgaaatacagaccgaacttgatcggcgtgcaggacgctgtggcgatttttgcgagttcgtttcggcacgggcaaaaaacgaacaggatactgttgagtggctctcaggcttgcaagacggagtgactctggggacgcccattgctttcctcgttcgcaacaaagaacagaaatcaaccgactatgctgcctgcggagaggtctatcgcccggggcatgccgactacacctatgatcgcaagtatggtattcgtgccgtcagcggaggtggacgggcgtctgctcgggaaaccgtcgcacgggtggtggctggggcaatcgccaaacagatactgggtacttggggaattgagatacacgcctctattacgcaaatcggtaatgcaaccgattatgaagaaatgatcgctctcttgaatgacgttcagacggtaggggacagcatcggggctgtcatccatacttctgtctctgggttgcctgttggagtgggagaaccggtgttcgataaattgtctgcgcggttggcgtatgctatgttgagcatcaatgcctgcaagggattcgcttatggatccggttttgcgggtgtcgggcagagaggaagcctgctcaatgatgctatgcctttctcaaccaatcatgcaggaggtatattgggaggtatatccaatggacagaaagtctgtttcgatgtggtgttcaaacctacaccgagtattcggaaaacgcaacagactatcaatatggaagggaaaacacaggaaattagtgtcagaggaagacacgacgtgtgtgtcgctattcgggcggtgcctgtcgtggaatccatgacggcggttacactcttggatatgtgcctgctggcgcaggtttcccgaaaaaaataagggaaatgtttgctggtataggaaaaacttcatatatttgcggtcactaattagtttatgtattactaaatatagttcttgtatgcaaaccaaaaagtcgcaaaaggcaagtcttgaaaataagaagtttacctatcttcttatggggtttgtgcttgtgttgagtatctgctatgtagccttcgaatggacagagaaagatgtaaccaagtacgaggtagtcaacgacgatatcctttttgaagatgaaattgaaattcagcagacaacccaggaaaccactcctccacctcctccgccaccaccggtacaagaggttgaggcactcactatcgtggaaaatgatgtggaaacgcagcatatagagatacaaacggaggacaaggcggaagatgtcgtggtaatcgctccgccggtagaagcaccggaggaagaagaagaagtggagaccgtcttcgtgatcgtagagaaaatgcctgagttcccgggcggaaacgaacggctgtttaagtatctctcggaaaacctgaagtatcctgttattgctcaggaaaatggtatccagggacgtgctatctgccagtttgtggtgaaccgcgatggttccatcgtagatgtggaagtcgtacgatcggcaggcgatgcttcgcttgacaaagaggcagttcgggttatcaagtctatgcctaagtggacaccgggtaaacaacgtggtaaggcggtgcgcgtgaaatatacattgccggtatctttcaaattgcaataatcgcctgtagggattatgataagggcgacctcgtttacaggtcgccttttttgctactgaataaaagggcactgtctgttgcttggcaactggcaaaaaggatgttcccgtttagccgacctcaagccgacctcaagcacccctcatcgacacatggaattggcttatagagatattatgtacatacccggagtgggacctaaacgcgctgaggctcttaagaaagaacttaaggtcggcacggcaatggacttgctctacatctttccgtacaaatatatcgaccggagcaggttttggaaaatacgggagatacaggatgaggatacttatgtgcagattatcggaaccgttcgggattggcggcttataggggaggggaaacatcagcgtctttctgctgtattcaccgatggcgaagattctatcgaattggtttggttcaagggggcggtcaagtatttgaaactgcaacgcgatgtgcagtatctgcttttcggtaaaccgacggctttcaatcatcagtacaatatcgtgcaccctgagttggaaccgctctccaaagtgaacctgcagaccaagagggggctggaaccttactacaatacttccgaacgtatgaagtcctcgtggcttgatacgcgggcgatgcgcaaaatcatatcggctcttatgcccgatttgaagcagggagtacccgatacattgggggctgaactgcgagagaagtaccacttgatgtctctgaccgacagtctggtgaatatacatttccccaaagacactgcctccatgaaaaaagcgagagagcgtctgaagtttgaagagttgttctatattcaattgcaaatcttgcggcagacacgtcagcgggatagtcagaacaaaggattcctgatgccgcgtgtgggggagagtttccatactttctatggtcactatcttcctttcccgcttactggtgcgcagaaacgtgttatcagggagatacacggcgatttgaaaagcggcaagcagatgaaccgccttttgcagggggatgtggggagcggaaaaacggtggttgcattgctctgtgccatgttggcgaaagacaatggctatcagacctgcctcatggcaccgacggaaatccttgcacagcagcactatcagacgttttcttcattgcttgcagaacagaaaacggttcgcattgctctgcttacgggttctacgccgcgcaaacaacgggaagcaatacataccatgctgttgtcaggggaattggatattcttatcggcacacacgctttgttggaagatgtggtgcagttcgccaatttgggattggtcatagtggacgaacaacaccgctttggggtggcgcagcgcgccaagttgtgggtaaagaacttgcagccgcctcacgtcttggtgatgacggcaacgcctatcccacgcacactggcaatgaccgtatatggcgacttgtccgtgtcggtcatcgacgaacttcctcccggaagaaaacctgtccgcacattgcattataccaaactgcaaaggcagtctgtcaatcattttatcagccggcaggtggagcagggacgccaagtctatgtggtgtacccgttgatagaggaaaacaagaagatggacctggcggatttggaaacaggttatcagatcctgtgcgagacgttccctcaataccggatatcggtggtgcatggcagaatgaaaccgcaggagaaggaactgcagatgcgcaacttcgcagaaggacgaacccagatactggtggcgaccactgtcattgaggtgggcgtgaatgtaccgaacgccaccgttatgattgtggagaacgccgaacgcttcggactttcgcaactgcaccagttgcggggacgggtcggacggggggcggcggagagttactgtctgttgcttacaaacgtggaactatcccgcgacacgcgcaaacggatggatatcatggtggcgaccaacgatggcttccgtatcgcggaagccgacttgcaactcagaggacccggcgacctggagggtacgcagcagtcaggacttccctttgagttgaagatagcgtcgctctcaaccgacgggcaactcctggaactggcacgctgtgccgccagcgaaatcctggacaatgatccgcaactgtccctccctgcccattcggtctatctccgacaactcaaccgcttgaagc

SEQ ID NO: 898 - DNA, 23486 bp, synthetic construct
  misc_feature 1..23486: note = Synthetic
  source 1..23486: mol_type = other DNA
tttgacggcactatcgtcacccacgaatatccacgaatcggaaagcccattccatttgctattgagacactcaagcgactacaacaggaggatcatcatcaactcatcttgtggtctgttcgcgaaggacatctcttgcaggaggcagttgattactgtgcgcagagaggacttgaattctatgcagtcaatagcaattatcccgaagaaaagcccgaagaacggaccaatcgcaaggtgactgcggatttatatattgacgaccgcaatcttggtggactgcccgattggggaattatctaccagatgattcataccggtaacgccagcaaacccgctcccgtttcatacgatctgccacgacgcaaaaaaacatggtggcaaaaaatacttggattatgattacacttcgtaaattagaaccttccgacttacctttcctgtaccaatgggagaatgatgccgatgcatgggcagatggtgcaaaccacaaccctctctcccaacacgacttacgcgagtacatagcagcttctacaggagacatctaccgcgacggacaactccgtctcattatccaaatcgacgattcaacagcaggttgtctcgacctcttcaatcttgatatccgcaaccgcagggcggagataggtatgtatatcgctcccgaattccgtggaaaaggcattggcagacaagcagttatcgctttggagaagtatgcagcacagcagttaaacttacgtattctctatgcaatcatcgctactgccaatagcgcttgtaccagactgtacgcttcgctgaactacgatccttcgtctattcttaaatattggacacttgaatcagatgccatcctttggcagaaaaacttatgaaacacactattctcttagccatcgtttgtggcgctttaacactttctgcgtgttctaactcgcaaaaacaactccaaaagcgcgctacggaattatgcgcctatatccctgaccatcagctcttagagcgctcgcaggactatctcactcccgatttctatgccctgctcgatacgatgttcaatcacttgcccgagcacgaagcaatggatcatgagtggctgtactatttcgttaccggtaatggcggcaccatcgccaattataccgtcactaccgtggagcgcattgaccctacacatgctgtcgctacagtccttgtacgtcaagtctgggaagatggctcatttgacgaaacgaccgaccttgaagaacatcagctttatatggagcgggtggggaagaagtggcttatgtcggacttcgatggacacaaagccgattgcatcaattatatcgcgaataaccgccgtgaacaagcgctaagagacgctatctcggactatctaattcgagaaataggatgccaataccttcaaggagaaatatgtattcctacgctgatgatggtggcggaagaagactccgttatctatggcgatttctggattatgtggtataacctcgcaggcgatacgctcaaaatggtttcaggaggtaatcattccggcaagatgaccatcgccgaatcgaatggcacgttcgtcgttacagcttttgagcaaaccttagacggagctgctaatgagccaagcgctaagcgaatcttcggaacgcattatgacatctatcattcgatgcactccaacgaatccgttcgtgaggcagtatggcaggagcagctatccgaatacattcgtcgccacaatctctctgcccgttactaccaggactaccaaacaactatgccgattgagcgctaatttttatgctgaatcttgcgttcaacgcagtcagcaataaagcgagcaacttcagtcggttcgagacctgtgacattgagcacaaggtcgtagttgcgtgcgtcatagcgggtcttgccgctgaaggtaagcgtgaagttctctcgagctgtatctactttgtcgataagggcatcggcactaccttcgttgatattcagtcgacgtgccactttatctctgcggaacgtgcgctctgccataaggaacaccttaaaggcattagggtcgtcgcggaagatatgaaatcccgttctgccaagcaatacacatgactctttatgcgctaatgaacgcactaagaactcctcgtccttatacatttctgccgacacattttcataccaccaactgggcttaacagctttgaccttgtcaatctgctcttgcgtcatgttatagcgctctttaatagtgtctaatatctggcggtcatagagctttactcctaacatctttgccagttcggtggcaatctgtcgtccgccggttccaaactcacggccaatagtaacaataaatctatccataaggcgtactgagttagacaatcttagccgcgttgagtttctcgcggattttgatatatattatggtgtcctttttagcaaagtcaatcttcacatatcccatgccgatacccactttcgttgtaggcagcataatgccggaagtaacgtgtccgatggtgttgcctgcttcgtcgcatatctcgtagccattacgcggaatagcgcgctccaagcactcaaagtgcacgagtttgcgtgtcagaccttcggctttctgtttgagcaagaactctttgtcgataaagtctttggcatcaaacttcgtaatccatcctaaacccgcttcgagtggggaagtggtgtcgtcgatatcatgtccatacaggcaataccatttctccagacgcaggctgtcgcgagctccgaggccgataggtgcaagcccatattctttgcctacttcgaacagcgcattccaaatctgtatgccatcttctttcttgaagtatagttcaaatccgcctgctcccgtgtagcctgtattactaagaataacgccctgaatgcctgcgaatgaccattcacggaaagaataatatggaatcgcactcaaatctgcgtccgtcagtttctgcagcatctcggtcgctttcggaccttgaacggcgagttgaccgtatttgtcggaagcattctccagtgtcaaatcggcgccagcaaagcactcgtcttttactttgttcacccatgcccagtctttgtcgatattgccggcattgactacaagcaggtatttggtggtggagtatttatatacaatcaggtcatccacgataccgcctttgccgttagggaagcaggagtattgtgcttttccggcatcgagacgattgatatcgttcgtagttatatactgcagaaaatcgaccgctttagtgcctttaacccaaaactcacccatgtggcttacgtcaaacacacccacgccctcgcgcacaatgcgatgttcttcttgaattcctgtagggtattggataggcatattaaagcctgcaaactcagccattcgtgcgcccaacgcaatgtgaatgtctgtaaaaggagttgtttttaacatttctctatgattttaagtattacattcttagcagcttccatactttgtatgggcagatattcaaaacggctgtggaagttctcgccgccggcaaagatattagggcaggggagtccttcaaacgagagacgtgctccgtccgtgccgccacgaataggttgtactttaggcgttacgcccacttctttcatcgcttcttctaccagcgtaacgatatgcattaccggctccactttctcgcgcatgttgtagtattggtcgcgcagaatgatttccgcggttccttctccgtattcgcggttcactttgcgaaccagatgttccatctcgcgcttgcggctctcaaagcgggcgcggtcatggtcgcgaatgatatagctcagcgtcgtctcttctaccgttccggacatgcctacaaggtgatagaatccctcgtagccttgggtatgttcaggtgtctcccagcgaggcagcatgaccgctaattggtaggcgatacgcatggagttcagcatcttatggtaaccataccccggatgcacgttcactccgtgaacgatgattttgcagcttgcggcattgaagttctcgaactctaactcgccgatagcgccgccgtccatggtataagcaaagtcgcagccgaacttctttacgtcaaagtggtctgctccttgtccgatctcctcgtccggagtaaagccgatacgaatctttccgtgtttgatttctgggtgttggatgaggtactcgcaggcggttactatctctgctattcctgccttatcgtccgcgcccagaagcgtcttgccgtttgtaacaatgatatcattgcctttatagcgtactatttccggatatttagcagtctctaaaacgatattctccgcttcgttaagcacgatatccttgccgtcgtaattggtcactattctcggttgtacatgtttaccgcttgcgtcgggtgacgtatccatgtgggcgatgaagccgatagtgggtttgccctccgtatttgccggcagggtggcgaggatatagccattgttatccaattctacatcctgtaaacctatcgttttcaactcgtcgcgcaggaactgtgcgaactcaatttgtcccggggtggagggagtcagattggttgtctcgtctgaagtagtgcagaagcttacgtacttcaaaaatctctctactaatttattgttttccatatgtgcttattatctgtctaaaaattaacgatcgtcatatctttctgccgattttcggcgaaagcaataatattgtctatcatcgcgtcgcacatcgctttgcggccttcccatgtgccggtgccaatatgcggtacaagcagcacattgtccaacgtcttgagtccctcgcttatctgaggctcatgttcatacacatctaaagcagctccggctatctcatgtgcgcgtaacgcctgtataagcgcctgctcatctacgtgcgctccacgggccgtattaattaggaaagcgtccttacgcatcatcttcaactcgcgctcgccaattaaatggtgaacttcaggagtgtagggtaggttcagactcacatagtccgccgtttgcagcagctcgtcctggcttacatagtgaacttgttcactcgttaagccttcactcgttaagcgttcactcgttacctcgtgcctattatgataaatcaccttcatcccacacgcaatggctctacgtgccaccgagcgaccgatattgcccataccgatgatgcctaacgtctttccataaacactatgtcccaaattctccagcaaaccgaaatgtacttcgttatcccgtatcttacggtctaattccgccgtacgacgagcgattcccattattagtgacatacataactccgccgtcggttcaataacaggattcggggtattggtcactaatatcccacgcttgtgacactccgacacatcgatattgtcataccctacgccaaactgcgtcacaaggcgcaacttgggcagtttgtcgagcaagtcagaacgaacgggtttgtagaaattagtggtgagcacatcggcgtcacagcaacaattattgcccgaatacaaaaccgtatcggggactaattcatgctcagctaagcggtcaaaccactcgctcggaagcattgtgtcgatgagtattttcatttcggctgcaaaattacaacaaatttttgaaatgtgcaagatttttagcaaaaaaatagtctaagctggcttaagcgtgtttttctttgctaaaaagattgccgtttgcacaatagtgcagacgtaatttcggagggaacccacccaaatttttttttgggaaggggcgtgccgaaattacaataaaaaaattgacaaagtcaaggcggcgtcagaaaattgctccgcaataatcgtgcccttgtgactaagaagttacaacaaataaatcaaatgtgcaaattttttagcaaataaatagcgttttttttgtccatctcataaaattgttgtacttttgcacccgattatgaagaaaagttctattatagtgcccgacggattgcaggaagtgctcctccacgcgtgctgtgcgccttgctcatccgctattgtggaatggctacttgcgcatgatattaaacctactatcttctactataatccgaatatcttcccgcgcgaggagtatgagattcgtaagaacgagagtaagcgtcacgcccaatcgctcggaatagagtggattgatggcgattataatcatgaggcatggctctatgacgtgaaaggcttagaggcggagccggaaagaggcaaacgctgtgagttatgtttctaccatcgtttgtttgctactgcgcgcaaggcgcaagagatggatatacctttttttgctaccaccttagcctcttcccgttggaagaacctggagcagattaatgccgcaggactgaaagccgagtacatggtcaatcgttatcccgctgatagtgtcgtgcatgaacccgtacatttctgggcgcagaactggcgcaaagatggactccaggagcgccgtaatgaattactcaagcaatataacttctataatcagctcttctgcggctgcgaatttagccaaatttaacgtgcaaaacaaaaaaaaactacttttttcttgcagggttcaaaaaaaagcagtacttttgcagccgctttttaatcgagagaagtgtttctcgagaaaaatggctactttagccgaattcggaaagttgtctgagtggtcgaaagagccacactcgaaatgtggtgtacccatcacgtggtaccgggggttcgaatccctcactttccgcaaagcgtcgagtttggtaaccgaacaaaatgcaaaaaggaatggaggtcattgacttccatttttttgtgggcaatagtgcctgttgagaatttattatcataaaggtactatggttcacaaaaagaaagggtgcttacactcttacctttgtattttgtttagttgtaagaactgcagctttgcacaggatgcagccggcaggcattagggttttcgaggtgggcggcatagccgctcggtgccctcgaatccctcactttccgcaaggtaaaagtttatctataagaaaaacgccagccgaagctgacgttctttcccgtcgaggggctgttcgccgcctcgacatccggggtcccaaaaacattttaatttttgggggaagcgtagaacacggcggcgcactttacaagggcagagcccgcagtcgtgcaagccgtagtttaagcgctatccttggtagtttgcccattctctgtcccacaagtagttgcggagtttcttgaatgtggagccacagccttagcaacagcgctgaacttgtcgaagcgtgccaactctgcagcggtgtacggagtggaacgtttgccacggatttgcgtgtacttgcgctcttcgccgtgctcggacagtccggcatggcggtagcagtacgtcacgcgacttttcttactcaatttgcccgacacgtgatcaatcgggtctaaaaatacaactttactcatttcagttaaggtttaggtttgttaataatactttgttaattgtcaccggattttatccggctttcttcgttcatttcaggcggatactatccgccgctctcagaacgctttcttggaagcgtcataactctcgacggtcttggtgactatcgtacaactggtgtcacccttctgccaatactgactctcggtcgtcaccactcgcgtcacattgcagctcaccatgcaggcggccactatcgcgaccatccctgcaattaaaattcctcgcttcatcataatgaattattcattaatcattattcattatcattattcattcctgtcgaggggctgtttgccgcctcgacttcggggtccccaaaacatttctaatttttggggaaagcgtagagcaaggcggcgcactatacaagggcagagcccgtagtcgtgcaagccttagcttaagcgtgcgtactcctgtgcaaacatgaagccttgcagcgaggaatacttcttctggttcttaaacgcctccgcataagctgctttttgctcttccgtcaaggccttcactgccgcacgagcactcgcgaacttagtttgacgagccaactcttccgcgctaaacggtttcttacgaggattacacatcttgccggtgtaaagggtgttgcctttcttcgcgaaatacacatcgctgtgctcgcagatcttaccatggtactctttcaccatttcaattggaatgtactttgccataatagttaaagtttagattgttaataatactttgttaattgttgccggatttaatccggtttttcgttcattgtgccgtctgggagacggctttttacagacgctgatgttgcgctgaccttgcgctgctcttccgacgagctcttttcgaaagacgatgcaaaattactacatttttcccactcccacaataccttgtcccccaactcgcaccctttgtcccctaactcgtgcaatctgtccctataggtagtataatatggttaaaagttacattgatcgaatttaaaattgaaacatcgcgtttgcgcgcgaaattcaattatgaaaggtcagttaaccgatgcacatgtaaaaacaaaatcgcatcgtgttaacttttaaccttttttcttcctcaattatttgcacacctcaaaaatttgttgtacctttgcacgcaatttaaatatattttatgaagacacaagatcttacaaatgacacaagaggagagattgttatctatcaatctgaagaagggagagtttctgttgatgtattgtttcaagacgaaacggtttggttgcctattgagcaaatgagtatattgtttggaaaatcgcgctctaccatcaatgagcatattctgaatatttacaaagaaggtgaactttccgaagcagatacggtgagaaaaatcggaatttccgacttttctaccaaacccaccaatttctacaacctcgatgtcgtcatttcagtcggttatcgcgttcattctgtgcaaggtacgcgtttccgtcaatgggctacccagcgcattcatgagtatatcatcaaaggctatacacttgatgatgagcgattgaaaggaaatggtggacgttattttcgcgaattactccaacgcatccgtgatattcgcagtagcgaacgtaacctttatcagcaggtgaccgatatctatgcaacggcggtagattatgatccgaaagcggagataactcgtcaattctttgctacagtgcaaaacaagatgcactatgccgcacaccaacatacagcggcagaagtggtctatgacagagtagataatgaaaagccgatgcttggaatgacgaacttcaaagggaattatatcacgaaagatgatgtgattattgccaagaattatttatcagaaaatgaactccaacgattgaatttgttagtgtctcagttcttcgactatgccgaattacaagcgatggagcaacatccaatgactatgcaagagtggatagatgagcttgatcgcgtactcagcaataatcgtcgcccgttgttagaagggggcggctctattagtcaccaacaagcacaagaaaaagcggagcacgaatacaccatctatcgccagcgagagatgaaccaattagaatctgactatgatcgcgcaattcgacagttatctctcttcggctcgactaatggcttattaggcgagggagaacctaatgaccaataaaaatcccctccaaagactattttgcaaatggatgacaataatagatgaacgataacaacggagagtgccgaaaagtctctaagtctacattcgccaaaccttaacgtgcgtagcacactacacaaaatgtgcaggtttgtgatgaaaactgcacttttatttgtatatctcaattttttatagtaattttgcatcgcaaaattgtttgaataaaatataataccatatgacaaagaaaattctcggattagatttaggtgtgggctctatcggttgggcattgattgaaacgcaagatgacaaaccttctcaaattttaggcataggtagtcgcatcgtacctatctccaatgacgatagcgatcagttccagaaaggacaagcaataactaaaaatgcagagcgtacgcaaaggcgtaccgcacgcaaaggatatgatcgttatcaactgcggcgcgctcttttgaccaacttactacgagaaaaaaacatgttgccggactatatgaatgagtccgcaaaagatttgtggcgtctgcgttcagacgccgcaactgaaggtaaaaaactctccttaaaagaaataggtagagtgttataccatatcaaccaaaagcgtggatacaaacattcgaaagcggatgtcagcgctgatagtaagcagactaagtatgttcaagaagtaaacaaaagatttcaggagttaagagaacttggacaaactataggccaacacttctatcagatgttgcaacaatctgtcgtgcaaagtgaaaaaggggtttattatactttccgtataaaagataaagtataccctcgccgtgcttacgaggaggagtttgataaaataatgtcaactcaaaaggtattttatccagatatactgacagacgaatttattgacactctccgtaatcgcattatattctatcaacgtccgcttaaatcgtgtaaacatctcgtgggcttatgtgaatttgaaatgcgaccatataaaaaagcagatggctcaatcgtctatagcggtcccaaatgtgcaccacgcacttctcctttagcgcaaatttgtgcagtatgggaagctgttaataatatcaaactaaccaaccgtaacaacgaaatttatccaatttctcaggaagaacgccaagcgatggtagatttcttacagacccataaagagatgaaagtagcagatatgcaacgaatattgggtattaagaaaagtgatggatggtggggaggcaaagctattggtaaaggtataaaaggtaatcagacgctttgtcagttgcgcgaagctttaggagaaaagtaccaagacctcctcaagatggagattaagaaaattgattctggattctttgatgcagaaacagcggaagtaatagaaattatagatcccgcgtgtgaaaatgagcctttattccaactttggcatgtggtttattctgtacaagataaagatgaactgcgtaaagctttacttaaaaaattcaatattgatgacgaacaagttgttgagaatttatataatcttgacttcgtaaagccgggttatgccaataaatcgcataagttcattcgccgaatcttgccatatttgatgcaaggcgagatgtatagtgttgcttgtgctcgcgtggggataaatcactctaatagtagaaccaaggaagaattgaatactcgtcctttggttgaacatattaaattactccaaaaaaatactttgcgtcaaccagtcattgagaagattcttaatcaaatgattaatattgtcaatgcactgcgtgataaatacggtgagatagctgaagtacgcgtagagttggctcgagaattgaaacaaaataaggaagaacgtgaaactacctataaaaacaatagtaaaaacgaacgccttaatcgcgaaattaccgagcgaattaaagaaatgggcattcgcccttcacgtatgcgagttcagaaatacaaactatgggaagaaagtttgcatcaatgtttctattgtggcaagactgttggggctgctgagttcctttctggagccgatgtggaaattgaacatatcattcctcgcagtgtgttattcgatgatagttatagcaataaggtgtgtgcttgtcgtgaatgtaaccatgccaaaaataaccaaacggcatttgattttatgaaagctcaacctacagataagtttgaagcgtataaaagccgagttgatgatgctttcaaggaaaaacgaataagtaagaccaaacgcgaccatttattgtggggattagaggatatccctcaagattttattgatagacaattacgccaaagtcaatatatcgcggcaaaagcagttgagatattgcaaactgccattcgcgatgttcacgctacaagtggaagcgtgacagaactcttacgtcatcagtggggatatgacgaaatattacatcaccttaatctgcctcgttatagtaaggcagatttaacagaaatagttcaatatgatcacgctggacaaaaacatacagtagaacgcattaagaattggaacaaacgtttagatcaacgccaccatgccgtagatgcgttgactattgcattaacgaaacaaagctatattcaacggcttaatacacttaacgcttcgcgcgaagctatatataatgaagtagagcaagcagatgctaaattgcgcaacgaagagaaaagaactctcctggagaactgggttgctatacaaccacacttcccagttaaggatgtagaagacaaagtagccggaatacttgtctctttccgtgcgggtaaacgtgttacaacgccagctaaacgcgccgtgtatcgtaacggaaagcgaatcaatgtacaaaagggattattagtgccccgcggagctttgaccgaagagactgtttatggcaaattaggcgaccgctttgttgtaaaatatccacttcaacacccaagtatgttccctgataatattgtagatcctactatacgagaattagttaaaaaacggttatccgaatttaataacgatccaaaacaagcatttgcaactcctttgtattccgataaggcgcaaaaaatggagataaaaagtgtacgttgtttcgcccccggagtttcagcgcaaggttcaactccagtgcgtttcaataatgatggaaatcctattggctatagtaaaacgggtaataatcatcatatagctatttataaggatgccaatggaaaattttgggaaagtgttgtaagcttcactgaggctgtacatcgcaaactaattggtctgccagtagttattgataagccaaaacaggtttgggataaagtgattaacatgaatcttcctgaggactatctgctgacattgccccaagataattgggaatttgtcgtttcaatgcaagtcaatgatatgttcattataggcttgacgaatgtggaatttgaagacgctattcacgaaaaagactatgcattattgaatcaacatctctatcgagtgcaacagttaagtaaagctaattatatgtttagactccatacggaaacatctgtagatgataaatacgagggcgttaaaaatgaaaagttaagtatggatttgaagaaaatgattagtattcgtagccccaaaggaatgactaataatatacacaaggttcgtattagtatccttggcgaaataactcctctatgataaagcgcgtcattggatttacaaaccctacttatctcagtctcaagcagggacaagttgtagtcaaatatccagagattgaaaatagcgaacatctatctgatgccatcaaagcggaaggtgttcgcactttgccgatatggagttgttcgattgtcaacatcgggcacctttagaacaacccgtccaacaattggaacttttttagaacaagaaaagtggacaaaagaaaaatgcagacgaaatcaatcgcctgcatttttcaatcctaaaacattacgtaatgttgtgatatataacattttagacaaactaagttgtcttaggactttgtcgattacaaatttgaaggatatacacaactcatacaagcctgccggcacggggcgcatcgttgtcttaggactttgtcgattacaaatttgaaggatatacacaacagtcacacgctccattttgttgcaactcgcgttgtcttaggactttgtcgattacaaatttgaaggatatacacaacagaagacctacaacaggcttgagttccgaagttgtcttaggactttgtcgattacaaatttgaaggatatacacaacatctcgatgctgatttgcacggtgtcggtggttgtattaggactttgtcgattacaaatttgaaggatatacacaaccagcgcctactgtctgctgttgcgcaggtggttgtcttaggactttatcgattacaaatttgaaggatatacacaacacaactccgttcgggtattctcgcatgtttgttgtcttaggactttttcgattacaaatttgcgtatttaatatgtcaaagaacgaaaaacgctgcaaaattactatttttttgccgaatacacaaaaaaatgcttaaaaaatttgcacgtatcaaagaaaagcactacctttgcaccacaatttgaaggatatacacaataaggattattccgttgtgtaaacattcagagtggggctcatgcctcgctcttttttcttcatttcccatcgttcaccttgtgtctttccaccttatcccagcttgtctcttttttcttgccgttctcacacaaaaaaatagacaaccaatcacccaccttcctctcactcaacaacatacatagtagcctgtatctttttttcttcttcacaacgtcacacctccatgcaaaataaatacatgctactcccaaccccttctatttactactattcttactagtagcctgtatcttttttcaacgtacacctcctatctcaaccacaaaaaataaatacatgctactctctaactcactactaatagaatattcggcacgccccttccctaaacaagtttagggtgggtatccactccgaaaatataactgcaccctgcgggacgtacgcaaagggagctgtgcaagcacctaagtccataatggtgccttctatatagaataaaattctatttacttcatttttttgctcaaatatttgcgtatgtgcagtttttgttgtatctttgcgggctgaatgaatattaaaccaaaataccatgaaagagattgaaattaagaccaaggttaaagcgtgtcagctgaacgaactcagcgccgacgaacaggagcttatcgctatcgcaaaacagcaaacgaacaactcctactgcccttattcgaaattccacgtaggcgcagccgctaagctcgacaacggagtaattattcgtggtgctaaccaagagaatgccgcctatccgagcggcttgtgcgctgagcgcagtgccctgtttgctgcaggtgctaactatcccgaagtgccggtgaatacgttagtaatcgcatgctacaccgacggacactttaccgaagacccaggtgctccgtgtggtgcatgccgacaggtgatgattgaaacagaacaccgctatggcaaaccgatgaaggtcatactgtacggtgagaaagagatatttgtcttcgagaaagcctctgacctcatgccggtcggattcttctcggaagacctgaaaggctagagccttattttagatttaagattttagatttaagattgtagattttagatttaagattttagattgtagatgtttaagaagttggatatatatttgctcaagaactttcttgggttattcttggcgacgttcttcatcgccatcttcattctgcttatgcagtttgtatggatgcacgtaaaggacctggtcggcaagggcgtggagatatcggtattggcggagttctttatctacgcgattgcatcggtcgtgccattggcattgcctttagcgatattgttagcttcgttgatatccttcggaaaccttggcgagaaatttgagctaacggcgatgaaagcggcgggaatatcacttttccgcatcatgcaaccgctcgctatcgctatcgccgtaatcagcgtgggcgcattcttcttctcaaacaacgtgctgcctaagtcccaaacaaaactatgggcactcatcttctccctaaggcagaagtcgcccgaattggatataccggtaggggagttctacgatggaataggcggaacgaacgtctatgtgcgacataagaacaacaaaaccggaatgctctacgggttgatgatatacgacttctcggagggctttaagaacgcaacagttattgtcgccgactccggaatgattcaaataaccaaggacaaacaacacctgctgctgacactctatagcggcgagtcgttcgagaacctggaccaaaagcaacagcgcgctaccgcaacgcagaagaatatcccttaccgccgtgagactttccaacgcaaacaactgctcaaggacttcaacaccgagctcaatcgctacgacgagtcgatattgcaggatcagcatgtctcgaaaaacgtgagccaactcattcattcggttgatagcatgaaggaagtggcgcaaggtaggagtaggcaacagagcgagaaactggtggaaaagagctatttcgggcgcgataacttcagcggacgcgtgctccatcccgtagagaaagaggagtgggtggagtatgatgtcgattcactctatgcccacatgtccgaccgcgacaaacgcgctgtcgtaagctctatgctcgacaaagtgcgtctacaggaagaccaaatcaagtataacgccatgctgctcgacgactaccaacggtatatccgcaagcacgagatagaactgcatcgtaagttcaccttggcgttcgcctgcctgattttcttctttatcggagcaccgctcggcgctatcatccgcaaaggcggattgggcgcacccgttgtgatatcggtcattatgtttattatttactacatcatagacaacaccggctataagatggctcgcgaagctttatggcctgtatgggcaggaatgtggctcagctcgtttgcgctactgcctatcggtatcttccttacctacaaagccgctacagactccggaatgttcaaccctgaagtatgggcgaaagtctatgacaaaattaaggtacaagttattgcaaaatggacaaaattgaagaagcattaaaagacttccaagacggtcagttcgtcatcgttgtggacgatgaagaccgtgagaacgaaggtgattttatcatagcggcggagaagattactcccgaaaaggtgaacttcatgctgcaacatggtcgtggcgtactatgcgctccaatcacggagaaacgctgcgccgaactggacttaatgcaccaggtggcaaataacacgtcgatgcttggaacgccgttcaccgtgaccgtagataagttagaaggctgcactaccggtgtatcggcagcagaccgctgcgctactattcgcgccttagcagatcccgcatccacgccttccacctttggacgtcccggacacatcaacccgctctatgccaaagagcgtggcgtactccaacgtgccggacacaccgaggccgccattgacctatgtcgattagcaggactcacacccgctgccgcactcatcgagataatgaacgaagacggcacgatggcacgactgccgcaactggaacaagtggcgaaagagtatggactcaaactcatatccatcaaggacctgattgcctatcggttaggagagtcaggagcaagtagtcgaaagtcgaaagatgaaagtcgaaagcaattagtcgaaagtcaagagttaggagaggagagcgaagtggcgctgatagagcgcggagaaaccgttttcctgcctaccgagtacggagacttccgactcacaccgtttagagacctgacgaacggcttggagcatgtggctttagtgaaaggcgaatggaaagaggatgaacccgttctatgccgtgtgcacagtagctgcatgaccggcgatatatttggttcacgtcgctgcgaatgtggcgaacaactacaccaagccatgcgcctgattgagaaagagggcaaaggtatcgttgtttatatgaaccaagaaggtcgtggtatcggtctaatgaataaaattcgcgcctatagactgcaagaacaaggcgatgacaccgtggaagccaatgtccatctcggcttccgccccgatgaacgcgactacggagtgggcgcacagatactacgagaactcggcgctcgcaaacttcgtttgatgactaataatccggtaaaaagagtaggtttggaaagctatggcatagaaattgtagagaacgtgagcatagaggttactccgaacccctataacctgcgatacatgcagaccaagaaggagaaaatgcatcacaatttaaatcttgtgtgattatgaaacgcttaacttatcttttcgctatcctgctgataagcagcgtagtggcttgggctgacgaaacaatcaccgtaacagccaaaaacagtgacatctctgctaacctcgacctcaaggtggttgctaaactctttggtgaggcgaaagacctggaagagtttgagaagatgttaaacgacccacaacaagctctggtgaacctcgacctcaacggcgatggtgacgtggattatatacgcgtaatcgaaacaaccaatggcaataagcacctaatcgtgctccaagcggttttggcaaaggatatctaccaagacgttgccagtatatatgtagagaaagatgaggcaaataacgtctcggtacaagtgataggcgatgagtatatctacggcaaaaactacgtcatcgaaccggtgtatatctatagacctgttatctacgactggttttggggtccgacttggtactgctggcattcgccttggtactggggctattggccgggttggtgggctccttacgcttgcataggttacggcgcatactaccaccgctgctatgactaccaccacaatcactatggctgcagtttccactatgctaaggaggcacgtcctacctcccaccgcatggctgaaggcgttagccgcagagactatgctaccacccacgctgagtcatcctttgacaaacgtaacacgggtataacgaatgcgcgcgagctctcttctccgagacaatcaagcgcacgcacctctgccggtcctgcagctgcacaacgcgtaagcactacttcgtctcaaacagcgcaaggagcttccactcgtagcagttatagcggtccgtccacgcgcagcagcaacagcgcaacctctacgcgcagcagctactccacatccggcgtatcgactcgcagtagttcgaacgtatctaccacgcgtagcgcttcctctgcttcttccagcagacaagcatcctacacaccgtcgtataacacgaacagcagcacacgtagcgcgagtacgtattcgtcaggaaatagcacgagaaatacgtattcatcgggaaacagcagcacgcgtagttcctattcgggaagtagcacacgcagctcctattcgggcggcagcagtttttccggcggcggaggcggttactccggcggaagtagtcgcggaggcggcggtgtctcgaccagacgataaaaaaagtcgctccggttatacacctaagagcgacttaacgaattcttctttatggaaggcctgtaggtcttccattttttcgcccaagccgatatagcgcacaggtatcttgaactggtcactgataccaataacaacgccacctttcgccgtaccatcgagcttggtgatagcgagactggtgacttgggtagccttggtaaactgcttggcttgctcgaaagcgttttgtccggtggaaccgtctaaaacgagcatgatatcatgtggcgcgtcgggaacaactttttgcataaccgtcttaatcttagtcagctcgttcatcagattaatcttattatgtagtcgtcctgccgtatcgataagtaccacatcggcatcgtttgctttggcgcttgccaccgtatcataagcgacacttgcagggtcggagccttgttgttgcttgataacaggcactcccacacgctcgccccagatgcataactgctctacagccgctgcgcggaacgtatctgctgcaccgaggtacactttcttgcccgctttcttatactgataggccaatttacctatcgtcgtcgttttacctacgccattgacccccactaccatgataacgtatggtttgcatggcaaaggctcggtgaaatcgcgaatatcggtctcgtgctcggatagcatatctgccacttcgtccactaaaagtgcgttgaattcggctgttccgatatacttatcccgtttaacacgctcctgaatgcgctcaataatgcgtagcgtcgtttctactcctacgtcggaggagataagtgcttcctctaagttatctaatacatcgtcgtccacagtggacttaccggcaatcgcgtgactaatcttactgagcacgctttccttactcttctcaagacccttatctaaggtctctttcttttccttaccaaataaaccaaaaaatgccatatcttaacgaatgattttaacaaaggttagtactataattttaatgtattcaccaacggtttggtggttaatatagcgcatattaagcgcaatcttagccggcataatctcctctacatacgtcttatcggggtcgttggacttagccagtagtgcattctcgtcgatatactcaatggaggcatagtcggtgattccgggtttaacggacagcactttccgctgttcaggcgtgtataagtccacgtacttgcgtacttccggccgaggaccaactaaggacatgtcgccaataagaacgttgatgagttggggaagttcgtctaacttatatttccttatgtaatatcccgcgcgcgtaacgcgtggatctctttccccgatagtgataagactcatcttatctgcgcctgtgcgcatggaacggaacttaatcagtccgaagtctttgccgttgagcccaactcgctgctgccgataaaagacaggacccgggtcatctatcactatccatagggcaatgataataaacagcgggcagagaaacaaaagtccgcagaagctgacaacgaggtctattaaacgaatgagcgctttcatttagtggtcagtatatcagtgtattgctcaattatatatgcgatatcatcgtcagtgagcagcgtgtgcagcggcaaggtaatctcgttagcaaagcgagcataagcgttcggatagttggcgatatcgaagcctaactgcttataggctgtcatcatcggtagaggcttatagtgcacatttgttgcgataccgcgctctgccattttaacgataatctcctgtctgcgctcaagagacgcattaggaactcgggtaatataaaggtgcccggacgattgatagtcagcggtatagtgattcagtgtctctactcctaacgggcggaaagcagcatcgaaacgctcaataatctgcttgcggcgtgctaaaagagcagggtagcgcttcatttgaatgagaccgatagcagccgctatatccgtcatgttgcacttgtaccacggaccaacaatatcatattcccacgcgccgagttgcgtcttagccaaagcgtctttggattggccgtgcagcgagaagagttgcagttggtggtataactcgtcatcgtttagtccctctcgcgagcgccacgtcaatgcaccgccttccgcggtggtgaagttctttactgcgtggaaagagaatgcggtgaaatcggcaacagaaccaatcatttgacctttgtaggtcgccccaaaagcatgtgcaccatccgcacaaatgataatacgtccaaaagcgcgctggatatcattagccggcgagaagagtgccttcttacgctctacgatttggaaaatgcgctcgtagtcgcacgggatacctgctaaatcaacaggaataatcacttttgtgcggtcggtaatagcgcgttccaaggcgtcgtagtccatctccaagcagtcgggttgaacgtccaccatcacaacttttgctccaacgtggcaaacgacagatgctgtagctgtataggtataagcgggcacaatcacttcgtctccctcgccaataccgagtaagcgcaacgccatctcagcacaagcggtctgcgaattaaggcacactgctttatttactccaacgtaagctgcaatttggcgttctaactctttggtacgtggacctgtggtaatccaaccagacaggatggcttcttttacttcctcaacctcggcttgcgtcatatcaggcggcgagaaaggaatgtttcttagtttcatattcatagttcgtataatattaacgtgtagttgatacagataattgtttcttagttagtatggcaagtattccagcccagtaaccgattccgtaactaagatgtgttacgaagaatgtaacgagacaccataggttgcgcttttggatagagactattagtatggctaaccaatagatagtccaaaaaatggaatatagcactcccaaaaagacgggtagtttgccaacgaataatgcgcataaaacaaagagcacgaaaagaggtggtgcaaattgtcttaacgtagccggtttacctaattttcggctcaccaagggcttatataggccgtactggtaaaacatccgcgccatcttggaaatagtgtctcgtgcgaaataatccacccgaatagatggaacgagatagattttgcctccattgagcagtgtgcgcgcgttaaactcatcatcttcagcgcggggaagcgtctcgtccagtagtccgactttgtcgaaccactctttgcgccaacaaccaaaaggtacggtgtccacttctttaatcttatcggtgctgttgatgcggaaatcggagttgcctacgcctaacggatggctacaagcaatagcaatcgcttgtgctcgaagcgaatcattagcaggtagcgtattgcagcaacctcctacgttttgcgcatcaggcagcgtttggagagcatggatgagtgtggagacataattagtcgggtagccggcgtgcgcatcgatacgtacaatatattcccctttcgccaaagggatgccgatattgatagcacttggtgctacttgtttgggattagccacacggcgaatattatcgtgtttttgtgcgtattcatcgatgatagcacatgtcttatccgtactgccaccatcgataagtagcaattcccaaagagtggacgggtagtcttgggctaaaatgctgtcaatgcacttagcaatatacttctcctcgttataggttggacataatattgaaacaaaattagtcatttggcagttggaattggtaaacaaagtgccgctcgcgcttattaacaggcggcagttgcatgtaattatgatataagttagtcaggtattggtcgtaaccattcgggataaatgcttttgtttgctcaaaagtggcttctatggacggcatatagaccgagcgtgggaat

SEQ ID NO: 899 - DNA, 23480 bp, synthetic construct
  misc_feature 1..23480: note = Synthetic
  source 1..23480: mol_type = other DNA
aagagataggagtcactccgtgtttgattctacgcgtgagccgtttgggcaaagagatagcgtataagtttgcggaccgctactacgatgcgatcgctccgggggaggattttgtggcgatggacaagttacgtgaggcgcaagcggaaggtaagccttggacacaagcccttgcttttgactattcgttggcaataggggaatggataaacaatgatgaaatgagcgcaactttgttgctcaatgatgaattgattatttctcctcaagaagcgatcgtggaagcgagtaagctgatgaccatccggcaaggagatctgatttatatccaggtggcacaagccccgcgcaaagtgcaaaaagaagagattcttcgtatcgaagtggaaggcgaagagaaactatattgtaagatcaaatgagaaaaatattaacgatagtactgatggcattgtgcctgccgatgatggcaggtattcactcgtacgtgaaccgttcagtcttggcggacgggcattgggtgaagattcgcgtgagcgagtccggagtgtgccgaatgagtttcagtgaattggaagctgcgggtttgaacccgagtcagattcgtgtcttcggttacggcggtgcgcagaaagagcaggattttcagaaacgcaacatcgacgacctgccgcaggtgcctgtgtttgtaggaaacgattatattctgttttatgtgcaaggtcctattgcctggacctataacggttcgcgttttgcccatacccgaaacacctattcgaactacggttactacctgttgacggataatgtgggcaataagttagccccgacggcaggggaagcggtaagcggtacgccgacagagatcacgacctatccgctgcatcaagtgcaagacaaagactccttgaacctggtggacaaaacaggtgtgtacggtggcggtcagactttctacggcgagcagttcacagcgaatcagagccgctcgttctccttcagtacgcccaacgcggtagccggtcaatcggtttatgtctatgccgatgtggcagcctatgcttcgacagcctccacttttgcaggcacgctgaacagcagccagaaggggcagacgactattcctgttcccgacgacaactattcgttcggtgagaccggtatcattgttatcaacggtacggcgaaagcaagcaaacagacggtgcttttgcaattacagaacagcaatgccagtgctttgggatggctcaactatatcgagatcacgacaacctctacgctgcagatgaacggcagttatatgggcgtacgcacgacggtgaaccgcaatacatctacaccggttcgtttccacttacagggcgcgaacgccaatacgcaggtatgggatattacgaacttagatgccatcaaacggatgccgacaacgatgtccaacggcgaattgctgtggacaggtacgcaggctgacggggtacatgaatatatcgccgtgaagaccgacgacacgcagtttgtacacgcagaggtagtaggcgaggtgaagaaccagaacctgcatgccttgaagaatattgacttggtgatcatctgcccggagggatacgaagaggtatccacgcagttggcacaggctcaccaggagaaacaaggtatcacatgggcagtggtgaccgatcagcaggtgtataacgagttctcttcgggtacaccggatgcgaccgcttatcgctggttgatgaagatgctgtacgaccgggcgaacggaagcagtatccagaaaccgagatggttactgctcatggggcacggcagttttgataaccgtaagttactgtccaattcgggtacaagcctgctgttgacctatcagtccaagaactcggtcaatgaggtgaaggcgtattgcacggaggactatttcggtttcctggatgataatgaaggtacttcggaccgttcgggtaagatggatatcggtgtaggtcgtttgcctgtcgagagtatagaggaggcgcagacgacggtggataagttgatccgctacatgcacaacgagcaaaccggcaaatggaagaaccagttggtctatctggcggacgacggtgagaacggtacccacacgcagacggcagaagcgagcgcggagcgcgtacgcgtagcaaatccggattttgtggtacataagatcttcttagacgcttatccgcaggaggtgaacgcaagcggagagagctatcctttagccaagaaccgcttgatgaacttgctgcgtaacggtgcgttgttcttcgattattcgggtcacggcggtaataacgccatcaccaatgagtcgatgttgaaccaaaaagacatcgaggcgatgagtaacaaaaatctggcgttctggttgtttgctacctgtaacttcgccttgtgcgatggaggtaaacgctgtgcggcggaatcggctttgctcaatcccaaaggcggagcgatcggggtgttggcggctacccgtaccgtctatgcaacaccgaatacagaacttaaccgcagcgtatgcgaccagttgtttgcgcatacgaatgctttccattacgatatgaccttaggcgaggcgatagcccttggcaaaaataatttaggttcgcaggagaataaattggcctatgtgctgttaggcgatccggctttgcgcctcaactatcctaccgactatcaggtacagacgctgacgcagatggatacgctcaatgcgctgagcgtgcagcatgtagagggacagattattgatgaggacaagaccttggtgtcggatttcaacgggaaagtggatatcactatctatgacaagatgcaatccatccctacccgggacaatgataatgcagggggtgatccgctggtaaacgaatacaacgattatccgaatacgatcttctccggtgcgacagatgtaaaggacggtaagttcagttacaccttcatggtgccaaaggatatccggtataatttcggaaacggccgcatcgtctattatgccgtcacgacggatgaggaagccgagacggaggaagcagtaggacattatgaacagttcgtcataggcggaacgggtacgagtctgctaaccgacacgacgggtcccgagatgcgtatctatctcaattcaccggcattcgtggacggcgacaagacctatcccacaccgcgtttctttgcagaactgaaagacgaacacggtatcaacacagccggtgcaggtatcggacatgacctgatgctgattgtcgatgacgacccgaagatgatctactcgctcaacgagtatttcacggctgcagataacagttatcaggagggacaggtcagttacctgatggaagccctgccggacggagcgcactatctgacgttccgtgcatgggacttgctcaacaacagcacgacgcagaaattgaattttattgtagaagccggtctggatccgagtatctgttccgttacgacctatccgaacccgattccgcagtccggtttgttgcggatgatcgtgcattacgaccaaccggatgagttattgcagaccgagatctatctgcataacatgaacggacagatgatatatagccacacgcaggataacccggacgatgtaagcatcaatctgcaagagatcggtttacaacccggcatctatatgtatgtagtcaaaatcaaatccgcctccagtcgatacagcacgacggcgggaaagattattgttacacaataagtggaaagtttaaagttgaaagttgaaagagcctatgaagcaaatcgctaaataaagtggaaagtttaatttgaaagtttaaagaataacataaaacaaaaataacacaatgaagaagattcttatttctctaacagctcttgtatgcgccgtgacgatgagcgcgcaagagattcaaccgaatcctgtgatcacagcgatgccgtcgttgtctatcgctccggacgcacgtgcagccggtatgggtgatgtgggtgttgccacggaagcggactttaactcgcagtactggaaccctgccaagtacgcctatatgtacacgaagggcggtatcgttgccaactacacgccttggttgcgtaaattggtaggtgacatcgacttggcttaccttgccggtttctataacttcggttatctgggcggtggtatcggtgccagtttcacctatttctcgatgggtgatgtggcgttgaccagcatggacggaacggtgctgcagaatgtgcgtccgaacgaatgggcgttggatgtcagctatttccgtcagttacatgactacgtatcgatgtctgttgccttgcgtttcctgtactcggatttgaacaacggttataacagttccactaccggtggttcagagatgcacccggcatggtcgatggcagccgacatcggtttgtactatcgtcaaccgattgagcttccgatgggaacaagtcagttctccttgggtttcactttgaagaacttaggcggtaaaatgaactacgccgatgacggaagcagtaacttcatccctgccagcatgaatatcggtgtgggttacgaattgccgatcaatgagtataacttcttgaccttcaacgtagaagccaataagatgttggttccgacgcgtcagtcctgtttcaccgaaggattcgatccggataacgagacgacttggttgatgagccagaccgcttattcggaactgaacccggcgaagggttggttccaatcgtttggagatgcaccacgcggtgccaaagaggagtttgacgaggtgcgttggggcgcaggtatcgagtattcgtaccgcaagcagttcttcgctcgtatgggttacagctatgagaactactacaagggtaaccgtaacgtgcttaccttcggtgccggattccacctgtccatcgtgaccttggatatctcctactgcgttggtttggcagcatctaacccgctcgaccagacgatgcgtttcaccttgggcttcgacctctacggcatcaaggatcttgttaataacaagaaggactaattccatgcgcatagggtttggctacgatgtacatcagttctcccctgaccgcaaattgtggttaggggggattgaagtgccgtatgagcaaggcttattgggtcattcggatgcggatgtggtgatccatgccttatgcgatgcgctcttaggagcagctgccatgcgggacatcggctatcattttccggacaccaaaggcaatgagttcgaagggatcgattcgaagatcctgttgcgccgcgtgatggcgatgttacgggatgccggttatgagttgggtaactgtgacatcactatttgtgcccaagcgccgaaactaaatccgcatatcgacgccatgcaggcctgtctggcggatgtcatgggcgttgaaccgaaccaagtaagtatcaaagctaccaccaccgaacatctggggtttgtggggcgtaaagaaggaatcgcagcctatgccgttgttcttatccattagtctggcgctgcttgccgacatctttcagttaggcggaaatccgcaactcattgagcaagacagcgtctatgagaaagttgccttgacggacagtaccaccctggaggtgtatcggggcgattcgatcttcgtgatttttacggtctgtgcgccgcaatgttcttcgtgcgcgcgcgtatataataaggagtgggaactgattgagaaggtcaccccgtctgtgacatctgtcttccccctcgccactttcgagaacggacatatcgtctggactgacaacgacacatggaactaccaatctaccttataggatacatggcggcaggtaagacgactgccggaaagatgctggcggataaattaggctggcattttgtcgatttggaccatgcgtttgagcagatacacggttattcgccggcagaatatatccgtcgtttcggcattgaagagttccggaagaaagagaaatatgtggtggaagatctggcggatcagattccgtttgagaaaatcatctacgctaccggaggcgggtatccgtgttgggaagataatatggagtgtctcaaggaattaggcacgagtatctatatccgttggaaaccggagcatttggcgaaacgcctgatgctgacggatttgagtgaacggccggttctgcaaggacgcacggaagaagagttattggatttcattgcgcctcaactggaagcacgggaacctttctactctcaggcagaccatattctggacgtcacgatctgtgacgagcagtccgatgagcggattgcggaagatttatttcgattgatacgcgagtgcgtatagtttcagttgcttaagcatcgccgctacgccgttagagcgggtgggactgaggtgttcccgtaaaccgatccggtcaatgaaatacagatcggctttcagtatctcttcgggcgtatgatcattgagcacgtataagaaaagcgccacgattcctttgacgagcaaggcatccgaatcgccgttcagttgcatcctaccctcttggagcgaacaggtgaaccagaccttggactgacagccgtcaatcaggttgcggtcgatacggtcttgctcgggaaaaggatttttctgtaattctttggcataatcgacgatgagttggtatcggtccatccaatcgtcaaaagcctcgaactcttcgattatctcgtcttgtaattcgttgattgtcattattctacgtttttaatttcgccctctgcaaacaaccatttcttgcccggatagagttcgggccagagccggttatgggtcgagataagaaccgtgatacctgcctgacagatggaatatagcaactccatgatctcctgtcccgtttcggcatcgaggtttccggtcggttcgtcagccagtatgatctccggatagttgagtagcgcacgtgcgatgaccacacgttgctgctcaccaccggacaactcatacggtttcttataggccttggtctccataccgacctgcttcaatacttcgtgcacatgggcagtcatcagatgtttgtctttccatcctgtcgcacgcagcacgaaaagcaggttctcctctaccgagcggtcggtaagcagtttgtaatcctggaagatgatccctaaccgacgacggagatacggcagtttgcgccgacggatcgtcgtcatgtcgtagtccagcacgcgggcttcgccggcagcgataggcagcgcaccgtagagcgtcttcatcagactggacttaccgctacccaccttgcccaagagatagatcatctcgccgttggacacggtgaaattgacatcgtgcagcacgatctgatctgcctggtgaatctcaacgttcttgtattcgattagagccatcgttctccttaatcgtccagttcgttaatcttctcttctatctgcgccaattggctcttgagcgcatcgatcttcgattgcatctcagcgactaacttattggctgtcttggacttagcggagaagaagaggatgttgttctctgccgtcttgatctcctgttgcaggcgctcacgcatacgacggaggttatcaccgcctttggcagctaccgctttcatacgctcttcgcgttcgcgttgacgctcctcacgcgctttctgacgctccaggtattctttatgacgttgctcacgctctttgcgacgctcacgcagctccaggaagaactctttcttggcagcgaagaaacggtcgctctctgcccgataggtatcgtatatagactgattgaatttcttgggagcaaaaccgatcttacgccatgcgttctgcagttcctgcactttctgcgtcatctcttcccatatcttcgccgtccacggttcgccgttcacgatgggctcgttgatagctttgagttgatcgacgatggcctgcttggcagccaggttctcctgctccttggcgtgcaactcgtcaaaataagcctgatgcttcttgttgatgatggtggaagcggccttaaagcggttccataactcctcccgcacctcacgtgccaccggacctatctctgcccattcgtcatgcaactgttggagcgcacgacttgcttccacgatattattattctcctgcagtttctctgcggcttcgcaaagcaagagcttgagttccagattcttcttgaaatccaaatcccgcaactcgatgttgatcttcaccaggtcgtagaactgctcttggtattgctggtatgccttgcgcacctcttgggtatgggtaacaggaacgggaccgatggtcttccaagtcgcctgcaactcacgcatgcgttggaggttcgccatcacgccgtctgcactggcaccctctaccatcgatttcatctcatcgaggatagcctgcttgcgcgccaggttgtccgcctgctctttcgcctgcgcagccgctacttcggcacgtttggctttatattgggagagtaactgcttgaactcctcttctacggggtctttctccgtcacttcacccggctctgcttcgctcgccaactcggtcggctcctcattcgagtagaagcgtgttttgaggtgatccacttggtctttgactgccattacatcctgttcaagcaatgctttcagttcatcaataatctcttgtcttgtgttagccatattatatttatttttattcgcaaaacctttgcgggtgcaaaggtacggaaaatttttgaaatacacaaggattttacgataaaaaacgaatttatttgattttttaacggaaagccttgttatttgcacaacagtgcgaacgtaccttcgggggggtccctgcattagtagggaggaccgacggtacaacaaatatttgacatgtgcaaataaatgaagaaaaaaacgatgtttttcacattagagtgccacggtgtacggatcgacgtactgcaccttaccgttctcgctaaaaatgagcggctgattatcacgacgatgttgctcgacaacctttcgatgagttatttttaaaccttggctaatcttagcctctaattcacgttcactcatatttattcaaataattggttccaaatttgaggttctatcaattcgatctcgcttacttgatctgtcttcctcgccacaagttgcacaggtgttttaacgttattatacaccagtacgctatcacaaatcggcatatacaaatgtatcaaattatagatgccgcgtttgaagcgacgacggatatcttcttcgggtatattatgccctccgttagcaacacgctgcgcgacacgagctatcgcttgctcttcgttctccaaaaagaagaagatcaaatgtaccttatacccaagtgtttgtgcgcgacgaacgaggtgtacgtacgaacgtgtggcaagagttgtctcgatagcaaagtccactttctgcggcagtaattcctctatgcgctgcaacatgatacgacccgcctgcagggataccgtatccggagcaaaaggcgataaaccacgagctatctcatctgcgtttacgaagttcgggcaatgcagcacattcgggagtaagttaaacgaggcagtcgtcttacccgctccgttcggacctgcaataatatataaatccggatgccgcatctagtcaccttaacctttgcgggtgcaaaggtacggaaaatttttgacatgtgcaaatttttttacaaaaattcgctctttatctcttgtgatagctgttctgtttaccttcggtccccctatcggtctgctgatgtgcatgcttaccttcggttttttttctaaaaaataggctccactcttgcatatgtgagaaaaaaagtgtaattttgcgcacattttgtgtgcaaacgcaaaacacggggtattagctcatcgaattttcctttcgagtccgctatactccacttaaaagcgaaaatatggaaaaactatgataaaacacattctcggattagatttaggagtaggttcaataggttgggctttgattgagacggaaaacgaccaaccgaaacaaatcatcggcattggtagccgtattgttcccctttccaaagatgatagtgaccaatttagtaagggacaggcgataagcaagaatgcagatcgcacgactcgtcgtactacgcgcaaaggatacgatcgttatcagttacgccgtgcattattgacgcaagtgttgcggcagaacggaatgttaccagaacgaatgaatgagaatgtgatagatttgtggaaactacgtagtgatgctgcaatggacggacaccaactgacattaccgcagataggtcgcgtgctttatcatatcaatcagaaacgcggatacaaacatgccaaggctgacaataatggtgatagcaagcagacgaagtatgtagaggcggtaaatcaacggtacaaagagattcaagaagccaagcaaactataggtcagcatttctatatggaattactgcgcagcaaagtagaaagcggagatggaccatattatacctaccgtatcaaagacaaggtttttcctcgtgcagcatatatcgcggaatttgaccagattatgaaggtgcagaaagcctattacccagaagtgcttaccgatgagttgattgatacgctacgtaaccgcattatcttctaccaacgtccgttgaagtcgtgcaaacacttagttagtttgtgtgagtttgagatgaaaccgtacaagaccaaagacggtaaaatcgtctatggtggtccaaaatgtgcgccgaggacatcgcctttagcgcaactatgtgcgatgtgggagacggcaaataacatcacgctgaccaaccgtaacaacgggcagtatgatttctctttggaggaacgaagacagatagtagagcacctctgcacacacgaggtactcaagctaactgacctatataagattctgggcatcaccaagaaagacggttggtatggaggcaaggcaatcggcaaaggcatcaaaggcaacgcgaccttgaaccaattgcgcaaagctatgaatggcaagtatagcgagtggttggaaatgccaattgagcgcatagatgctgtcgataatgagaccacagaagtattttggcaggttagtccggaaatagagcaaacgcccctatttaaactctggcacgctgtctattccattcaagacgcagacgaattagccaagacgctacgaaataagttcggcatagatgaccaggatgttattgacgccctttgcaaaattgatttcgttaagcctggctatgccaataagtcgcataagtttatccgccggttgttgccatatttgatggacggaatgatgtatagcgaggcttgcgctcgtattggcatcaaacattccaattcgatgactgccgcagagcgcgacgcacgccaattgaaggagcatattgaactgctacaaaagaacgccctgcgtcaaccggttattgagaagatcctaaatcagatgattaatctggtgaatcgtctgcaacaagaatatggaccgattgatgaagcaagggttgagttggcacgcgaactcaagcaaagccgcgaggagcgtgaaggtgcctatagacgaaataatcagaacgagcgtcttaataaagagatattcgctaaaattgaagagatgggaattcgtccttcgcgttcgcgcatacaaaaatataagatgtgggaggaaagcaaccaccgttgtatgtattgcggcaagacggttagtttggcagaattcctcaatggcgcagatgttgagatagagcatatcattccgcgtagtatcctgtttgatgatagtttcagcaataaagtctgtgcgtgccgtgagtgtaaccacgagaaagggaatttgacggcattggactatttggaaacaaagcctacagcagaacaagaagcctacaaacaacgtgtggatgaggcattcaaagaaggtcgtatcagtaaaaccaagcgcgatcacctcttgtggcataagtccaacattcctaaagatttcattgatcgccaattgcgtcaaagccaatatatagccgtgaaggcggttgagatcttgcagcaaggtattcgccaagtttggacaagcggtggtagtgtgaccgatttcttgcgtcatcaatggggctacgacgagattttacacacgctcaatttgccgcgatatcgcaaagtggatggtttgaccgagatggttcattacgaacatgcaggtcaggaacatgatgaggagcggattaagaattggtcgaaacgtatcgatcatcgtcaccatgcgatagatgcgttgacggttgcccttacccgccaagcctatatccagcgtttgaattctctaaatgcggaatttacgcgtgaagagatgttaaaagaggtagaagcagcgaatacggtatataatgagaagaagtcactcttggagaaatgggtaaatgagcaaccgcatttctctgtggaggatgttacgcatagcgtagatagtatcctcgtttccttccgtgctggcaaacgtgtgacaacacctgcacgccgcgcaatatatcaaggagggaaacgtactattgtgcaaaggaatattcaagtaccgcgtggggcgttaacaaatgaattcgtgtatacaaagaatggcaacaaatatgcacgtaagtatccaatcgatgcaatctcaaatccagaaaacatagtagatcctacaattcgccaattgataaaagcaagattagcagcctttaatggaaatgcgaaagaggcttttaaggaacctctatattctgcagaaggaatggagattagaactattagatgctacaacaataaattagcagataaaggtgtagttgctgttaaatacaatgaacgtcaaaagcctattggtttttccgaaacagatagtaatcatcatattgcaatttaccgagataaaagtggcaaatatcaggaaatggtagttagtttttgggatgctgtagaacgcaagaaatttggagtaccggtagttatttctaatcctcatgatgtctgggatagcatcatggacaaagaccttccgcaagagtttttagtaaagcttccaaaggacgattggacatatatactctccatgcaagaaaacgaaatgtttgtgcttggtatggaagaagatgaatttaatgacgcaattgaagcgaaagacaatgcggtattaaataaacacttgtacagaatacaaaatattagttctctgttttataacttccgttatcatacagaaacgaaagtggatgataaatatgcaggtattgagaatggccgtaacgcgagtatgtcgcttggcgcattagtgccaattcgaagttttggaagtttatttgccctgttccctcataaagtaaaaattgatattatggggcgtatcactaaagcatgaataacgagcatcaacattctatgtctgttgccccgaatgccattcgggataatgaacatagagaaacgggaaatagccaacaatggcattggcaggaaccgggcaaggcatggaaaggagtaggcatctaccatgtgacgctatcggtaacctcccgtcagcccttgttgggaacgcttgttattcccaataacgatcctatgcaggcatgggtagagcgttcggaattaggagaggctgtggtggactgcctatggacagtgccggagtatcacccggaggtacgtatcattagttttgacttgatgcccaaccatttgcatactatatggcatgtgactcgtcctatgcctatcggtattaaatcagtagcgcgcggattttggcaggcagtaaaacagattggacgtgaatactctatgtcaattgccccgaatgccattcgggataatcaacatagacccgatccgatattcacagagatgccgtttatacggccattgtcccgaaaggggcaattaaatacgatgatccattatacatggctcaacccccagcgcctcgctacaatgcgtctcttgccaaggaccttttgcgtgcaggacaatattgagatagaagggcgagtgtaccgcggagtgggggatgcagacctattacaaagagccagatatatgccggtacatgtgcggcggacaatgatagaggaagcggaacacggcgatgataagcgcctacgcgaatatatgaataattgtgtgctagctgccagacagggcactgtaatggtttcgccgttcatttctccaaaggagaaagaggtgatggatgaattattaaaagagggactgccttttatctatatcgccgataatggatttcgggattattataaaccgcaagacagcctgtttgaagcggtcgcaagaaaacaggtgctcattttaagcccttgggaatatgatccgcataaaaaacatgtgagccgtgcagaatgtatagaaatgaataaaatggcagaagagatatcaggaatataaagaaaaacataacataaagtctaaaacaatacgttctctttcataaacattcgatttgaggttgtgtatgtcattcaaaaaaagtaaaacataaggtctaaaacaatgctacgcggcttttgcacccgctcaacagtgttgtgtatgtcattcaaaaaaagtaaaacataaggtctaaaacaatagttaaaatagcaatgttatgttaagactgttgtgtatgtcattcaaaaaaagtaaaacataaggtctaaaacaatgcgccggctctcgccgtactgctcaaagaagttgtgtatgtcattcaaaaaaagtaaaacataaggtctaaaacaatgtatattaaatgtacctacatggaattattgttgtgtatgtcattcaaaaaaagtaaaacataaggtctaaaacaatgcttgcgttctcgcggtcgttgaagttgaagttgtgtatgtcattcaaaaaaagtaaaacataaggtctaaaacaattatcggctgctgctgaccattgaggtcgatgttgtgtatgtcattcaaaaaaagtaaaacataaggtctaaaacaatgtgttagctgccagacgcacgtcctcgatgttgtgtatgtcattcaaaaaaagtaaaacataaggtctaaaacaatagaccatgggtaactaacaaagacacaacaagttaaaccatgttttagaactagaaaaagcagcactttttagtactgctttttcgctttatatatcactttttgttttctaaaataattccaactgttgcactggttgatcgacttgtatctctttacaacactcgaaaatctgaatatccccgaattgcttatctgttatccgtagtatcccgatctttccaaacggtggcatccactttttcacgcgcgcaatatgtacatcagcattctcagcacttgggcaatgccttagataaatactgaactgaaacattgtaaagccatccatcaagagtttcttacggaatagtgcatactccttcctgtctttctttgtatcagtaggaaggtcaaacaaaaccagtacccacataattctatattcgctaaatcgggtcatccggctgcaaaattacgaaaaatgccacaattatgcaagaaaatttcaaaaatatttgcatatattacaaaaaagtagtacttttgcacaacttttttgaatgacatacacaataaggattattccgttgtgaaaacattcagggtgggacgcaagtctcgcccttttttgtttcgagatcatttttgagatggttagaacgtacctgctttcactttccgacagagattttctcgcacttacgtgtaatcaaacccaagaaatttccagatctaacaaatttcatcccaaatatttgcatatataataaaaaagcagtatctttgcactatcaattagctatcaggaccgacagtgagccgacggtcaaccgacggtcagccgacagtcaatagtaacgtcaggcatctgtcagactaaaaataaacccatttttgtgtaacatttactatattatatatttatatataatatacaattaaaccctcatttttatgtcaaaaatagaaacagcatccgcgatcaataagattcacggcaaaacaaatggcaaggactcaggctacttttacatgcgtaacggcaagcaattttaccgcactcgcgaagaaacctatcagaaaaatcgtccaattcgggcgatttttctgattttatttgcatatatgcaaaaaaaattgtacctttgcagccgattttaaattggcaaaatataggcttatgattacgatagaacaattgaaggatgtgcagcaacgtgcggataagttgaaggcgtacctgcagatcgatgagaaacggatccagttggaggaggaagaactgcatacgcaggcacccggtttctgggacgacgccaaggcagccgaagcccagatgcgtaaggtgaagggtatcaaacgttggatcgaagggtacgaaggagtgcgtgctgccgtggaggagttgacgcttagttttgagtattacaaagaggaactcgtgaccgaagaagaggtcgatgctgcatatgcaaaggcgctcaacgaggtcgaggatctggagatgaagaacatgctttcgcacgaagaagaccagatgccggctgtcctgaagatcgtttccggcgcaggcggtacggaggcacaagactgggcggagcaattgatgcgtatgtacatgcggtactgcgagaaacatgactataaggtgaccatcgagaacctgcaggaaggcgacgaagccggtatcaagaccgtgaccttcaatatcgaaggcgatctggcgtacggctatctgaagagcgagaacggagtgcatcgtctcgttcgcgtcagtccgtacaacgcgcagggtaagcgaatgacgagtttcgcgtccgtgttcgtagtgcccctcatcgatgatacgatcgaagtggaagtgaaccccgccaacctcagttgggataccttccgttcttcgggcgcaggcggtcagaacgtgaataaggtcgagtccggtgtacgtttgcattataagttcgtgaaccccttaacgggtcaacccgacgagatcgtcatcgagaacaccgagacccgtgaccagccgaagaaccgagagaatgccttacggcatttgcggagtcagctctacgagttggaattggagaaacgccgtcaggcgcaagcgaaggtggaagccggcaagaagaagatcgaatggggaagtcagatacgttcgtacgtcttcgatgaccgccgtgtcaaggaccaccgaaccaattatcagacgagtaacgtcaatgccgtcatggatggcgacatcgacgcgtttattaaagcttatttaatggaatttcctgattaaagttgagagttgaaagttcttatctcctttggagaacgatctaaaggtatggagagttgagagaagtcttctagttgaaagttaaaagttgaaagaaatatgatgttactttcttttatagcagcattgatgctggatagtacggcggtggataccgccaaagtggatgagggttttcaatttaccaccatcgatagtgtggcgattacgccggtgaaggaccagaaccgcagttcgacctgttgggcattctcgacactcggattcctggagtccgaggtactgcgtaccaaaggcaaagaggtcgatttctcggagatgttcgtgatcagcaagaccatgatggaccgtgctacgtactgtgtacgtctctataacgaaccgcattttgcgcccggtgggtctgcctatgacgtgatctactgcatgagtcattacggactggtgccgcaggaagcaatgcccggtatccggtacggttggaccaagaacgacaccctacccgttcatagcgaactggatcgcgtagcaggcgggtatctcaaaggactgtcgggtttgaagaaactgagtcccgtttggcgcgaaggtctgcaggctatctacgacacctatctgggcaagtgtccggaggagtttgaatacgaaggtaagaaatacaccccgaaatcgtttgtaaaggaattgggtttgaacgaagacgattatgtctctttcacctcctatacccaccatcctttctatgagcgctttgcgttggaggttcccgacaactggcgtatggaccagatgtacaacgtgccgatggaagaccttatgcggatcatcgacaacgccatcgagaagggttacaccatggcttggggcgcggacgtgagcgaactcggtttcacccgaaagggtatcggcgttgtgccggacgaagacaacggagccgaccttaccggtagcgatatgaataaatgggttggaatgactaacgacgagaagaagaccaaattgacggagaaacccctgccggagaagacgatcacccaacagatgcgacaagatgcgttcgacaactgggagacgaccgatgaccacggcatgcagatcttcggtaccgccaaggaccaaaacggcaaacgctattacatggtcaaaaactcctggggcaccgtgcgctccaactacaacggcatctggtacgtgagcgaagcgttcatgcaatacaagaccaacgatatcttagtgcataaaaacgcagtacctaaagacctgcgtaaaaaattgaaaattgataattgataattgacaattgacattttgaccgcagaaggcatctataaggatcggggcagtaagttcttggcgttcgcggaacccatccaagacgaagaacaagcaaaagcccgtgtggcgtggtataagaagaaataccacgatgcgcggcatgtgtgttatgcgtatcggttgggccccaacttatggcgtaccaaggatgacggcgaaccgcacggtactgccggtgcaccgatcttacgctctatcgacgcacggggattggataatatattggtggtcgtggttcgctatttcggcggaacgttattaggcaccggaggacttatggtcgcatatcgggaagcgtctaaagctgcgctggaaaagtttgaagttgtttgaaatggtttgaagttgtttgaaatggtttgaagttgtttgaaatggtttgaagttgtttgaaatggcaaataattttaaggacatacgggcatatcgggtgagttggatcttatggttcaccgacttgtttacggtgtttccgctcttgcagatctggtcatggcggacaaccaagggcattcggttggactatttaggtgaccgcaaacggatcgagcacgatatccggcacggcgctttcttcatgaccaaccaccgcgatatcatcatggatgcggcgtggctgtcctacctgctgagtatccggtatcacattcgtccgtatatgggtgtaggcaataacctgtttgccaagaaatggattgaggtcgtgatgcggttcctgcgttgttttgtggtcaaacggaacggcggcgcgcatgcgcagttggagaacgccaagcaactgagtgcctatatccgttatctacgcgaacatggtaagtccatctggttggcacaacgggaaggtcgagcaaaagacagtaacgacctgacgcaggcgagtgtgctgcatatgttgacaatggatgaagggatgaacggattaaaggatgaacgggatctttttgagaacgtgaagtcgctgaatatctgtccggtaagtatcacttatgagttcgacccatgcgactatctgaaagcggctgagatgcaactcaaacgcgatgaccccaaatggcggaagtccaaaaaagatgacgtgctctccatgcatacgggcatccggggacagaaaggacatgtcgtttatcgtctgacacccagtatcaatccggagatcgatgctttgttaacggctcatccggaactgcgagaagccaacacgcacgaccaactgcagagcgtatgcgacatcatcgaccgccatattcatcagggctatgagatcttcgaacgtggcacggattttgatgcgtatatagaaggacaactcaagaaaatcaatatccccaataaggacgaacaattcttaagagaaaaactatacgaaatgtatagcaatccggtgaagaatcaccagattgcagttgaaagttcttagccctaaagggcacgattatttgacaagtcaaattttgaaagtttaaagtttagagaaatgaaaagagcaatatttccgggatcgtttgatccctttacggtaggccattatgacatcgtcaaacgtggtctggagttattcgatgagatcatcatcggtatcggtagaaacagtacgaaacgagagaccttccctattcgtgaacgggaggaagcgatccgtaagatttttgcggacgaaccccgtgtacgcgtagcgatctatgactgcttgaccgttgattttgccaaagagcaagaggcacagttcatcttgcgcggcatgcgttgtatcggtgacttcgagtacgagcgtaacatggcggaagccaataagcagataggcggtatcgagaccgtcatcttatatactcgtcccgaatacgcccatatttcatccaccttagtacgtgatttgtatgcatatggaaaaaacgttagcgactttgttcctaatacattaaggtaaaaagtgaaaaatgaaaggaaaaaggattcatagaaaattagtaggacttgtcgtcctttcaattttcaattttcaattttcaatttgttcagcgcaagaacggcaggcgacgagcagagcagacgaatgcatcgctatcttcaacgatgtgttgcgccaagtggatgtcaactacgtggacacgcttaactatgagaagttgaccgagtccgccatcaacgccatgctgcgggagattgacccctacaccgtctattatcccaagaagaaagatgacgacctgcgtatgctgaccaccggcaaatacggcggtatcggttccatcatccaacaacggccgttggtcaaagcgaaaggaagaaagtcgaaagttcataaagactcgttggctacctatgccgtgaacccgtacgaaggcaaacctgcccaacgtgccggtatcttggcgggtgaccgaatcctgtctgtggacggcaagagcacgatggggctgacggtaagcgaggtaagtaacaacctgcgtggtgaacccggtacgaccgttgtcttggagatcgaacgggaaggcgtagagaaaccattcaaggtctctatcgtacgcgaagacatccatctggaacccgttacgtactatgcgactttcagcgcagacagtctgtctcaacccgtcggttacatcgcactcagcgagtttacagaaggttcggcattagccttcacgaatgcgctggatgacttatattataaccaaggagcccgcaaactgattatcgacctgcgcggtaacggaggcggtatcgtagatgaagcgatacagatcgtcaacctctttgtcgatcgtgaccagaagatcgtggagacgaagggtaagaccagtcgcagcaattatgtctatacgacgcgtaacacgccgcgttacaaagacctgccgctcgtcgtgctggtagataagcattctgcgtccgccagtgagatcgttgccggttcgttgcaagacttgaatcgggctaccctcatcggtcaacgtaccttcggaaaaggcttggtacagaacgtgcgctctgtcgtcttaggcggacatatcaaagtgaccaccagtaagtactacctaccctccggacgctgcatccaagcgatcgattatagcgaacggcagaaaggacatgaactcaaacgcgataccgcaggcggtatcttacccgatatcgtactgagcgattccggtaaagtggatatctgctacacgctctatatggataattatttcttcgattatgccactcgttaccatcgttcgcacgctacgattgatcaacccttgacctacgaagtgagcgatgcggatatcgaggatttctgcgcgtttctggacgaacgggagtttcagtatgagaccgaaacggcgaagtatttcgacgacatgatccgtatggcaaagtcggaagatatcgattcaaccaccttggcacagttagaagccttctctccgcaattaaagcccaacttccgcgaagcgatcgagcgcaataaggacgaagtgaaggaactgttaggttccgaaatcgtactgcggtattattaccagaaaggtcaggcagcgtttagtctgcgcttcgataaagaactgaagagagcgttgcaggagttgaaataaaaaaatagggcctcaaattgaggctctattttttattgtcttttccgtccgaagaggtcgtagtagtcatcgccttttcggatgaacagttgtccgttcacgatgatcttccgggtagccgtgttgacggcatcgcagttatctatcgcttgatcgtcaggaggatcgataggatcaaccggaatggtatcttgtttctcatcgatgagcagatagagggtacgtatcgaatcacacccgaactcggtctcgtagttcgcgacaagtatcgtttcgcctgccggcaattcgcttaagtcatacccttcccactcgatggagtctccttcggtgatacgcatcgcttccgtttccgatacttcgggatgcgccaaggttgtccgatacaggatcgagtccccgccaaagcggttagctctctccctatagatcgtgtcgttcgtcgcctccccgccgcactgatggatcgtgtcgtaaccgtaggttgtcggacgctcttgcaccgtaagattcagcacatagatcgagtcacaaccatggatggaggtgtaggttaccgtaagcgtggtgtcgcctatcggcatctgacttaagtcgatatgttcccactcttgttggtcgccttcatagattgtctgcgaggcggtcagcttcatcttcgggaagacatagaccaccagttctacgatcgagtctccttcgtattggttaggcgtactcagcagcaccgagtcaatggtcgtacgtttataggtatgtccgtcatagaccgccgtctcgccagcgcagaggtagatcgtgtcgtttccgtaggtggtaggacgcggcaggatcgttaactgcaaggtatagacggagtcacaaccgaagattgtatgataccttgcaaccatcgtcgtgtccccttccgtcaggatactcagatcatgcgcttgccaggtctgctcatcgcctacgcgcatcgtcagactctcttcgtatgcaaacaccggattcacggtcagcgtaaaggagatgacagagtctcctccggctacattctgaatcgtatcgacatacgtaccggcttgcgtcacctcaccgaaacgctcatcgggataggtatcgccatcgcagatcgcagcgctgtaggca

SEQ ID NO: 900 - DNA, 23468 bp, synthetic construct
  misc_feature 1..23468: note = Synthetic
  source 1..23468: mol_type = other DNA
ttacgcatgtccacgatacccttctggaacagacggccgatgacagccaggtcctgaatgttaatagtgaacacggtctcgccttttgcgagcggagcgaggttgttgagctgtacacctacgttacctgccggatgcggaccggctacttcgtacagcgtacaatccttcaactcacggaactccggcgctttgctacccgccttgaggcctacgaagaccggagccagttggctcagagccgtaatggcagcctgcagggtaggcagttggcctttgagcacccactcgtagttcggcgcaacaggagcgctgtcaaaactcgagatgaaaatggcacgcggggtcttgttcggcagcgcgatgcaatcgtacggacgctgtttgatcagcgcccacagacccgattgaagcaacaatgccttcacgtccttgtccgtgccaaagctctcgtactgaatagtagcgtctgcctcaatgtcgatcgacatcaccttacggcggtcaccacggacaatcgccttgaccgtaccgctgacaggggatgtgaacagcatttcctcaaacgccttgtcgtgaaacagcggagtacccgccttcacgcgctcgccttctttcaccatcaacttcggggtgatgccggcgaagtggtcgggcacgatatgaaagacctccggcctgcgtacgctacccagcgtctcggctgcagctccctcaaaaggaatgtccaaaccacgtttcagtttgattgtttgcataatgttaattaatttattttgattttgtttgtattgcatacaaaatgcgggtgcaaaattacaaaaaaaaaatcacatacgcaagcgcgcacgtaatttttgcaaaaaaatgctcaaaaatttgcgtatatcaaaaaaaagcagtacctttgcagccgattttgaaatttagagcaagtcctatacgaccagctccctctgaactcccccaggccttgaccggagcaagggtaggaggttgtagcggtgcgatgtagtaagcttgctctttttttgtgcctaaaaaaaggcttgagactattcaagcctcaagccggaaagggtatatgtttgcccgtttctaacaatatatatctgcccgttgatgagcaccttacgggtgtcgggagcggattcgttttcggtatttcggatgtccagcatcggattaggcatggtgtaggccagccacgcgttcgggatgccgtagcccagttgattgcccgtgtcgtggttcggatagagatgtgccgaacggatgatacgttcgcgtatctgcatcgcgttctcatccggcagcgcggaccacaacgaagcggccataccggccagcagcggagtcgcaaaactggtgccgttggacgttactatatatccgctcggattaatgagcacggagcgtacgcctacggcgcacacctcgggtttgatgcggccgtcggaggtgggaccgtaactcgagaaattgcccgctgcgctgtccgtggagacggcacctatggtgagcacgctgtcggcatcggcaggagcgctaatggtatgccatgaaccggtgccttcgttgccggctgctacacaaacgagcatacctttgcgggctgccatcgtcgcggcgcggctcacacgggtggacttaccgtccagatccttagttttgttcagtgtccaatcatcgttgtcaaactccgcgtagccaagcgagacggagaacacgttcacgcccagcgaatccgctttctcgagtgctgccacgaggttatccatctccttgggcgactcggggtcgtactcttcggaccgcatcaggtagtacttcgcccgcgtagcggcaccgtaatagccgtcggtgatgcccgagatggtgctcaagcattctgtcccgtgcgtgcccgtgttgctgtagaaatcgtctccgtcatctgtaaaatcgaagtgtcccaactccaaactgtcccggaaacaatcaagcgtattggcattgtagaaagcgccgtcgcaaacggtcatcaggatgccttgtccctcaaaacccgcttcgtgcaagggcttcaggttgtacagcgccaattggtcatccgtatacagattcgtctgttcgctgtgccacaaggcgcgtttacggggcgagtagtacgatgcgctgttatcgcgcgtcatctccacgttcgccacaaaacccaaggctgccacctgatcggccagcgacgaactcatctcacaggttgctccgttgaaccaacggctggtgtgatgcaccgtcacgcccatatgacgcagactgtccagatagagcgcgctcaccggataatcgagttcatcggtcgggatgttccacttggcacgttgctccatggcacgtggcgaaagcgccggcgtggtgttgaccggtttgtctgtgaacgagacaaaatatacgaaaagagagattaacgtaagcatagttgtacgacgttttctacatgttgggtatgcgggaacatatccacgggttgtactttggtaactttgtatttcttatcgagcagcgccagatcacgtgcctgggtggccggattacagctcacatagacaatgcgttttggggcggcattcaagatcacatccaccacatcttcatccattccggcacggggcgggtcggtgatgatgacatccggacggccgtattgagccacgaacgcatcgttcagtactttcttcatgtcccctgcgaagaagagggtgttttcgatgtggttgatcttcgaattcacttttgcgtcctcaatcgcttccggcacgtactcaatgccgatcacctgccgtgcctgccgcgccacaaaattggcaattgttccggtgcccgtatacaagtcatagaccagttcattgccggtcagttcggcaaagttccgtgccactttgtacaattcgtacgcttgttcggtattggtctggtagaacgatttgggaccgaccttgaactgcagcccctccatctcttccatgatatggtcctgaccgaaatacacctgtacgtccaagtccccgatggtgtcgttgaacttggtgttttctacataaagcaacgatatgatctccgggaactgtgtgtgcaggtactccaaaagtcctttggcatcttcccgtaacccgtaacccgtaacctgtaacccctctccgaaacacacgatgagcatcagttcgcctttgtggttgttgcgcaggatcagcgtacgcagcaatccctcgtgcgtgtgttcgttatagaacgtcatgtcgtgggcacgcgcatacgagcgcacggagttacggatgcggttgttaatctccggcatcaggtggcactgctcgatatccagcactttgtcgaacgcattcgggatatgaaagcccagaccgtaggtgctgtccacatggtccaatccgccggccgcttcgatcacttcccaggggaaccatttgcggtccgagcaggtgaactccaacttgttgcggtactcgtagatatgcttagagcccaagatcggactgatctcgggcagctcgatcttaccgatacgggtgaggttgtccacaatctgctgctgcttgtacttgatctgctcttcgtacggcagaatctgccacttgcaaccgccgcacaccccgaagtgtgggcaccgtgcctcacaacgcaccgcactcggctgcaccacgcgcagcactctcgcctccatgaaactgtgtttcttcttcgttatttgcaggtccacaatatcacccggcacacagttcggcacaaacgtgacgatatcgttgatacgcaccaacgctttgccttccgctgccacccccgtgattgttacattttcaatgacaggtagatttttcttcgccatagattcaaaatttctgcaaaagtacaaaaaaattctcatctgtgcaaataaattcttaaatttttgaaaaataggacatgacatgttgtatctggcatgctttttgtgcctgaaaaggtcggaatttgaaaaattgttgaatgatgaatagagtagttaaacatgtaattttgtcatgtgtactgacaggcagtgttgtgtgtgcgtatgccggagacacggtccgttacaccttgtcggattgtcatgagatggccctgtcccgcggcgcgtcctcgcaatcaatggaagaggcgcgtctggcagcggagtacaaccgcaaagcagccttggcagctatgttcccgcgggtaagcgctaacggcggttatatgtggaactcgcgcaatgcgcatctgttggccaacgagacgcagttctcgttcggaacagcatcggtcgcacaggacggaacagcaacgttcgcctggagcgagcagagcaaactgggtgagttggcgaacaccgtggccggcacgccgcttgagcaaccgatcttggacatcgaagccagtgcaggacagaagatagccgatgcgtatcaggagttgtacaacaagatgacgattgacctgacgcatgtcgtggtggcccaagtgggcgtgacgcagccgatctataccggcggacgactcacccaactctaccgcatcgccaaagcgtcggagaacatcgcaaccatcgaagcggatgccaagcacgacgaggtgatctacaaagtagatgaagcctattggcgcgtggtggcggtcggtcagaagaagaaactggcagagcagtactaccgtttgttgtgccaactggagaacgatgtgcgcgaggcggtgaacgaaggggttgccacgcaatccgacctgctcaaagtgaccgccaaacgcggcgaagcggaggtgaagaaactgcaggcggagaacggtctgacgctgtctaacatggcgctggcgcagttatgcggtctgccgctgtccacgtcgttcgtgttggacgagtccggtctgaacgagtgctcgctgcccgtgggtgagatggagatggaagcggctgttgctaaccgaagcgagctgcagttgttgcaggagacggagcacatcgcacaatccaacgccaagctcatggcagccggattacaaccgaacatcgttgctacagcaggctatatgtacaccaatccgaacgcggataacggggtaagcagtaactgggacggcaagggattcttctcggccggagtggtagtgaatgtgccgatcgtacatgccgatgatatcttgcgctacaaagccgccaagcatgcagccaacgcggtcgcgctcaagacagatgagacacgtgagatgctcatgttgcagaccacacaggcgaaccagaaactgatggaggcgcagcagaaaatagccatggcgcgcctcaccgagtccaatgcatcggaagtgctgcgcatggcgcaagagtcctatgaagcgggtatgatcaccgcctccgaactgatgcaggcacagacggcatggctcgccgcggcatccgatctcgtggatgcacagacagaagccaaaacaacggaaacacaattaagcaaatatttagggagactgaaatgaatatgaaacatcaaaaagaaggcagtttgctgttaggtgtagtagcgctgctgacggtagtggtagtagtagctgtagtgggcgtgttggcgctacggccggagaagacattgattcagggagaagccgaagccgctgaataccgcgtttccggcaaagtgcccggacgaatcgagatgtatctgtatgaggaaggcgagcaggtgaagaaaggcgacacgctggtggtcatctattcgccggaagtggaagcaaagaagaaacaggccttggcagctcgtgagatggcggaagccgtcaatcagaaagcgcagaacggtgcgcagcgtgagcagattcagggtgcatacgaactgtatcagaaagccaaagccggtgaggagatctaccgcaagagtttcgagcgcgtgcagcgtctgtatgacaaaggcgtagtgagcgcccagaaacgcgatgagacggaagcccaatacaaagctgctgctgccaccgtcaaagccgcacgcagccagtacgagatggcattggcaggagcacgggccgaagacaaagctgcggctgctgcacaggtgtcccgcgtggacggtatcctcgaagaggtggccgctgccgaagcggagcgttatctgctctcgccctgtgacggagaagtgaacgagcgcttcccgaaagtgggcgaactggtcgggcagggtagtcctgtcatgtccatcgtggacctgaccgatgtgtggttcacctttgccgtgcgcgaagacatgctctccaattttgcgatgggcagcgtcatcaaaatcaatatccctgcactcggcacggcgacctatccggtcacggtgacccatctgcaggccatgggtacgtacgccagctggcgttcgaccaaacagaacggcggctacgacgtgcgcacgtttgatgtcaagtgccgtcctctcgaaaccatccccggccttcgtcccggcatgacggcgttggtcgtagagtaaacgtaccgggtacatttgaaaatgaaaatcatttttcaaaacatatggcgtgtgatggtgcgtgaactgcatatgatgttcgcgcggccgctgtacctgtttgcctcggtgggtgtgatggtgctctccacgctcttcttcctcacgctcatgcgtgccggaagtgcggagaacatgccggttgcggtggttgatctggaccagacaaccatctccagacggctcattcacgagatgcaggcgaccccttccgtcgatatccaattggtgaccaattgctatccggaagcccgcgaagccatgcaaaagggacagatatacggtatcttcgttatacgcgaaggcttctatcgggacctggtggcgttcaaacgtccgcagctggatttctatgtcaccaatgcctatacggtcggcggtaacacggcgtataaacagatgctgacgatggtcaatctggtgtccggtgcgttccaacgcgaggtgctgcgaaagaaagggatgaccgacgaggtcatcatgcaccgcatccagccgatcgctatcgaaggacacatggtggccaacccctgggggaactactccgtctatctggtcagcaccgtgctgccgggtatattgggtctgatctgcctgatgctcaccatctttgcgatcggatttgaactcaagtcccgcacttcgcatgcctggcttcgggcggccggaggcaactacaccgtggcgatgatcggcaaactgattccgtacacggtcatgtacctgatcttgggtatctcctgccatttcatgctgtacaactacgccggtttcccggtctatggcagccatgcgcgattgctgttcggcctgctgctgttcatcttcgccatggaagcgctgggcatcaccctgatcggtttgctgccgactttacgtgacgcgttgtcggtggccgcgttgtactccatgctcggattctccctctcgggattcacctatccgcagatgtcgatgctcgcacccgtcaaggccatcacgtacctggagccgctgcgacattattacctcatttatgttaacgaagccctcatggcagcaccggtgcagaacagcctgctgaacatgttggcgctgaccgcgttcatgctcgcttcactctgtgtcgcaccgcgtctgcaccgcgcgttagtgtatcagaattatccgttaaaatagtatgtggcagaattttgttgatgaaataaaacgtattttccgggacccgggcgtggtgctcatttttatcgtcgctacgctgatttatccgttgatatacaagacgatatactggaacgaacagatcacggacgtgccggtagcggtggttgatctgagtaatagttccgagagccgtgcgttcttacataaatggaacgcgacacccgatgtcaaactgtgctaccagtgtacctcgatggcggaagcggagcagctgctgcgcgaccagaaagtgcacggcatcatctatatcccgcgtgatttcgcgagccaactggcagacccctttggcaaagcgcatatatcgttgtactgcgacatgtcgtctttcctctatatgaaggcgatctacctcagttgcaaccaactcatgctcgagtccatgcgtacggtgcagattgaccgctaccagcagatgggtattgacaaagagttcgcctgggcgctggtacaagacgctccgtatacggagacggccctgttcacaccgacgggaggatacggttcgttcctcattcctgccgtgctggtgctgatattgcatcagaccctgttcttcggtatctgtatgttaggcggaacagcccgggaggagaacatcgaccgctacagtttccggtctttgttcgggcgtgcgggagcgtattttgtggtgtactacaccttggcggcgatcgtgttgggtttctatccgcgtctgctcgacatcccgcacattggttcgataggggatatattgttgttcaacgtaccgctcatattgtccatcatcttcttctcgttgtgcgtgagtgtgttcatccgcaaccgtgaatccggcctggtgctgctcatctcttcgtccctgatcttcctgttcatggcaggtatttcctggcccaaagagatgattccggacgcgtggtggtacctcgcttgctgcatcccgtacacctggggcgcgcacggtttcatccacatgaactccatgggcgcatccctcgccatcaccggcaacgagtacatcgccctctggatcctcaccggagtgtacatgctcatcgcctgcgccctcttctacgccaagaaacattacttcacgcgtgaaaccatataacaaatcgtccttgtgtgcggtgtagcatttggcggcatctttcattttgcatttttgtcgcatatttgcggcaactagttgtgtcaaaaatcataaatctgcatcaaaagtgcagatttttttgtgtatgtcaaaatttttttgtacctttgcagtcgcaaaggtttttactatggaagacaatttcgctatacaacttttcgaaggaaagaaagtccgcatcgtctgggatgaggagcaagaaaagtactattttgcagttgcagatatagtacaagtgttaacggatagtgctgatgtaaagcagtacattaagaaattgcgcgcacgcgattctgaattagattccgtgtggggtacaatttgtaccccccatcaatttgtatcaacagatgctaaaaagcatgctgtcaattgtgctgatttacaaggaattttccgcattattcaatccattccttccaagaaagcagagcctgtaaagcagtggttggcacagttaggagagcagcgaatcgaccagatgatcgatccggaactgacgttccagatggcggtagaggactatcgtcgtcagggctattcggacaaatggatcaacgaacgaatgcgctcgatagagatgcgcaaagaattgacggacgaatggcaacgcgcgggtatcacggaacataaggactttgcaattttaacaaatgtgcttaccaaggcttggagcggaatgacaacaggagaatacaagaagcacaagggtttaacgaaagagaacttgcgcgacaacatgacgaatgttgaattggcgttgaacaccttagcggaagtaactgctacggaaatctctcgtcaacgcaatccaaagggcatggcccagagcgcccaaacagccaaagaaggaggcgaggtcgctcggagcgcacgtgctgatattgaaagccgtttaggtcgctcggtcatctcttctgaacgtgcttctgactatcttcgccctatcgaagaaacaaaggccggagaattgccgtttggagatactgataaatccgaataatccaaaatcacggcaactagttgtgtcaaaaatcgtaatctgcatcaaaagtgcagattttttttgtatatgtcaaaaaaaagcagtaactttgcaccgcaaaattgatagaaaactatgaataaacacattctcggattagatttaggtgtaggctcaattggttgggccttgatagaaacagaagatgatcagccgaaacaaattattggcatgggtagccgtatagtgccgatttccaaagacgatagtgaccaattcagcaaaggacaggcgataagcaagaatgctgatcgcacagctcgtcgtactacgcgcaaagggtacgatcgctatcagttaagacgtgcattattaacgcaggtgctccgccaaaatggcatgcttccggaacgaatggacgagaatgtaatagacttgtggaaattgcgtagtgatgctgcaacggacggacaccaactgacattaccgcagataggtcgtgtgctttatcacatcaatcaaaaacgtggatacaaacatgccaaggctgacgataatggtgatagtaagcagaccaaatatgtagaggcagtcaaccaacgctacacggaaatccaagaagccaagcagactataggacagcatttctatcaggaattactgcgcagcaaggtggaaagcggtaatggtccatattatacgttccgcatcaaggacaaggttttcccgcgtgcagcctatattgcggagtttgaccagataatgaaagttcagcgcgcgtattaccccgaagtgctaaccgacgaattgatagacacgcttcgtaataggattatattctatcagcgtccattgaagtcgtgcaaacacttggtaagtttgtgcgagtttgagatgaaaccgtacaagaccaaagatggcaaaatcgtttatggaggtcccaaatgtgcgccgcgtacatcgcctcttgcgcaactctgcgcgatgtgggagacggttaacaatatcacgctgactaaccgcaataatgagcggtatgagttctctttggatgaacgaagacaattggtagaacacctctgtacacacgaagtgcttaaactaaccgacctctataagatactcggcatcaccaagaaagacggttggtatggtggcaaggctattggcaaaggcatcaaaggcaacgcaacgctaaaccagttgcgtaaagccttaaatggcaagtacagcgaatggttagagatgccgattgagcgcattgatgccgtagatgatgagaccgcagaagtgttctggcaggttagtccgaaagtagaagagactccgttgttcaaattgtggcacgcggtttattctatacaagacgcagacgaattagccaagacgcttcgcaataaattcggcattgacgaccaagaagttattgatgcgttgtgcaaaatagatttcgtcaagcctggatatgccaataaatcgcataagttcattcgtcgtctgcttccatacttaatggaaggaatgatgtatagcgaggcttgtgcgaggatcggtatcaaccattccaattcaatgactgcagttgagcgagatgcacgtcagttgagcgatcatattgaactgctgcaaaagaacgctttgcgtcaaccggttattgagaagattttgaaccagatgatcaatcttgtgaatcgtctgcaacaggagtacggaccgattgatgaggcgagggtagagttggcacgcgagctcaagcaaagccgtgaggaacgtgaaggcgcgtacaaacgcaacaatcagaacgaacgtctcaacaaagagattatagccaaaatagaagagatgggcattcgtccttcacgctcacgcatacaaaaatataagatgtgggaggaaagcaaccaccgttgtatgtactgcggcaagacggttagtttggcagagttccttaatggcgcagatgtagagatagagcatatcattccgcgtagtattttgtttgatgatagtttcagcaacaaagtgtgcgcatgtcgagaatgtaaccatgagaaaggaaacatgacagcgttggactatctggaaacaaaatcggctgcggaagtagaagcctacaagcagcgtgtggatgaggcgttcaaagaagggcggatcagtaaaaccaaacgtgaccacctcttgtggcatcgttcagacatacctacagatttcattgatcgccaattacgtcaaagccaatatatcgctgttaaggctgtagaaatcttgcaacaaggaatccgtcaagtatggacgagtggtggtagtgtgaccgatttcttacgccatctatggggatacgatgagattttgcacacgctcaatttaccgcgttaccgtcaagtggaagatatgacagaaattgttcattatgagcatgccggccaagaacatgatgaggaacgcataaagaattggtcgaaacgtattgaccatcgtcaccatgcaatagacgctttgaccgttgctctcacgcgccaagcctatatccagcgtttgaattctctcaatgcagaatttacacgtgaagagatgttaaaagaggtagaggaagcgaatacggtatataatgagaaaaagtcactcttggagaaatggattctcgaacagccgcacttctcggtggacgatgttactaatagcgtggatagtatcctcgtttccttccgtgcaggaaaacgcgtaacgacaccagctcgccgtgctatctataacggaggtaaaagaactatagtgcagcgaggtctccaagtgccgcgcggggccttgaccgaggaaacaatctacggtaagttaggcgataagtttgttgttaaatatccgcttgaccacccgtctatgaaaccggacaatattgtggatcctactattcgtgctttggttcaaaagcgtgttgctgaacgtgggaaagatgctttcaaagaaccgctatattcagcggaaggcatggagataaagagtgtgcgctgttatacctcgctttccgagaatggtgtagtgccggtgaaacaagacgaacatgggcgcaatatcggttatgcaaagaaaggtaacaatcatcatgtggctatttaccaagataaagatggtcaatatcaagaaatggtagttagtttctgggatgccgtagaacgcaaaaaatacggagttccggtagttataactaatccgcgtgccgtgtgggatagtttgataaataaagatctgccgcaagagttcttggagaaactgcccaaagataattggacgtatatactctctatgcaggaaaacgagatgtttgtgctcggtatggaggaagacgagttcaatgatgcaatagaggcaaaagactatgctgctttgaataaacatttgtatcgagttcagaaaattagtcatgccgattattggttccgctatcatacggaaacaacagtagatgacaaatataatgatgtaaagaatcctcaattgagttttgatatgggaaaagcttttgatattagaagttgtaaaagtttatttgcactattcccacataaagttaaaattgatataatgggtcgtattaccaaagcatgattaagcgtgtactttgttttgggaatcctgcacgcttgagtctcaagttggcgcagatggtggtcgagttgcaagacgtaactcgcaccctacagtccataaacaatttttgtcctcataccccgcgctcgtacagagttgtgaatgtcattcaaaaaaagtaaaacatagtccataaacaaaaagcggtaactggtggacttctacacagtagttgtgtatgtcattcaaaaaaagtaaaacatagtccataaacaagccatgccgaccggcatccgtcgatgagcgtgttgtgtatgtcattcaaaaaaagtaaaatatagtccataaacaatccggatacgttctaccagttcatcgctgaggttgtgtatgtcattcaaaaaaagtaaacatatagtccataaacaatcggtcacttcggtgtagtcctccggctcgggttgtgtatgtcattcaaaaaaaaagtaaacatatagtccagaaacaatagactatttataaattacttaaacacaacaagttaaacattgttttaggattagaaaaagcagcactttcgagtactgcttttttgtttggtagggcactttttgaattctaaatgctgcaaaattacaaaaaatcatgtatttatgcaagaaaaattccaaaatatttgcatatgtcacaaaaaagccgtatctttgcacaacttttttgaatgacatacacaataaggattattccgttgtgaaaacattcagggtggggtacaacctcgccctttttgattgtcatcaggaagaaatgagttggtaacaaattgtaaccaactgaaaacttttttggaggtaggggagaaatttcttcgtcaattactccgacatcgaatgtcggttctttctaaaaaatgcactgagaaaagtgagaattttgagaattctcacttttctcatgcaaatttttgcatgaccaacttgaccaagttgacaaagttcggcttccagttggtcaagttggtcaactttgccatgcgaatttttgtatgttcattccgtcggattgtatccgacatctccattattttgcatttctgctgcatatcgtttggttcaaaactttagttattccttatatattgtttatgtattgcttagtcattcaccttccatttacggtccaatcccgacggtgagccgacggtcaaccgacagtcaaggcttagatgactgcactctcaagccccaaaacagccgatttttgtgcttcatatactatattatatatatttatatataatatacattttgaccactcataaaattgtgtaaatacacaaaaatattgactaaaatcttgcatatgtcaaaaaaatgttgtacctttgtagccgattttgtatttaaatacgtatggcaaacacaagaaaagagattatcgacgagctcaaagcgttgctcgagcaggatgtaacggctatcaaagaccaagtagatcacctcaagacccagttctatacggtgaacgaagagaatgctgagccggtggagagtgaagaatcggaagaagctccggcaaccgatccgatagaggagcagttcaaagaactgctggcgcagtacaaggctaaacgtgcggaggtggcagctgctcaagccaaagagcaggcagagaacctggcacgcaaacaggcgatcttggacgagatgcacaagttggcggagggtgctgatgcagatggtgtgatggctaatctgcagcgtatgcgcgagttgcaggcaacgtggaaaacgattggtccggtgcccgctactcacacgcaggagatacgcaaagcgtatcagcagtaccaggagcagttctacgacctcgtcaagatcaatattgaacttcgtgacttggatttcaagaagaacctggagctcaagacgctgctgtgtgaggctgcagagcgtctgcagagcaacgagaacatcgttgaagcatcgcgtgcgctgcagcagttgcacgacgagtgggcggagataggaccggtggcacgtgagctgcgtgaggacctgtggaaccgtttcaaaacggcttcgaccatcatcaacaagaagcatcaggcgtacttcgatgaactgcacgccaaagagcaggctaatctggatgccaaacgcgcgatcatcgaccagctcaaggccgtcaacgagccgatcgtcaacggtgagccttggaatgccaagaaatgggacgaggccactgccaaagtgcaacaactgcagaacgattggcgcaagatcggttttgctcccaagaaatacaaccaatccatctacgacgagtaccgcgctgagtgcgatcgtttcttccacgccaagaccgagttcttcaaagagatacgtgacactttcacccagaacctcaagcataaacgttcgctgctcgatcaggctaaggccctggtagaggagcagaaagcgaaagcggagaacggtgagatgacgcgcgaactgtgggacgagacaacgcagaagatgcaggcactccaagccgagtggaaaaccgtcggcatggtggcacgtaagtactccgatgacctgtggaaacagttctccgagacctgcgacgcgttcttcaacgccaaacgtgaggcgatgaaagacgagcgcatcaaagcaagaggtgagcgcgcagccaaggctgctagagccgctgctcatcagggtgcagagggcctgagacgtatgcgcgaacggctgcagcaggagatcaaaacggcggagaacaacatcctcttcttcaccggcaagtccaagaacgccaataaactggtggacgacatgcagcgtaagattgatgaactcaagaaacaacttgcggacatcaacgacaaaatcaaccaagaggaagactaatggcacaactgattgaatataagaatgtagcggttcatcaagccgaccagatcgtgttgcacgatgtcaatctgacggtcagttccggcgagatgatctacatgctcggcaaagtaggaagcggtaagtcgtctctgatgaaaacattctacggtgcgctgccgatcgcagaaggtgaagcgcgcgtgctggatttcgacatgacctctatccgccgccgcaaactgccgtacctgcgccgtaggctgggtatcatattccaggactacaaactgctcaccgaccgttcggtggaggacaatctgctgttcgtgctccgcgctacgggctggaaagaccgcaaactgatgcgggaacatgtgcgcgaagtactggagcaggtaggcatggagaccaaggcgtataagaaaccctacgaactgtcgggtggggagcagcagcgtgtcgtgattgcgcgcgctttgctcaattcgccggagatcattctggcagacgaacccaccggtaacctcgacgccgagaccggacaagagatcatcgaactgctgtattcgatcagccaagccggtattaccgtgctcatctcaacgcacaaccgcctctggccggaattgtaccccggcaagaaatgggtgttcgcagacggagctatcaaagaaggagatgcgtaaatgaccatcaacgagatacaagatgagatcatagaggagtttgaggcgtttgacgattggatggagcgctaccaactgatcgtcgagtacgccaacgaactcaagaaacacccgatgcccgaagccgataagaacgaccgcaacaagatagacggatgtcaatcgaccgtgtggttcacggcgaagatggagggcgataagctggtgtacaacggcgattcggacgcgctgctggtcaagggaatcgtggcactgctgctgcacgtgctcagcggacacaccccgcaagagatcgtcaaagccgacctctatttcattgaccgtatcggattacgtgagcacctcagtcccacgcgcagcaacggtgtggcagcaatgcttaaacagatgaaaatctatgcgttagcatataaccactaacctctaacctttcgcctttcgccattatatgcaatttccaatctacttagtaggatacatgggggccggtaagacgactgccggacgtttgttggccgacaaactcggctggcacttcgtcgatctggacgaagcgtttgctcatatccacggatacaccacggcggagtatatccggcagttcggaatagaggatttccgcatcaaggagaaatatgtgctggaggacctggcggaccaggttccgtatgagaacgtgatctatgccacgggtggcggatacccgtgctatgaagataacatggagtgtctgcgtgagttaggcaccagtatttatatccgctggaaaccggagcacctggccaaacggctcagcctgaccgacctcagcgagcgtcctgttctgcagggccgaacggaagaagagctgctggcgttcattgcgccgcaactcgaagcacgcgaaccgttctacgcgaaagcgaaccatgtgctcgatgtcgatctatgcgacgaacaatccgacgagcgcatcgccgaagaactctaccaatttataaaagggtaaacgttagcctttagcctttagcctttcaccttaatattcccaattgtcattgtctgtccagacaacgactcctgttttggggtcgatggtggctaagggaaaaatagaaacaaagggtggggtaagggtgcgcacttctttccactccttattaaacacgcgcgcgcaggaagaacactgcggcgcgcaagccgtcatcacaacgacaatcgaatcgcctttgaacacctccagcgtcacgctgtccggaaggatgatacgcgtgtaaccgttctcctcaatctgcacgtctgcttcccccttcaattggtaggtgttgtagatgatgcgcttggcgacatcatcgtacgcccatgcactgagactcatgctcagaacgaagaataacactatgttacgcaaatctttcatctttcatccttcatctttccttctccaccagcgcaactgcataagcagcgattccttcttcacgtcccacaaaacccagatgttctgtggtcgtggctttgaggctcacttggttcggctctacgcccatcacttgcgccaagcatgcctgcatctgatcaatatgcgggttcagtttcggggcctgcgcacagatggtgatgtcgcagttgcctaactcatagccggcttcacgaagcatcgccatcacacggcgaagcaggatcttggagtcgataccctcgtactcattgcctttcgtgtccgggaaatggtagccgatatcgcgcatagcagccgcaccgagcagggcgtcgcacaacgcatgaatcactacgtcggcatccgagtgtccgagcagtccgcgatcacagggtacctcaattccccctaaccacaatttgcggtcaggggcgaactgatgtacatcatatccaaagcctatgcgcatggaattattacttcttgttgttaaccagatcctggatacctgcgaggtcgaagcccagcgtgaaacgcatggtctgatcgagcgggttcgatgctgcgagacccacacagtacgcaacgtccaagcttacgatagacaggtggaaaccggcaccgaaggtgaggtagttacggttacccttgtagtagttctcgtagctgtaaccggcgcgagcgaagaactgcttgttgtagctgtactcaagacctgcaccccagcgaacctcgttgaactcctctttgataccgcccggggcatcaccgaaggattggaaccaacccttagccgggttgagtgccgagtactcgtcctgcgtgtatttgccggtcgtctggtccggagcgaacttagacatacggctcggaaccaacagtttgttggcctccaggttgaaagtcaggaagttgtacttgtcgcacggcagctcgtagctggcaccgatgttcatgctggccggaatgaagttgctcgtcacttggtcgtaggtcatcttaccaccgaggttcttcaggctgaaacctaacgcaaaatggctctcgcccatcggcagatcaatcggctgacgatagtacagcgcaatatcagcagccatcgtccatgcggcatgcatctccgtaccaccggtagcgctgctgttcacaccgttgttcaggtccgaatagaggaaacgaacggcaacagacatcgacacgtactcgtgtaacttacggaaatagctcacatccagcgcccattcgttcggacgtacgttctggatcgtgttaccttggccatcggtcagcgctacatcacccatcgagaagtaagtgaagctggcaccgataccgccacccaggtcgccgaagttatagaaaccggcgaggtaagccagatcaatgtcgctgaccaacttacgcaaccacggcgtgtagttggctgtgataccgcccttggagtacatatacgcgtacttagccgggttccagtactgcgagttaaaatctgcttccgttgccacaccgatatcacccataccggcagcacgtgcgtccggcgcaatcgagagcgacggcatggaagtaatcagcgggttcatcgtgtcatctaccgtctgtgcactcatcgtagcagcacacagcacagctgtgagagaaataagaatttttttcatttgatattttgttgttttttatttgattttcaactttcaactttaatctttcaactttcaactttactcagcgatatgtttcataggctatttcgttactattattttgcccgacgtcttgctgtatttgctggacgcggatttgattcgtacgttatatacatatactccgggctggagtcccagctgcgccaggttgatagacacctggtccggattgtcttgcgtatggctatagaccatctggccgttgatgttgaacaggtataactcggtctgtatcaattcatccggctggtcgtagttcacaatgaggttcatcactccgcttgcctgcaccgggttcggataggttgtgacggagtagatagacgggtcgaggcctgcttctactacgaagttcagacttcgagtcgtgctgttgttgagcaagtcccatgcacggaaggtcaggctgtgcggaccgtccggcagtgcttccatgaggaaactgacttgtccggattggtaactgttgttggctgcggtgaaatactcgttgagcgagtagatctgcttcggatcgttatccaccaccagcatcaggtcatgtccgatacccgctccggcggtgttgataccgtgctcgtcttgcaactcggcaaagaaccgcggcgtagagtaggtgcggtcgccgtcccggaaagcaggcgtgttcaggtagatggtcatctgcggaccggtcgtgtcggcaatcagaatagagcctgtgccaccaatcgtaaagtcctcaaagtgtcctaccgcttccgccacctccaggctgtcggccgtgacggcataatagacgatgcgtccgttgccgtagttgtaccggatatccttgggcaccatgaacgtgtaattgaacagaccgttcttcacttcggttgctccggagaagatggtgctcgggtagtcgttgtactgcaggtacttggcttcgtccgattggtcgtcgttgtcacgcgtggtgatgacttgcatcttatcgtagatggtgatgtccatcttgccgttgaaatcactcacgagcagactgtcctcgtcgatgatacgtccctctacatgttgtacgctcagcgcattgagcgtgtccactttggtcaaggtctgcacctgatagtcggtcgggtaattgagtcgcatagccgggtcgcccagcagtacgtacgccatcttgttggcatcggagcccaggttgttcttaccggttgcgaccgcttcacccagcgtagcttcgtagtggaacgcatccgtgtgtgcgaacaactgatcgcatacgcggcggttgagttccgtgttgggcgacgcatacaccgtacgcgtagctgccaagattccgatggcaccgccgttcggattgagcaccgccgcctcggctgccgaacgcttgcctccgtcgcattgtgcgaagttacaggtggcgaacagccagaacgcctgatggcgattggtcatgctctctatgtctttgaggttcaatatcgattcgttggtaatggcgttataaccaccgtgaccggagtagtcgaagaacagcgcaccgctcttgagcaggttctgcacacggttcttagccaacggataactctctccactggcgttcacctcttgcggataagcgtccagatagatcttattgaccacaaaatccgggttgctgacgcgcaatcgctcggcactgccttctgccgtctcggtatgtgtgccgtgttcgccgtcgtcggcaaggaacacgatctggttcttccaacgtccggtatattcattacggatatactgaatcagtttgtccacggtgctgcgtgcttccgctacgctggtgaccggcagacggcccacaccgatatccatacgtccttgcgtatccgtctcaccctcgttatcatccaagaaaccgaagtagtcatcggtcgcgtatgcgttcacctcgttctccgagttattggcctggtaggtgagcagcaacgcatcaccggagttgaccagcaacttgcggttgtcaaacgatccgtgtcccatcagcagcaaccagcgcggtttctgaccgataccggcattggcccggtcgtacagcatcttcatcagccagcggtaagcagtcgcatcgggcgtaccggacgagaactcgttgtacacctgctgatccgtcacaaccgcccaggtgattgcctctttggcttcgtgtgcccgtgccaggtcccgtgccacctcttcgtatccttccggacagatgatgatatagtcgatatcactcagcgcgtgcaggttctgatgcgccacctcgcccatcacttcggcggatacgaacgaactgccctccgggtccactactacgtactcatgcacaccgtccgcttgcgagccgacccatgtcaactcaccgttgctgaattgtgtcggcatgccgctgatggcacccaacgaggtgacgtcccacacttgggtagtcgccttggcgttctgcatgtggaaccgaaccggtgtggcactcttgtaattacgattcgtacgaaccggcatccaactgcccgtcatgcgcaactcgctcggcgtggtgagctcaatataattgagccatcccaaggcggcactgctgctgcactgcagcatcaactcaacttgctggctgcctgcagacgaagtactgctgacagagaatgcgccggtgttaccgaaggtataatgatcgggattggcgcgaatatacacactcttcctctcaccctcgttgagtttgccgtagaaataggataccgcaggagcaaaagctgccacggtgatataggccgttgaactccctccggtcagtgctgtcggagtagggaagcggaatgtacgtgtctgattggcattgaactgctcgccgtagaacgtgcggccgccaccggaaacaccggtgcggtcaatgaggttgagcgaatccacattatgcacctgatagtacggataagttgtgatgtccgtcggagtgccgcttacggcagttccggcaacaggtgccaacagcgtgccttggtcgtccgtgaggaaatagtagccgtaattcgaataggtattacgggtgtgcgcaaaacggctgccgtcgtaggtccaactgatcgggccctgcacccagaacaacacatactcgtctcctacgtaaaccggcacctgaggcagatcatctatcttaggttgtttgaagttctgcgtcaactgtgcgccgccgtagccatacacacggagctgctgcggattgataccggcactgcgtaactcgctgaaactcatacggcacacacccgactcgctcacgcgtatcttaatccaatgcccgtcactgagcaccgattggttggtgtacga

SEQ ID NO: 901 - DNA, 23465 bp, synthetic construct
  source 1..23465: mol_type = other DNA
  variation 18110..18137: note = n is a, c, g, or t
  misc_feature 1..23465: note = Synthetic
caaaagcatgattgccaagcgtatcccgtctatcctgcctccgctgacgctcgaagaggctctggagacaaccaagatccactcgatagccggtctgacgaacaagaagaaaggtgcgagcggttcgctgattgtgcagcgtccgttccgcagtccgcatcacaccatcaccgatgttgccctggtgggcggcggccagaaccctcatccgggtgagattagtctggcgcataacggcgtgctctttctggacgagctgccggaatacaaacgttcggccctggaggtgatgcgccagccgttggaagaccggcatatcaccgtagcgcgcaccaaagagacggtcgattatccggcgtcgttcatgttggtggcggcgatgaacccttgcccttgcggtcattacggcgagaacaaccctgcgcatccgtgtacctgtacgccggcgcaagtacaccgttatatgagcaagatcagcggtccgctgctcgaccggatagatatccaatgcgagattgaggcggtgccttacgagcagttgcgcgacacgcagcccggtgagtcttctgcggtgatgagggagcgggtgctgaaggcgcgagagatccagaacgagcggttcaaacacagcaaactggtgcactgcaacgccatgatgaacgccaagatggttcgggagtattgcgcgctggatgccgaatgtgacaagttgctggagttctcgatgaacaggttagggctctccgcacgcgcatatgaccgtatattgaaggtcgcgcgcacgatagcggatatagaaggagcggaggacattcagaagaagcacctgttagaggctatttcttaccggtcgctggacagaagcagttattcggggtagccggagtatagcgcaaaggctccgaaaacaatcaaatatgcgggcataacgaatttttatcttcaaatgcttgcgtatttgattttttttttgtaactttgcgccaaaattggcgcgaagcctgaataaccttgaaagcgagtaaactggatatataggatgaatcttgctgaattaaccgacaagatctacgcggagggcgtagagaaaggcaatgccgaagcacaacaaatcgttgagaaagcgaatgctaaggcggcagacatcgtagcagaggccgagaagaaagccgctgctgttatcgcagaggcggagggcaaggctgctgatctggacaagaagacccgtgcggagctcaaattgtatgccgagcagagtgtgaatgcggtgaagacggagatcgtcaatctgctttcggatcagattgccgcagatagcgtcaaggctgctacggcggatgccaagttcatgcaagggctgattaccaaactggcagagcagatggcgaaagacggcgaggtactcattgagaccaaagacgccgaggctctgaagaaatatttcaccgccaatgccaaagggttgttggaaaaaggcgtgaagatcagcgaagtgaagggaatcaagacagattttaccatccagccggccaagggcggttacaaactcgctttcggtgatgccgagttcatcgcttatttcaaggaaatgcttcgtccgcaactggttgagatgctcttttgagcatcgtagtttgatgtagtttcacgtagtttacgaaaattacgtagattacgaaaattaccaaaacaacgtttacaatatgacttacgaatatttattagcgggattgccggaactgaaggccggttcggattctccgattagcctggagaagctggacgagttgctggacgagcagctctccggagccgacaagcagctgctggacctgctacgcgtgcctattgacgaggttacgttagagcagggtttgaaggcgaagaaccggtttgtaagggagtggttcgccttcaaccgcgacatgaacaacgtgctcgtggcacagatatgccgcaagcacggattcgatgtaaagcaacaggtgataggcgaagatgaagtggcggagcagttacgcacccattcgaaccagaaagatttcggtctgaacgaactgccgggtgactaccaggcaattctggcattagcgcagatagaggatctgatggctcgcgagaaagggatggacgctatccgtttcgagtggctgcatgacaggacagagtttgacttcttctcgccggagatggtctttgcctattatctggagagcgtgatgcttcatcgttggagcctgctgaccgtggaggaaggcgagaaagtcttccgcggcatggtagccgatatgaagaaaggcgtcaagctggacgcgtagattacgtagttcacgtagtttacgaccaatacggaaacaacgaaaacaacgaaaaatacagaaattttagatatgacaacaggaaaagtaaaaggcatcatcgccaacctcgtgaccgtggctgtcgatgggcctgtagcacaaaacgagatttgctacatctacgttggagagaccaaactgatggccgaggtgatcaaggtcatcggcgccaacgtgtatgcgcaggtttttgagtccacgcgtggtctcaaagtgggcaacaaagtggagtttaccggccacatgctcgaagtgaccctcggccccggtctgctgagccgtaactatgacggtctgcagaatgacctggacaaactgacgggtgtgttcctcaagcgcggtgagtacaacttcccgctggacgaggagaagaaatgggacttcaagcctatagcccaagtgggcgacaaggtagaagccgctgcatggctgggtgaggtggacgagaaccaccaaccgcacaagatcatggtgccatttgtgttcgagggtacttatacggtcaaggcgatcaaaggcgcaggccagtacaccatcaacgaggtgattgccgtactgacggacgcggagggacaagaccatcccgtcacgatggtgcagaaatggccggtgaagaaagctatccttgcttaccgcgagaaaccgcggcccttcaaactgttagagaccggtgtccgtaccattgatacggctaacccgctttgcgaaggaggtacaggtttcatccccggtccgttcggtaccggtaagaccgtccttcagcacgctatctccaaacaggcggaagcggagcgaacgaggtcgtagagacctttacggagttccctgaactcgacgacccgcacaccggccgcaaactgatggagcgtaccatcattattgccaatacgtcgaacatgccggtggcttcccgtgaagcttctgtctatacgtccatgaccatcgccgagtactaccgttcgatgggtctgcgtgtccttttgatggcggactccacttcccgttgggcacaggcgctgcgtgagatgtccaaccgtctggaggagcttccgggacaggatgctttcccgatggacctttccgctatcatcggcgctttctacgcacgcgcaggctacgtgtaccttaataatggtgctacaggttccgtaacgttcctcggtaccgtatcgcctgccggcggtaacctcaaggagccggtgaccgaaggtacaaagaaggtagcacgctgtttctacgccttggagcaggcacgtgctgaccgcaaacgttatccggctgtcaacccgattgactcgtactccaaatatgtggaataccctgagtttgaggaatatatctccaaactgattgacaaagactggttgccgatggttaatgacatgaagacctatctgcagcgcggtaaggagattcaggagcagatcaacattctcggtgatgacggtgtacctgttgattaccacgaggctttctggaaatccgaagtcattgatttcgtgattctccagcaggacgctttcgataagatcgatgccgtttgtccgttggaacgccagcagtatatgctgcgtctcgtgatggacatctgcaagcacgactacgacttcgataatttccttgatgtcattgactatttcaagcgcgtcatcaacctctgcaagcagatgaactactgtgagttccactctgcagagttcgaagactaccgcaagaaactcgatgatctcttggcagaaaagcagatcgctgcgtaaaatgaaaaaatgtgaaaatgaataaatgagaaaataacattatggcggctaccgttaacggaaagctggcacaggtggtaaagatcatcggtgacgaggtgacgctgcaggtattccagggaacagaaggtatcccgaccaacgcagaggtcgtattcctcggcaaagcaccgagcctcaaagtgagcgaccagctcgcaggtcgtttcttcaacgcctacggcgagcctatcgacggcggacctgctattgagggcaaagaggttgagatcggcggtccttccgtcaaccccgtccgtcgtaaacagccgtccgaactgattgcaacgggtatcgcaggtattgacctgaacaacacacttgtttccggtcagaagatcccgttctttgccgacccggaccagccgtacaaccaagtgatggcaaacgtggcgcttcgtgcagaggcggacaagattatcctcggcggtatgggcctgaccaacgacgactacctctatttcaagaacgtgttctccaatgccggcgtgcttgaccacatcgtttcgtttgtcaacacgaccgagaacccgcctgtagagcgactgctgattccggatatggcgttaacagctgctgagtattttgcggtagagaaacacgagaaagtgctcgtcctgctgacagatatgaccctctacgccgatgcgttggcgattgtgtcgaaccgtatggaccagattccttccaaagactctatgccgggttcgctctattcggaccttgccaaaatctatgagaaggctgttcaattccccgagagtatcggcggcggttccatcaccatcattgccgtgacaaccctttccggcggcgacatcacccatgctattccggataacaccggttatatcacagaaggtcagttgtacctccgtcgtgacagtgagattggtaaggtcatcgtggatccgttccgttcactgagccgtctgaaacagctggttgccggcaagaagacccgcgaagaccatccgcaggtaatgaacgctgcagttcgtttgtatgcagatgcggctaacgccaagaccaagaaagagaacggcttcgacttgacggactacgacaaccgctgtctggatttcgcacgcgactacagccgtgagattctggccatcgacgtgaacatcaataccgttcagatgctcgacgtggcatggacacttttcggcaagtacttcaagccggaagaggtgaatatcaaagctgcattggtagaaaaatattggcccaaggcttgaaagttgagagttgaatgttgagagttgagagaagcctaatagttgaaagttaatagtaagaactttctacttaaaaactctccaacttctttaaactttgaactctaaactataaactttaataacatggcaataaattttcagtacaataaaacatcgctgcaggttctggagaaggatctgaagatgcggcagaggacgcttcctacgctccaaagcaaggagactgctcttcgtctggaagtcaagaaggcgaagaaggagctggaagagctggacgaagaagtgaaccgccgtatcaaggattatgaccagatgttagctctctggggagagtttgacacctcgctcatccatgtggacgacgtacgtatgtcggtcaagaagattgccggtgtacgtgtgcctgtcttggacgaggtggtctattcgaccaaagagttctcgctgttctccagcccgaaatggtttgccgacgggttcgagcaaatcaaagcgatagcggatgtaggtatccgtcaggagtttgtgcgccgcaaggtggacctattagaatacgcgcgtaagaaaacaacgcagaaggtcaacctctttgagaaagtacagattcccggctatcaggatgctatccgtaagatcaaacgattcatggaagacgaggagaacttgtccaaatccagccagaagatcgttaagtccaaacgcgaggcggaagcccgtgcggaggaagaaaggaggcaagcatgattacgcaaatgaaaaaatacaccttcttggtgttccatcgtgactatgagcctttcctgacgcagttgcgcgagttgggcgtagtacatatcacccagaaggcggcaggcctcatggagaacgacgaggcgctccagactgcgttgcagcatgaagacgagctccgcaggctgatcaaacaaggtgcgccggatcagatgattcaggagcgtacggcgattgagcaacgtatcgccgatgccaaggccgctatggagcaagcatcggtgtggggcgagtttgatgcagaacgcattgaggcgctctggaacgccggttatacgctccgtttcttctcttgcggcgcaagcgcttatcaggaggaatgggggattaaagtctccgagaaagaaggcaagacctatttcgtgcaagtcatcgcagacggcgcaaacaacgaaaactacggggactacgaaaactacgcaacgccgttgccgcaaccggagaagtccgcttcgcaatggcaagtagagatagaaaacctgaaagggcttttagcagccgctaacggccgcattgaggcttggcgactggcgaatatggagaaactgcaagccgaactcaaggaggcacgtcagcagatagactggacccgtgttcatctctctaccgaccaactcgccgagggagcgctttgtctgttcgaaggtttctgcccgatagacaaagaggaggaactgaatgccatgctggcgaaagcggaagtgtattacgaggagacagatcccgagaaagaggacgcaacgcctatccagttgcacaacaactggtttgtgaagctcttcgagccgctgacgggcatgtacggatggcctaactacaatgagtttgacccgacacctatcctcggtccgttcttcctgttgttcttcgccctctgtatcggcgacgccggctatggtatcatgctgacgctcatcgggtatcttatttacaaggacaaactgaagattgagatgttcgagggtctgggaggaatcatcatggcgcttggcgttggttctaccgtcatcggttatctcatgggcggcttcttcggcatcgacctcttccgcgctacctggttcccggagtgggcgaaagcgccgatgttcaacaacctgggcgtggacggcaagataggcgagtacgacgtgatgatggtattagctatcctcatcggtgtggttcacttgattctggcaatgaccatcaaagccatcacttataccaaacgtgacggattcaaggcaacaatctccacctggggatggctgctgctcatcgtgggcggtatatgcacggcgattgtagcgatgcttttctcgctgccgacggagattgtcaaatggacgctcatcggtatcggcggtgtctccgcgctgggtatcttcgtgttcaacacgccgggacgtaatccgctgattaatatcggcgcaggtctctgggatacgtatggaatgaccaccggtctgttaggcgacgtgctgtcatatatccgtctgtacgcccttggtttggcgggcggtatgttaggcgcagctttcaaccaactgggcacactagtgttaggcgagaacccgaacgtaggcacttgggtaggatttatcctgattgtgactttcggtcatgtgctgaacctgctgatggcttgcctcggcgcgtttgtacacccgctgcgtctgtcgttcgtggagtatttcaagaacgccggttacgaaggaaacggaaaactctataccccttttaagaaagtgtaatttacgtaatttacgtagcaaacgtagtttgcgtaaactacgaaaacaacgaaataaacattaaaaatttaaaatcaataaattattatggaacttattttaggttatctcggactgggactcatgttgggtctgtccggcgttggttcggcttacggaacaactatcgcagcaaatgctgccgagggtggtttgaagaagaacaaagagaaatcatcggcttacatgattctgtcggctcttcctgctacgcagggtctgtacggtttcgtggctttcctgatgatgaaggggctcattgagacgaacccgattctgttgtttggtctggggctgggcatgggtcttgtattcctgctctccgctatccgtcagggacaaacagccgctaacggtattgccaatatcgcagccggccacgatgtaatgactaacaccatgatctactgcgctctgccggagttctatgctattctggcgttggtagcaggtctgatggcataatttaggtaaacgtaattttcgtaattatcatattttgcgtaaactacgtaaacaacgcagactacgaaaactacgtataaatctttgatttatgccaaaaatagcgtttgttttcccggggcagggaagccagttcccggggatgtgcaaagacttgtacgatgcacatcaagaagcgcgcgagatgtgccaagcagccgacaggttgcttggcttctcgcttacggaggtgatgttcagcggcaccgccgatgatctcaagcagaccaaggtgacgcagccggctgtgtttctgcactccgtagtggcgcagcgcctgatgaccgttgagacgccacagatggtggcaggtcatagtttaggagagttctctgcactcgttgcttgcggtgctttgcgttttgaggacgccttattactggtgtccgcgcgtgcgcaggcgatgcaagccgcctgtgaaacgaaccccggtacaatggcggccgtccttggcttacccgatgaaaaagttgaagagatatgtcaggaattggttaattctcaatcctcaattctcaattctcaattaacagtcgttgccgctaatttcaactgccccggccaggtggttatctccggagagatagaagccgttgaagcagcctgtgtcgcgatgaaagaagccggcgcacgccgtgcacttcgtcttcctgtcggtggtgcttttcactcgccgctcatggctcccgcagcggaagatctgaaggccgccatactcaaaacggagtttagaaaacccttctgcccgatctatcagaacgtgtctgccaaagcagaaacggagccggagattatccgcgaaaacctcctgaaacaactcacagcccctgttcgctggacgcagtcggtgcaaaacatgattgcagacggtgctaccgagttctatgagttcggtcccggagatgtattgaaaggactgattcgcaagatcaatccggaggtgcaggtaggataaaagcataataaaactatggagatctttctgctcgttatagcgtttctgctgatgctgataggtgttatcggttgtattgttcccggcttgccgggaacgccgatagcctatctcggtctgtggattgcgcaggctacggaacgtgtggatttctcgtggcagtttctgctggtgtggggaatagtgatgatagccgtctctgcattggattatatagttcccgcgtggggcaccaagcactacggaggtaccaaatacggtgtctggggaagtacgataggtgtctttgtaggtcttttcttcggtgccgcaggagtcatcctgggcccgcttgtaggtgctgtgttgggcgagatgcttagcggtaaggccctcgcagaggcgttgaaagcagggtggggcagtttcgtcggcattctgttcggcaccgtgatcaaactgatctgttgcggtctcatgaccgtcgaactgatacaagctgtttggtaaaagcaaatttgcaatagtaaagaaagacggactgaaaagcagtaacttaacgtgcaaatttgtcaataagaaaaatacggaatatcccatgaaaaagaaaattctcggtttagatttaggtgttggctctgttggatgggcgctgattgagacggaagataaccagcctaaacagattttaggtatgggtagtcgcattgtgcctattagcaaggacgataatgaccaattctccaaaggacaagctataaccaagaatgccgaccgtacacaacgacgtactgctcgcaagggatataaccgctatcaaatgcgtcgtgcattgctgacacaggcattgcgcaatcataacatgttgccggatcgtttggacgagaatgttattgatttatggaaaatgcgcagtgatgccgctacagaaggacaccagctgtcgctttcgcagataggccgtgtcctctatcatatgaaccagaaacgcggctacaaacacagtaaggccgatgataatggagatagcaagctgactaaatatgtagaggaagttaatcaacgctacaaaaagattcaggaaacaaaacaaacgattggacaatatttttatacagaattgctacgcagtaaaattgagcgcgcaaacggtccttattatacctatcgcatcaaagacaaagtctttccgcgtgcagcatatttagcggaattcgaccaaatcatgcaggtgcaacgcgcatactatcccgaagtgctcacggacgattttatcgacattcttcgcaatagaataatattctatcagcgtccattgaaatcctgcaaacacttggttagtctgtgtgagtttgaggctcgtccttacaaaaccaaagaaggtaaagttgtttatggaggtcccaaatgcgctccaaggacttctcctttagcgcagctctgtgtgatgtgggaaaccgccaataatatcacgttgaccaatcgcaataacgagaaatatgagtttacactggagcagcgcagacagattgtagatttcctctgccgcaataaggaaatgaaggtctcgcatctacagaaaattttaggtatcggccgcaatgatggatggtatggcgggaaagctatcggcaaaggtatcaaaggcaatgccacgcttaatcaattgcgcgaagctctgcaaggcaaatacgaccagtggctggaaatgccgattaagcatgtagatgtagtagatacaactaccggcgaggtgttctgggctgtcagtcctgagatagaagaaacaccgctgttcaaattatggcatgctgtttattctctacagaatgcagatgaattagcaaagacactccgtgaaaaattcctaataacagacgaatcggttattgaggctctttgtcggattgatttcgtcaagcccggatatgctaacaaatcccataaattcattcgccgtttactgccatatttgatggaaggaatgatgtatagcgaggcatgtgagcgcatcaatatcaaccattccaacagtatgacccgcgaggaacgtgagctacgtccattgagcgcccgcatccaactgctgcaaaagaaccaactgcgtcagccggtagtagagaaagtgcttaaccagatgatcaatattgtcaattcactaaaagaccaatatggagagattgatgaagtgagggtagagttggcgcgtgagctaaagcagagccgggatgagcgtgagagtgcgtataaggcaatgggacagaatgaaagacgcaacaaagaaattgctatcaagatatctgagtttggtattcgtccttcgcgctcgcgcatacaaaaatataagatgtgggaagaaagcttgcatcaatgtttctactgcggcaaaaccatagatttggcagagttcctcaacggggcagatgtagaaatcgagcatattattccgcgtagcatcttattcgatgacagcttcagcaataaagtgtgtgcatgtcgtcgttgcaaccaagaaaaaggcaaccaaaccgcaatggagtatatggaaaccaaaacggttggagaacttgaggcatacaaacgccgtgtggatgaagcctttacatcgaaacgtatcagtaaaaccaaacgtgaccacctcttgtggcgccgagctgatatcccaacagattttatagaacggcagttgcggcaaagccaatatattgctgttaaagccgttgaagtactacaagagggtatccgccaagtatggacaagtggtggtagtgtaactgatttcttgcgtcaccaatgggggtatgatgagattttgcacacacttaatttgccgcgctatcgtcaggtcgaaggattgaccgagttcgtagattatgagcatgcagggaaaaaacataccgaggaacgaattaagaattggaccaaacgtattgaccatcgccatcatgcaatagacgcacttacggtagctttgacacaacagggatatattcagcgtttgaacaccttggaggcttcgcatgattttatggagaaacaagtaaaggaggcaggtacgaaatacaacgagaagaaatccatcttggaaaaatggatcaacgagcagccgcatttctctgttgaagatgtaaccaaagcggtagatggtattctcgtatctttccgtgctggcaaacgcgttaccacaccggcacgccgtgcaatatacaaaggtggcaagcgtgttatcgtgcagcgcggaatagaagtgccccgaggagcattgactgaagaaacggtttatggcaaattgggcgataagtttacggttaaatatccacttaaccatccgtccatgaagccggagaatattgttgatcctactatccgcgcactcgtacaaaagcgcgtagcggaacgagggaaggatgcgttcaaagatccgctttattcagccgaaggcatggagattaaaagtgttcgttgttttgctaatgtaacagataatagtgttgtgccaattaaatataatggagaaggactacctataggttacgcaaaaaaaggcaacaatcaccatgtggcaatatatacggataaaagcgggaaaccgcaagagagtgttgttagtttttgggatgcggtggaacgcaagcgttatggcgtgccggtagtaatcgccaatccgcatgaggtgtgggatagtttgctcgataatgatttaccacaagagttcttagaaaaactacccaaagatgactggcaatatctattttcaatgcaagaaaacgaaatgtttgttttagggatggaagatgatgagttctatgatgctatagaacgtcaagactacgcttctttgaacaagcatttgtatagagtgcagaaaatcaggagtggagaatatactttccgatatcatacagaaacgaaagtggatgataagtatgaaggcatcgcaaatgggacaaatgcaagttttcaattgggagcattagtaagtattagaggatttagtagtctatttgcgaaacaccctcataaagtcaaagtagatattcttggtcatattcacaaggtatgataaagcgcgtctgttatagtggaacagtaagaaaaatcatttatcccgattggtaatacataagatataatgaggagcaaacaagaaaattctatgtcagttgccccgaatgacattcgggataatcaatatagggagcataataaggatcagcactggcactggcaaaagcaagggacagcatggaaaggtatcggaatttatcatatcactctgtcggtgactaatcgtgaaccattattaggtacactcattattccggataatgatcctacacaggcctatattaaacgcacagaattaggggaaaaggtgatagattgtttgtggagtgtgccaaaacaccatccggatgtccgcattataagctttgacattatgccgaatcacttgcatactatctggtatgtggttcgtccaatgccaaccggaatcaaaagcgttgcgcggggtttttggcaagcagttaagcagattggaagggaatattctatgtcaattgccccgaatgacattcgggataatcaacatagagaggcgaatcccatattctcagagatgccgtttatacgtcctctttcccggaaaaatcaacttgatataatgattcgctacacttggcttaatccccaacgattggcgacaatgcaactcatgccgggtttcttccgcatacaagataatattgtaattgctggtagaacatacaaaggattgggaaatgtggaactattatatagaaaggagtatttgcctgtacatgtacgaaatatatgggtggaagctgcgaaacgtggagatgataagcaactgcgaaactatatgaatggatgtattttggcagcgagaaatggtacaatcatggtctcaccattcatatcggaaaaagagaaagcaataatggaagaactgctcaaagaaagacttccattcatttacatcgctgataacggctttcgagactattacaagccaaaagatgttttgtttgatgcggtcgctcaaaaacagttgctcatcctcagcccatgggaatacgatgcgcataaaaaacatgtcagccgtgctgaatgtgttgagatgaataaaatggcagaggaaatctctaatatgtaaacaaatacggactaaaacaagtattgacgagctgaccagttacaagaacccgttgtgtatgtcattcaaaaagtaaacaatagaggtctaaaacaatgccctcgcctacgatgatctcgtacaggtcgttgtgtatgtcatttaaaaaagtaaacaatagaggtctaaaacaatcgttaacgaggtaatcgagtgcgaccttatgttgtgtatgtcattcaaaaaagtaaacaatagaagtctaaaacaatagcggggttcgtgtatgtcaagaccacggagttgtgtatgtcattcaaaaaagtaaacaatagaggtctaaaacaatggcggcggcggaaaaggtcttggttatactgttgtgtatgtcattcaaaaaagtaaacaatagagctctaaaacaatctcggaggtgcgcacctctttccaaaactcgttgtgtatgtcattcaaaaaagtaacaaatacggactaaaacaatcgaccccgtataaaactattaaacacaacaagttacacattgttttagaacgtaaaaaagcagcactgtgaagtactgctttttcgtttttatagacactttttatatttctaaattcgctgaaacgcgtattcattcggatgcaaagatatataaaaatgctgaaaaaaacaaattaattgtaaaaattcttgcatatatcaaaaaaaagcagtacttttgtaccaactttttgaatgacatacacaataaggattattccgatgtgtaaacatttagggtggggcagtgcctcgccctctttttatgccatgtaatgtagtaaaatgctacaaaattacattttttagccgtaatgtttgcaaatgtgcgaaaattgttgtatctttgcagcgtgtttaacttttaattcttgacaataaccggaaaggataagtctgcgcgctatgcagaaacagaccagatacaaactgaatatcggaatagcggcgctggtggcactgatctacgtccttattccggtagatgtagcgccggatgccgtgccggtagtagggtggattgatgatcttatcgccatcctgctggccgtcaccaacggcttgcatttcgcttcgaaaatcaagaaaagcaaagagtagggcaggatcctcccaaatagtgtatcctcttaaaaaaaacgcctcgatgaaaaatcgaggttttgtcggaccaaaatcgagtcaaaagggggtgattagggcgtgattacagggtgattacggggtcgttcctataacgtcaccgtaaggtcaaaccaagaacaaaggaagaaaaaatgccaccgaatgacaacttgtcagaatgacaagtatatacaaagtatatactacaaaaaatatgccaatatatgactaaagtgaagtttcatgctcccgtcgtggaaatgaacggggaatttgagaaaggaagtggtattatcatgcgaaaaaagaaataccgcgcaccaaatggagctgtgttgaaagaaggtgtccaggagtcttacaaaatctgtaaccctcgggattatgacaaaaatccgcctaaaggcgcagaactcgccaatatccggttgttcagcgattctaaacgcatggcgtcggagattatcaattccgggaaaatgacagaggaacaacttgtatctatgaccacggatgaacgtacaaaaacgcttgaattacgtgcgcaactggaaaactttaaaaaacgtttctacgcccaattcaatcggccggaccctgaagcaccatacgaaaagaaaccggctcccggaaaatcaaaaccgcagcaaaagcaatatgccaagctcgataatttcattcaggctatcatccgcgaaaaactcaaggcttctgccaaattgtcataacgcagttactggtataattattgtacaatcattcatataattcatatattataaataaataagcctttcaaatctaatcgtgattatgttaaatagcatttatggaagagaattataatatagaagacaacaggtactacgaagtgctccctatcaagaaccaggtggtttttccgggagtgctgctgccgatagcggtgtcgaagaaaagcagtttgaaactgatcaagtctgccaatcgcgagaaccgaccgctgattctgctgacacagaagaatgacaatgtggcagaacctaccgagcatgacttgtatgagttgggcgttttcgcccgtgtggtacaaatcatccccgttccggagatgggcaaagacacgatgatgaccattttcgagggtctgaaacgtgtacaacccgttgatttcatggaggaagacggtgtgctgaaagcgcacgcattcgagatggcagaacatatgccgctcaaaaacgacaagcagttcaaggccactgtggagaacatcaaagagacggtgttgaagatcctgagtgaacgcgacgagacggctgtaggtttgcagatgtccattcgtaacattaacagtacccctactctcgtcaattacgtgtgcgccatctaccagatgcccacagagaccaagcaagggctgctcgccattcactcgctgagtgagcgagccgaagcggtactgacgatcttgcagaaggaccttgaggaacagaacatcaaggcggatatccgtcgccgtacggccgaaaagatcgacaaacgcaaccgcgagtatttcctgcaacaagagatagagacgatcaagaaagacctgggcgacaacgacgataacgagcagctcgtcaaagagttgcgcgaacgcgccaaagaaaaagcctggtcggagactgtaggagcacagttcgaaaaagaactgaaacggttggagcacatgcacatgtactcgccggattactccacgcaactggattatctggagacgatgttagagttgccttggggcgtttattccgaggataactacgacatgaagcatgcgcagaaggtgctgaaccgggatcattacggtttggacaaagtgaaggagaggattgtcgaatatctggcggtgcagcgccagctggcgcttcgcagcgagaaggagaaagacgccaatccggtgaagtcccctattctctgtctgttcggtcctccgggtgtgggcaagacgagtctgggaaagagcatcgcggaggcgttgggaaggaagtacgcgcgtgtgtctttaggcggtctgcatgacgaggcggagatacgcggacaccgccgtacatacgtaggtgccctacccggccggattatcgacaacctgaagaaatgcggcacctcgaaccccgtgtttgtgctggacgagatagacaagatcggcgcggattacaaaggggaccctacagcggcgttgttagaggtgctggatccggaacagaacagcactttccacgacaactacctggatgtcgattacgacctgagcaaagtgctgttcatcgccactgccaacagtctggagagcgtgccgcggccgttgctcgaccgaatggagctgatcgagatgaccggatacctgcaggaagagaaagaggannnnnnnnnnnnnnnnnnnnnnnnnnnnagaaagagatcctcgcacatatcattgacgattacacgcgcgagtcaggcgtgcggagtctggaaagacagatagctaccatctgccggaaggtagatacgaaactggcgctcggcgaggagtacaatgtgtccgtgacgttagaggatttgaggagttatttaggccagaagcgtttcagccgtgacagctgggagacaaacaaatacgtaggcgtagtaaccggtcttgcctggacacaggtgggtggcgagatactgtttatcgagacaagtctcagtcagagcaagacacccggtctgactctgaccggcaatctcggcgacgtgatgaaagagagcgctacgttggcattggggtacgtgaaggcgcatgccaaagagctgggtatcaaaccggaggcgtttgagaagacggcggttcatatccatgtgccggaaggtgccatcccgaaagacggtccaagtgccggtatcacgatgacaaccgctttagtgagcgccttcaccaaacgtctggtcaaaccgcgtgtggcgatgacgggcgagatgacactccgcgggaaggtgctgcctatcggcggtgtgaaagaaaagctgctcgccgccaaacgagccggtatcacggatatcatcctttgcgaggacaaccgcaaggatgtagcggaaatcaacgagatgtatcttaaggggctgacgctgcatttcgtgcatgacatcagcgaggttttgaaagaagcgctccagtagagcgcttctttcgtagtttacgtagtattcgtagtttacgtagtattcgtagtttacgtagtttacgtagtttgcgtagtttacgtagtattcgtagtttacgtagtattcgtagtttacgtagttttcgtagtttacgtagttttcgtaattacgggatttggagaaaactcttcaaaagtattgtcggagtaatagacgacaatctttgtgatctgcttaggaggagctacagggatgacctgcggctcttcttttttgggcgggcgtgtgtttttctccttgggatccggcggtagcgtgtcaaagagtcccgcctcttgtccgggcacactgcgccacatttcccctcttccggcaatgagccattcggggttgagcgtcgggtaacgctccatgatacgtttcatgacttccagactcggattgttacgtcccgccatcatattactgatcgttccgggctgtacacgaatctccgcagcgaactgtcgcgcagaaatattcagggattgcatcaccgtttctattcgttctctctcgttcataatttgaagaatttcaaatcgagtgcaaaggtacaaaaaatattcgatatacacaaatatatgcacgcaattttgtaaattaaatttcacatctgtgaataatatagagcatgggcaaatattcacaaacccaagcacggtgatcgtggaacaatttgaggcggtacagcactccggatgaagccatagccactctacagcatataaaagctactctttaatgctataagtaatatgcataagtataaggaaataaggcatttgagtatattgctttgcgtgaaaaattgcgatatttacacataatggataagacgggcatttgttctaaagtattagtttaggtaaaattgttatatattgaaataatgtgatttatgcgttgttttatttgctattcaaggtggtgatgtgcagtaatgttgtaattgggaagaatgcgacattttgagagacgggactactctactcttttgcggtatgggcagaaagagaggtgttcggaggaagtaaatatgtggtttgaaaacgtcacaaatgtgagtattttagtgtctattggtgttcacgtttattgtgaaaaaatcttgggattttatttgcatatgtgaaatatttgtagtacctttgcactcgatttagacaacgagttaaatcagcactattaccattaaaccattaaacctattatgaaaatgaatgtttttacattaagacaacaagcgcaggattttctcctgcgtttgttcgttgagccgacctctgatgcgtcggtccgccccactcattccgcttacacctgcgcccattgcggtacgttttccagattacgtcaataattttgcaataatatttgcgtatgtcaaaaaaaatcattacttttgcgctccaaatagtaatgagtatgatcctttatccgaattgtaaaataaacttaggtttgcgcgtagtgcgtaagcgcgaggacggctaccatgatttagagactgtttttgtgccggtttacggattgcacgacgtgttggagattgtgcatgagcgcaccatgcaggaggattttacctttctgcaggaaggtatagcagtagattgcaggccggaagacaacctgatcatccgatgctatgagttattcaaggcgaaatacccgcaggtagggaaagtggcaatccggtttcaaaagaatattcctttcggcgcgggtttgggcggcggcagcagcgatgcagcacacacggctatcgctctgaacgagttgttcggactcgggctgagcaaggcacagctggcacaagaggtgcgtgtgttaggagccgactgtccgttcttcatctataacacgccgtgttacgcagagggaatcggtgatcagctgacccctattgcattggggctacaagggacgcggattatcctgatcaagccggaggaaggcgtgagtacgaaagaggcgtatagcggaatcaagccgcggccggaggtagccggagagattcagaaggctgtcgcaatgatgcgacagaaatgcacagagatagatgatactatttttgtgaatgattttgaggagacggtatttaagaaacaccctgccatagcggccataaaaaagcgtctgctggatgcaggcgcttattatgcgagtatgagcggcagcggctcaacggttttcgggctttttgagaacgatgcggaaggtcgtaccgacgcccaactgcgagttcttaaggatgagtttgcctccatggtactgctcgacgatacgtttggcgagtggaaggcctaatccccatcctctctctttggatgtaaaacccggctcgaagatgcgacgctgggttttattatcgataccctttccggtatcggtgatatccagcataatatcatgctcgttctcatgaatatggaaggtgatgatgcctttgcccgccattgcatcaacggcgtttttgagcaggttctccaccacccattggagcagcggcgcattgatcatcacttcgcgtgaaataccattgagacaggagtcgtcgatggtgatacggctgctgacacgcgcccgcatgtacgccacggcggattgcacgacgggaatcaagttctgcgcctgaagtgcaggctccgaaccgatcttctgaaacctgtcggcaatcatctgcagacgttcgatgtcccgtttcatctggggcacatactcatctgacggatatttgtcagcgaggagctgttgccaggcgttgagggaagagataggcgttccgagctggtgggcagtctctttggaaagccctacccagagacggttctcctcactccgctgcccgatgagcatggtgatgacggcaatggcgatgaagatgaaaatcagcgcaaactgtgcgtatggtacatagcggagtttggtaagcaggctgctgtcatcccaatagatatactgggtggtagtttcatcaatcttgagttcgataggaccataatgggaggtgcttgaagattggatgatttgagcatacggagattcctctacgtttctgctggcaagaaccttcccctcctcattacagatatataccgggatggtggtgttcttctcgataatcgatgtgacaaaatcgatgtctgcatcgtcatcggcaaggatgagctggcgcgtagcgtccgcccagatggacatgtttttctgttcctcagcttgcagcgcgcgtgccaggttattggtaaacagtactgaaacagccacgatgaccatggctattatcagtactgttgttccgatttgacggttggacattgagataaattaaaaattataaattaaaaattatcccaacatcgtcagaagcacaccagctgctacagcagaaccgatgacgccggctacgttcggtcccatagcgtgcatgaggaggaagttagaggggttctcctcttgtcctacagtctgactcacgcgcgccgccatcggcacagcggacacgcctgcagaaccgataagcgggttgattttctccttgaggaaaaggttcatgaacttagccaggagcacacctcccgcagagccaagaccgaatgcaacgatacccatcgcgaggatcatcagggtcttagcagtcaggaagctgttcgctgtagcggtagctcctacggagagaccgaggaagataacgacgatattcatcagttcgttctgcgccgtcttggtcagacgatccactactccacactctttcatgaggttaccgagcatgaggcatccgatcagcggagccgcgtccggcaggatgagggctacgatagcggtgatgacaatcgggaagacgatcttctcggtcttggataccgggcgaagctgtcccatcttgatagcacgctcctttttcgtcgtgagtgcgcgcatgataggcggctggataaccggcacaagcgccatatagctatatgccgcaatagcaatcgggcccaggagatgcggcgccagtttggaggtgaggaagatagacgtaggtccgtccgcaccgccgatgataccgatagatcctgcttcagccggggtgaatcccatcgcgtatgcacagaggaatgtcacgaagataccgatctgggcagcggcgccgaggatgagggacttcgggttggcaatcagcggaccgaaatccgtcatggcgcccactccgatgaagatcaagcacggatagacccccgctttcacaccgatatagagcacgtcgagcaggccggcacccttgaggatcgctccgtaggagtggtaagccgggctggatggatcgaggaacgctgtccacagctcgtcatggaacatacctgctccgggcaagttggtgagcagcataccgaacgctatcggcaagagcaaaagcggctcgtatttcttatggatggcaaggtacagcaggaagaacgagacaaggagcattatgccttgctgccaggtcatctgcatgaaacccataccttgaaaaaattccaaaatattcattttgcaattttcttaattaaaaattaaaaat

SEQ ID NO: 902 - DNA, 23465 bp, synthetic construct
  misc_feature 1..23465: note = Synthetic
  source 1..23465: mol_type = other DNA
atgatcatgaccgctcgcagcgttattcctgccgcgatttcggagccaactacctcaagtcctgcgaggatcaggcaatcctcttctccaacggcgataacgacaccttcccgctttggtacaaccaagaggtggaggaagaaggaacggacaaacgtgtctgcaacctctcgtatctccagaccgattggtacattgaccagatgaagcgtccgtactacgagtcgcaggctcttccgatttcttgggaatacaaggattacatgcccggagcaaatgagattgcccgcgtggataaccgtctcggacaacccatctctgtggagaaagcctttaatttcctgcgttctgacgatccgcgtaccaagacccgtgagggtgacaattacttgccttccgaccaactctttgtagagacaccggccggcgagcagattttcttcaagaagaaaaggatgtacacccgctcggaaatgatgatcatggagatgctctctaccaacaaatgggaacgcccgatctatttctgcgcgacagtcggaaacgactactatctgggcctcgagccgtatatggaactcacgggtttggcataccaaatcatgccgacgcgtagccgtgacggacaaccgcgcgtgaactccgagaagatgtacgagaatatgatgcataaattcaagttcggcaacatgaatatcccgggcatctatattgacgaaaacctcatgcgtatgtgccgtacccaccggatgatgttcgctcaattggcggaacaacttatccgtgagaaccagcgtgagaaggcgcttgaagtattggattatgcagaggaacagctccccggctataatattccgtacgactacacttccgcttcgatggcggctatgtatttcatgcttgatgaggacgaaaaagccctcgccatcatggatgacgtagcgaaaacctgcgtggagtacctgcgtttctctgcatctctggatcgccgccagcgcgaactcatggagtctactactggccgtcaggcggctattttggattatgtcctccgtacgtgtgagcgcaacggacagaccgaattagtggaaaaatattacggcgactatgccgcttatgtgaaatgaaagaaataaacaaaataccggttctattgcttaccggctatctcggttcgggaaaaacgacacttctgaaccgtattcttaccaacaacaaaggtattcgctttgccgttatcgtcaatgatatcggcgaagtgaatatcgatgcttcgctcattcagcagggcggagtagtttcgcagaagaatgattcgcttgtggcgctgcaaaacggctgtatctgctgcacgcttcagaccgatctcatcaaccagctgcacgatcttgccgcgcaaaaggcgtatgactacatcgtcatagaggcttccggtatctgcgagccggctcctatagcgcagaccttgtgttcgtacccgcagatggtacctcagtttgcgcaggacggaatgccggttttggattgtatctgcacggttgtggatgcacttcgtatccgcgacgagttcgatggcggtgaacagctggcgcactatgtgcccaaggaagaagacctcgcagcactcgtgattgagcagattgagttctcgaatattgttctgttaaacaaggcttctgaagtaagcgaagaggagttggcaaaaatcaaatccattattcgcgctattcaacccaccgcagaaatcatcgagacgaactactgcgatgtgccgtttgagaagatccttaacacccgtatgtttgactttgaccgcacggctacttcggctgcgtggatccaggaagtggaggatgcgtcgcatcaccatgaccatgatcatgagcacggcgagcacgatcacttggctgagtttggcatagagacctttgtctattatgcgcgcagaccgtttgatctcgggctctttgatgagttcgtggcggctcattggccgaagaacgtcatccgttgcaaaggcatgtgttattttgccgaagagtacgatatgtgctatctctttgagcaagccggacgccagttcaatctccgcaaagcaggagagtggttcgccaccatgcccaaagaggagctgatgcaactcatggcggacgatgcgcagcttcgcaaggattgggatgaccaatacggtgaccgcatgcagaaactcgtctttataggccagcatctggataagaaagcgcttacggatgctctggaccgttgtttgcaataaaataatttaactccggattccggctgcaattaacgtatgaaaaatagaatgattctcctccttctttgcgcattgaccgtcacttcggtctttgcgctggagggagatgccaaagcagctaagaaagaggcggtgaagtcccaccttaagcagcatttcaagccatacggatttatccgtaactattttgcattcgactcccgcgagtctatgtccggtaccggtgacttgtataactaccagccgtacgacgaggcttggaaccagactgaagcagaagctgctgcatccggcattcctcgtgaagacctgaacgcacgcagtacgtttcgtttcctgagcctgacgacacgcgtagggttgaatatcgtaggctataaatggcgtaatacggagttcggcgctaagatagaagcggatttctatgcgggcttgagtacaaaggtctctcaccccgttaccggcgtggcacagttccgtttgcgccaggcatatatgactttaggctgggatagcttgcgtatgaatgataaggattacgcgcgcgtagatctgctgctcggacaagcttggcacccgatggctgcggacgtaagcgacgtcatctcgctggcttccggagctccattcggaccgttcaaccgctcgccgcaagtgaagatggatgctcgtcttggcaagtatttcacccttacgggtgcattgatctggcagatgcaatactgctctgtaggcccgtcgccaaccggcgcaatccaagccgctgattatatcatgtacagtaagacgccggaggcgtatttggggctgagcgttcataccaacggattcctgctgcgcgccggtgcagacgtgctgagtatcaaacccaggcagataggtacggtcaatgccggagggaatacgatctccgttagcgtcaaggaccgtatcaccactgcttccccgttcctctatttgcaatataagaaagatgagttctcaatcaaagccaagaccatcttctcggaggcaggcgaacacatgaatctcaatagcggttacggagtcaaagccaagaacccggacggttcatgggattatacgccgctccgcgcatcatcctcgtggctgagtattgtgtatggaggcaaaatcggagcgcaagaagacaaacacccgcagaaactgcagggtattctctttgccggatatattgagaatctcggaacgaaagaaatgctttacgatggtgacaatgatggtcgtccggatgacttatatacgccgcgagccaataatatgaatcgtatgtggcgtctggcgcctaccttgctctatacggtgggtaagttccaattaggactggagtacgagatcacctctgtgcaatacggacaagccggcacctccgacctgtacggactcgcgaaaacaaacctccactgggtaacaaaccatcgtgtacaactgatgactaaatacaatttctaatgaaacgaatcatcaatccctggacttccatgcccggctataactgttttggctgtagcccggataaccccataggaacgcgaatgcgattctttgaggatggcgacgacatcatctctatctggcgcccgacgcagaaccatcaatcctggatcaacacccttcacggcggcgttcaggcggttctgttggacgaagtttgcggatgggtggtcttccataaactccagacagccggtgtgacggcgaaaatggagatgcgttaccataaacccgtatctacgctgcaggattatatcaaactccgcggctatctcaaagagatgcgtcggaatgtggcaatcgtagtgggagagatctactcctccgaaggagaactcctctgcgagtgcgtctgcacgtacttcactttcccccaggataaagcaaaagagacaatggggtacattgcctcttcagtcgaagatcgcgactacacttgggaggaagccctcaatctctgaatactgactactgaatactgactacttgatctttcggatcaacgttagtccgtctctcaaagggaggatgacctgttcaaaacggtcgtcctcttttagtttgtcgttgaaggctctgaggcccagtgtctgtttgtctttgtcgtacgccggatcgatgatgtggccgtcccatagggtgttgtccgccaggatgaatccgcctaccggaaccaagggataaatcgcctccagataagcgcaatattcccgtttgtctgcatcaataaaaacgagatcaaacaaacttttgtctttgagcacagcggtcttttgtatttgagcgaagcggtctaactcctctatcgcatccccgatgattaactcaatgcggtcggataggggagattgggctatattccggaggatggtctcttccaactcatcgttatgctcgatggtgatgagtctgccgccttcggctaatccttctgccagacaaagggcgctatagccggtaaaagtgccgagttccaaaatccgtttcggcttaatcatgtgactcagcatgcttagcacgcgcccctgcacgtgcccgctcaacatgtgcgggtttaatatatgaacgtgcgtgtcgcgcgtgatagcctctaaaacctcattttctgccgtcgaatgagacgaaatatattcttcaagtgtcattttgttacaaatttgctgcaaaagtacaaaaaaatttgcatatgtccaaaaaaaactatatctttgcagcaaaatttaaacgttttactattcttatggagaaaatagacgagttagaccgcaaaattctgaagatcatcactcaatctgcgcgcattccgtttaaggatgtagcagagcaatgcggagtcagccgcgcagcggtgcaccaacgtgttcagaagatgttcgataacggagttattaccggatccagctatcatgttcagccgaagatgttgggctatcagctttgcgtgtatatcggtattaccctggagaaagcctccatgtacaaccaggtcattacagccctccagcagatccccgaggtcgttgaggcacaatatacactcggcgcttttggtatcttaatcaaggtctttgcgcatgataacgagcacctcttggccctcttgaatacgaagattcaggcgatcccgggtgtcgcggacacgaccacgcttactgcactctcgcagcctatttatcgtcagttaccgatagagatttaatatggaaagagtaattagtggaatacggcctaccggaaatttgcatttaggtaattatttcggagcggttaagagttttgtgaagatgcaggacgagtatgactgcatgttctttattgccgattggcattcgttgacgacgcacccgacgccggaagatatcaagaaatccgtcaagaccattcttagcgagtatctcgcttgcggtatcgaccccgaaaaagcgcctatttacgtgcaatcggatgtgaagcaggtgctcgagctttatttgtatctgaatatgaacgcgtatctgggtgaattagagcgcgttacgtcgttcaaggagaaagtgcgcaaacagccggataacgtcaatgccggtttgctgacgtatccttgtctcatggcggcggatatcctgatgcataaggcggacaaagtgccggtgggtaaggatcaggagcagaatatggagatggcgcgtctctttgcgcggcgattcaaccgcatctatggagtggagtacttcaaggagccggcgtccttccattttgccgacaaagcggtcaaagtgccgggactcgacgggacaggaaaaatgggtaaatccgaaggtaactgtctctatctctgcgacgacgaaaagacggtcacgaagaagatcatgcgtgccgtaacggatcagggaccgacccaactcaaccaggagaaacccgaggttatccagaacctctttaccctttgcgaactcctttgcggcaaggaagcggcagagtattataacgacctctacaaccgtatggagattcgctacggagatatgaaaaagcagatggcagcagatgcgaatgcgcttctcgctcctattcgcgagcgtattctcacatactcttctgacgacgcactcctcgaccgaatcatgcgtcagggagccgaagcagcctctgcacgtgcagaaaaaacgattgaggaagtacgggaaattatcggttttagaaagatttaacaaaaaaccgaaatatcgaaatgtcgaaatttgtccaaatattaagctctgtctccttccctttagggaggggttgggtaggcttattgctctttgcccttgccgcttgtcatactacttcgcaagcgcctttggacgatgcgtactactggccggacaaatctgtacataccgagcatagcgagtctagtacccctagtgcttctagtgcccctagtacccctagtactccaattgaatacaccaacatccaagacactaccgtcaccattaaaatcaagcgatgagaaatcttcgatacatagggttctgtattctgtcagtccgcaggacggtctgtgttctgtcagcgttagcggtctttgacgtaggctctctcttctctcaggactacacccgtctctccgagcgcacgattatcggaacggcgcgttatgtgggcatgagcggtgcgatgacggctatcggcggtgatccttctgcggtgacggacaatcctgccggattaggtctttaccgccgtgcagaagcgatggtgacgatggatataggcatcgataaagctcttcagaccgggcaagatcaagcaggcaagacgattcgtttctccttggcgcaggcttcggcggtgttctctctcggagatttcagcaaggatgatggtcttatcgcctataacttcatgatttcgtacaagcgccatcgtactttctccagggatttctttggttatggaaagaacggtgcggcacttgcgccgcttttggcgtccgcggatgtggagtgggatatagatataccgtcttatctcacgttcgactccaatgcattacgtctctccgaacgcggtcaggtaaatgagtttggactcgattgggcgatgaattattccaacaaactctatttcggtctgggcctccgcatccattcctattcgttgacggaggatgcgctctatcaagaggtgtacggcactgagtggctctataataagtcctatgtctctcattccggcgtgggagtaggggttgctgcgggatttatatatcgtccgttgagttggttgcgtctcggtttggcaatccatacaccgactattggttctttgcgtacctctaccgacggcaaactgcagactatgaccgataccttgggcacttcctatccgcgtcctctctctttccgtgacacggatttccatctgcctgtacatctctctacttcagcggcattccagattggcgcgtatggcatgattgcgctgcaatatgacctctataagcagcaacaatcgccgatgatccattctctccgcgcaggtgtggaagtcattccgatcatgggtatgtacattaacgccggctatgcttgtgagagcacgtttaagaaggaaggtgatcccattctgatggatcccacttttgaacgtcaggatgtatattctcaattcccccgcacagcccagtatgcctctgtggcattgggttaccgcggttcgtttataatggttcaggcggcgtaccagtatcgctggcaacatatagacctttttgcccacgaaaacgccgctccgtatgatatgaacgcaacaacccaccgcattgttattacaatcggctggcacagataaaatagggcgttccgcataacagataggaaccggaaaactcaacaaaaaacaactaaccgagtgcaaatgcttcactaatggcgtgccggtactctacgccgtgacccgactggggtagtttacattcctacccacggtagcgatgaggtggccggattacagaggaaaaagcaggcctcaaatcctattctcaggaagttttctcgagtaaaaagttatgcggacgctttttttgtgcccatttatttgcgtatatcaaaaattctttgtaattttgcagcgcaaaatgtaataaccaacactatgccaaagatttttgaatatttcggatttgtctttttcttctattcgaatgaacatgagcctattcatgtgcatgtcacccataaaggatgtcaaagtatttttgaacttattatggataatggtgttttggtagagatccgagttcgcgagaaggcaggggaagaaccgttgtcatccaaggatcaaaagacagccgaggaatttattcggaaatatagcaagaatatcattacaaaatggattaaattctttgtattaaggcaagcagtaaaaagtacaaccattaaaaccaaattataactatgagcagactttgtataataggagcaaaagacgcgggtaattgtactgtggatttgcagtttagcgaccaaactacccgccgagtggatataggtgacttcatccgtcgtcaccctcatccgcagtataataagtatcttgaccctcgtaattttcgccgttttgagatagaagacggaaatatagtgtggggcaagagttgggatttggtattcccggtagaacagttacacgcaggtgtaatcgagggatagaaccaccgctggcaccgacagcgtaaaaaagcggtgaagaagatagacaaaagatgtcaaagcaaaaagaaataatcgtcaaggacacaactatccgttcgttttcgcagaacggatgggactatatctgtataacggacattgctagacagaagaatacggaagatcccaatgccgttgtgggcaactggatgcgcaatagaaacactattgaatatcttggtatttgggaggctttaaacaatcctaattttaaccccctcgaattcgaggggtttagaaatcaggccggattgaatgcctttactctttccccaagtcgttggatagaagcgacaaatgcggtaggacttattgcaaaatcggggcgttatggcggtacgtatgcgcagcgcgatatagcttttaagtttgcgagttgggtttctgttgagtttgaactctatttgattaaggaattccaacgcctcaaaaaggaggaacaaaaagcactcggctggtctgcaaaacgtgagttagcaaagatcaactatcatatccatacagacgccattaaagagcaccttattccgcaggagattgattcataccatcgttcgctgatttatgctaacgaagccgacgtgctcaatgtggctttgtttggaatgaccgctaaagagtggcgtgatgcccatcctgacgacaaaggcaatatacgcgactacgcgacgattaaccagctgatttgtctgagcaacatggagaacctaaatgccgttttcatcaacgaaggtctgccacaaggagaacgtctccagaaactcaaccaaatagctattcaacaaatgaccgtgttggagaacgtagaaagtaagcatatattgaaagcataaaacagaacactggcaccgacagcgtaaaaaagcggtgagaaaaatccggtaagataattcaaaaatgcataaaaatgacacacaaatttgcgtatgtcattttttttgtgtaattttgcagcgcaaaattgcggaataaataaacagataccatgaagaagaaaattctcggattagatttaggagtgggttctataggatgggctttgatagagacagaagactaccagcctcaaaagattttgggcatgggaagtcgcatagtgccaattagtaaagatgatagtgaccaattttccaaaggacaagctattaccaaaaatgctgatcgtacggcacgccgcacagcacgtaagggttacaaccgttaccagatgcgtcgggctttgctcactcaggctttgcgcaacaataatatgttgcctgaacggatggatgagaatgtaatcgatttatggaaattgcgcagcgatgctgcaacagaaggacaccaactgacacttccgcaaattggtcgtgtgttataccatatcaatcagaagcgcggctataaacacagcaaagctgacgaaaatggtgacagcaagcagaccaaatatgtagaggctgtcaaccaacgctacaaagatattcaggagacacatcaaactatcggtcagcatttttatttggaactgctacgtagcaaaatagagcgtgcgaatggtccatattacacctatcgcatcaaagaccaggtttttccgcgtgcagcctatattgcggagtttgaccagatcatgaacgttcagcgggtttattatcccgaagtgctcacggatgaatttatagatactcttcgtaatcgcatcattttctatcagcgtccgctgaagtcctgcaagcacttggttagtttgtgtgagtttgagatgagaccgtacaaaacgaaagacggaaagattgtttacggcggaccgaaatgcgctccgcgaacatcgcctttagcgcaactttgcgcaatgtgggaaaccgccaataatatcacgctcacaaaccgaaataatgaacgatttgagtttaccttagagcaacgccgacagatagtagatttcctctgccataacaaggaaatgaaggtgacacatttgcaaaagatattgggaatttcgaagaaagacggttggtatggcggcaaagcgattggcaaaggcatcaaaggaaacgcaacactcaatcaactccgcgacgcgctacaaggcaaatatgatcagtggctcgaaatgccgattaagcgtattgatgtagttgatgctacgacaagcgaggtgttttgggcggttagtccggaagtggaggaaacacctttgttcaagttgtggcacgccgtttattctttgcagaacgcggatgagttagccaagacgcttcgcgagaaattccagataaccgacgaagccgttattgaggcactatgcaagattgattttgtcaagccaggctatgccaataaatcgcataagttcatccgtcgtctgttgccgtatttgatggaaggaatgatgtatagcgaggcgtgtgagcgcatcaatatcaaccattccaatagtatgacgcgcgaggaacgcgaacaacgtccattgagcgcgcgaattcagttattgcaaaagaaccaactgcgtcaacctgtggtagagaaagtgctgaaccagatgatcaatattgtcaattcgctcaaagaccaatatggcgagattgacgaagcgagagtggaattggcacgcgagctgaaacaaagccgagatgagcgcgagagcgcatataaagcgatgggacagaatgaaagacgcaacaaagagattgcggaaaagatttctgagttcggtattcgtccttctcgctcgcgcatacaaaaatataagatgtgggaggaaagtctgcatcaatgtttctattgcggcaagacgattgatttgtcggagttcctaaatggagccgatgtggagatagagcatattatcccgcgtagcatcctgtttgacgatagtttcagcaataaagtgtgtgcgtgtcgccgttgtaatcaagagaaaggcaatcaaacggcgatggaatacatggaaaccaaatctgccgcagagcaagaagcatacaagcaacgtgtagacgaagcttttacagctaaacgtatcagcaaaaccaagcgcgatcacctcttgtggcgcaaaacggacattcccgcagatttcatagagcgtcaattacgtcaaagccagtatatagcggtcaaggcgattgaggtcttgcaagatggaatccgtcaagtatggacaagcggcggtagcgtaaccgatttcttgcgccaccaatgggggtatgatgagatcttacacacgctcaatctgcctcgttaccgtcaagtagaaggattgaccgagttcgtggattttgaacatgccggacaaaaacatactgaggagcgtatcaagaactggtcaaaacgaatcgaccatcgtcatcacgcgatagatgccttgacggtcgctttgacgcagcaaggctacatacagcgtttgaacaccttggaggcttcccatgatttcatggagaaacaagtaaaggaagcaggcacgaaatacaacgagaagaaatctatcttggagaaatggattaacgaacagccgcatttctcagtagaagatgttaccaaagcggtagatggaatcctcgtttccttccgtgcaggcaaacgagtgaccactcctgcacgccgtgcgatttacaaaggcggcaaacgtgttattgcacaacgcggtattgaagtgccacgcggagccttgaccgaagaaaccatctatggtaaattgggagacaagttcaccgtcaaatatccgcttgatcatccgtccatgaagccggagaatatcgtcgattcaactattcgggcgctggtacaaaagcgcgtagcagaacgaggaaaggatgcgttcaaagaaccgctttattcggccgaaggcatggtgattaaaagcgtgcgttgctatacaagcctttccgagaatggtgttgtgccggttaaatatgacgaagcaggaaagcctattggctatgccaagaagggtaacaatcaccacatcgctatctatcaagacaaagatggtcaataccaagaaatggtcgtcagtttttgggatgccgtggagcgcaagcgttatggagtgtcggtagtaatcactaatccgcacgaagtgtgggatagtttactcaataaagatctcccgcaagagttcttggctaaactacccaacgacaactggcaatttgtcctatctatgcaagaaaacgaaatgtttgttttaggcatggaagatgatgagttcaacgatgctgtcgaacatcaggactacgccacattgaataagcatttgtatagagtacaaagtatcagtgcgcatgattacttctttagatatcatatagaaacaagagtagatgataagtatgaaggtgtagaaaaaggtagagaggctagttttatatcgggcgcattaattaggtctcgtagttttagtagtttgtttgctcaattcccacataaagtaaatgttgatttactcggtcatattcataaagcatgattaaacgtgtcctatgttttgagaatcccgcgcggttgagtctcaagttagcgcagatagtggttgagttgcaagatatgtcattcaaaaaagtaaacaatacggactaaaacaatcgctgaaatcgggaacaccgagcagccaaagttgtgtatgtcattcaaaaaagtaacaaatacgggctaaaacaataaaaacgcagaccatgatcgatgaggtactgttgtgtatgtcattcaaaaaagtaacaaatacggggctaaaacaatagcaccctcggagcgatgaaccgcctactcgttgtgtatgtcattcaaaaaagtaacaaatacgggctaaaacaatcagagccaacgcgatcattcccgcctcgctgttgtgtatgtcattcaaaaaaagtaaacaatacggactaaacaagagtcattatccaatcgaacgacagatccacaggttgtgtatgtcattcaaaaaaagtaaacaatacggactaaacaagagcctcggtgctgtcgatcacctcatccacgagttgtgtatgtcattcaaaaaaagtaaacaatacggactaaaacaattagtgcttgcaggctttgcacgaggcactagttgtgtatgtcattcaaaaaagtaacaaacacgggctaaaacaataaaaacgcagaccatgatcgatgaggtactgttgtgtatgtcattcaaaaaagtaacaaatacggactaaaacaatcggtcatctcccgcttgtctctcggtagatggtgcaaaattacagaaaaatgcggaaatatcaaaattatttattaaaatatttgcatatttcataaaaaagcagtatctttgcacaactttttgaatgacatacacaataaggattattccgatgtgtaaacatttagggtgggaggaaactctcgcccttcttttttctcgacgtaactgccaagaagaacgggttcgcacaatgatgcgcgagaaatgcacaaagaaacgcgacggcagaaatgccgccggaagggacaaccgacatagaatgccggtaaaatggacatacgagagaaatccggaataaaattccgggctaacgaacgaagaaagggggaacgcggggcgagaacagaacgaatgggaaagaagaaaaaatatagaaaaagggacaaaaatatcaacaaaatttgcaaatgtcaaaaattttgtgtatctttgtcgtcggatttggataagaaaaagatgaaagcaaaatggacagggttggtggatgagttgcggggacatgtggaccgcaatcattacgcaaggcggataccgggaaactggcagtatgccgctgtgtgcgagaaaccggaattgagcgagaaaacgaagaaaaagaaagcatccctgccgcatgtaaagaagtttaaggagatgatggcggaatgcaaggctatcctgcatgacctggagagacgcgcagaatggcaagcgcggtatgatgaggcaaagcgtgaggctattcggcagaacaagcccgttcaagggcggttgtgcgactacgtgaagcatgagttgatagaggcgcggaaaaaggtagcgagcgagagtagtgaggggtagtacgtggggctaacgttgtacgaagcatacgatgagcatacgttcagcatacgatgagcattcgattggactcttacgggagtcctattttttgcttacatttggcaataaaagggtaagcgggattcatatccagcgaaaataagcggagaagcgggattcaatcccgctgcaaaggacaaagtcaagtgggataaaaagtagtacctccgagggcaccgacacggctacgccgtccccacctcgaaggcgcgtcccgataatcgctcaaaacacactaatatgcgataaatcgcttttttttctcaaaaaaaatgcccgaacgcttgcatatgtgcaatttttgtagtaactttgcagccgatttgggttaatgctattattagaaataataaataaccaaataacaggtgtctaaataaggaaacgaaaataataaaacaacaaataaaatggcaaaaaagaaagaagagttcgtaaaacaggacgaacagttagaagaagtaaatgaggcgttgacaggcgccggaaaatggattgaggacaatgcaaacctcatcagttggatcgtttgcggcatcgccgttgtagtgatgggtatcatcgctatcaaccagtacgtgatcaagccgaaagctctggaggcatcgaacgagaacgccaaggctgtggcttatttcatggcgggcgatttcgacaaggcgctgaacggcgacgacgctgagtgcatcggttttgaggctatcgcagacgagtacagccactatcagcagggcgagttggcagcattatatgccggcatctgctattttgagaagggcgagtacgaagaggcagccaagtacctcaagaaatttgacgcagacgacgagaacatcgatccggccgctcatcagctgctcggcgacgcgtatgtagagctccaggagtatggcaaagctgccaaggcttttgaggctgctgctaagtccggcaacaacgtgattgctccaatgagtctgaagaaagccggcctcgtatatctgcacgagggtcagaacgcaaaggcgctgaaggctttcgaggctatcaaggctgattatccggcttccgcagaggctcaggatatcgacaaatacatcgctattgctaaatagtcgaaagtagaaagtcgaaagatatgactactgatttgtcaaaatatgacgcttcccagttgcctagcgctgatgtcctcggacgtcagcgctatgcgattgtagtagcggattggaatagcgagatcacgtacgccatggcgcaaggagccatcgacacgttagccaagcacggggtggaggaggataacatcgacattatccacgtccccggcgcagtggagctgactttcggcgcagcgcgaatcatgaaagaggagcgcgtgaatgctgtgatcgtcatcggctgcgtcatccagggtgatacgccgcatttcgattatgtgtgccaatccgtgacgcaaggcgtagcgacgctgaacgcgcaaggcaaagtgccggtaatcttctcggttctgacaaccctgaacaaacaacaggctctggaccgttgcggcggtaagttgggcaataaaggtatcgaaggagcctataccgccatcaggatggcgaatttgtaagagtcgaaagtcgaaagtcgaaagtagaaagacgaatggctcaggtttataagtttggtggggcatccgtgaagaacgcagagggcgttcggaatgtggagaagattgttcgcatggcagaaggcgatctgatggtcgtcgtgtccgccatgggcaagaccaccaacgccttggagcgcgtggtagaagctctggcggcagggcaggaagagaaagccttgcagcaatgggtggatatcatcgattttcacgtagcgatcatgaaggagctgggtctgcagccgggagtggatatccgtctgcaaggcgagatcccgtatgacccagccaaatcgtttgacgagaactacgaccagattgtctctttgggcgagatcatgtccacccagattgtggcggtttatctcctcaaacaaggtctgccggtagagtggtggaatatgcctaaactgctccgtacggatgagacctggcgcgaggcgagggtagataacgagaccagcgcttcgatcattcgttccggctggaaccggcgtcagcgccctcgggttgtagtggcgcaaggctttatcggcggcacggctgacggtcgtcgcacgacgttgggtcgcgagggttcggattacaccgctgcgttgttaggtaactatctcgatgccgaatccgtgacgatctggaaagacgtgccgggtatcctgaatgccgatccgcgtatcgagccgaacaccgttttgattccttcgctgcgataccaggacgcagtcgagttgagttattcgggtgcgcaagtaatccatccgaaaaccatccgtccgcttgagaataagcagattcctttgttcgtaaagcccttcggcgatccgacagcagaaggttcgcgtatcgcggaagatggcgtgggaccgattgatgtgccggtttatatctggcgcaagaaccagattctcatcaccatgcgtgccaaggattttgcgtttgcgttggaggagagcctgagcgatatcttcgatatcatcaaccgtcacaggctcaaagtgtcgctgattcaatcgtcggctgtgacgatctccgtctgcgtggataacacgcgctttgtgccggaggcgattgccgagttgcagaaacatttcagcgtgacctacaatgaaaacctttcgctgctgaccatccgcggcaccacaccggagatattggagaaggcgaaagacggaaaaacaatcatgctcagccagacgacccgccgcacggcgcgattggtagtcgttgagcaagcataaataaccatggaaaactatctaaaacagtattttactgtcgcgtattggagtgaactgctccgcactttttggaaagcactcgggacaaaaaagttctggcgcgagttgctgatgatgacagtgggtatgagtttcggcgctatcgctgtttactatttcttaatgcccagccatctgatcgtgggttctatctccggtctgtcgattgtgctgaatacgctcattggcggaacggccgataccttctcctattgggtaatgggtatcaatgccttcctgctgttgctggcgtttatactgatcggcaatgagttcggcgccaagacggtctatacggcgcttatcttgggtccgctgactcagttatgggaccgcatctatccgaataccaattttacgcataaagtgattgaggcaccggatatcctctcgcagcttcaagccggccagaccatactggacgcaaacggcaatccgtatatcctcagccgctcaggcgaagtgatggaaagagtgcgcgacagcgttatgagcggcggtctgggacaaggcgatgtgtggtttgacctcatctgcttcgttctcctgctctccgcttgccaggccttcctcttccgcatcaacgcctctaccggaggtctggatatattaggaaagatcgtcaacaaatacctgcatttcgatattggtacgtcggtagctatcggcggcgtgatcatctgctgtacctccttcctgatcaatgacttccgcatggtggtgatcggaattatcggtacgtggatcaacggcctggcgattgactacttcaccgcttcgcttaacaggcgcaagcgcgtgtgtatcgtgtccggggaacccgagcgcgtacgcaaatatatagtggaggacctcgtgcgcggttgctcgttgtacaaagtgcaaggcggctatagcggagaagaacatacggagattcagacgctcctgacgcaggacgagttctcgtcggttatggcgttcatccgcaataatcatatcaaggccttcatcaccgccggaaactgctcggaggtctatggattatggttccggcataagaaaaaagacggcaaaacaatcatcgttaacgaataacacgaacatatatgaaaccaacattatttatcttggcagccggaatgggaagccgttacggcggtctcaaacagatggacggtctcggtcccaacggcgaagccatccttgattacagtgtgtatgacgctttgcgcgcaggattcgggaagatcgtctttgtgatccgtaaggattttgaagatgatttccgccgcgtcgtgctgagcaaatatgagggtaaggtacaatgcgagctctgcttccaatcggtggacaaagtgccggagggatgcacgtataaccccgagcgtaccaaaccatggggtaccaaccatgccgtgctcatggggcgcgacttgatcaaagagccgtttgccgtcatcaatgcagacgatttttacggcaaagagtcctaccaggttctggcagatttcctgcgctcggtagagggcaagcaaggccaatactgcatggtaggctaccgcgtagccaacacgctgagcgagaacggatcggttagccgcggcgtttgtaccaccgacgcagaaggccatctgaccgatgtagtcgagcgtacgcagattgaagagaagaacggcacaatcgtctttacggaaaacggcgtggacacgccgctggatccgcatactcctgtatccatgaatatgtggggcttcacgccggagtattttgaatatagcgaagcggccttccgtgctttcctggcgcagaaagggcaggaactcaaatccgagttctatatcccgacgctggtgaaccagctcatcggggaaggaaaagctacctgcaaagtgctggacactccgtccaaatggttcggcgttacctacgcagaagacagaccgcaggtagtaatgaagatcaatcaattaatcaaagagggtgtttaccccgagaaactgttctaatatggcacgaattttagtcaccggcggaaccggatatatcggttcgcacacgaccgtcgagctgatgcaacaaggctacgacgttacgattgttgacaatctcagtaactcgtccatcgatgtattggacggaattgccgctattgtgggtaagaaacccgatttcgccaatattgactgcggtaacttcatggacctggatcatgttttcaaacagtttccggatatcgtaggtgtcatccattttgcagccagcaaagcggtcggagagtcggtagagaagccgcttctttattaccgtaataacctcggcagcctcgttacgctgctggaagtgatgcgtctgcatgaagtgaagaatatcgttttttcctcttcctgcacggtttatggtcagccggacgccgatcatctgccggtagatgagaccgcgccgatccagaaagcgctctcgccgtacggcaataccaaacagatcaacgaagagatcatcaacgacgaggcgcacgcagacaagacgctgtgtgccactatcttacgttatttcaacccgataggtgcgcatccgtctgctctgatcggcgagttgccgaatggcgtgccgcagaacctcctgccgtttattacccagacggctatcggcatgcgcccggagctgaaggtcttcggagacgattataacacacccgacggctcctgcatccgcgattatatctacgtagtcgatctggccaaggcgcatgtcaaagctatcgaccgcatgttgaacgccaaggatcgcaagcgcgtggaagtcttcaacctcggtacaggaacgggtctgagcgtgctgacgctcatccgtgagtttgaggctgcgacgggagtcaaactgccttataccatcgtaggtcgccgcgaaggagatatcgagcaggtttgggcagatccgaagaaagcgaatgaagtattgggatggaaagccgaaacgcctattcgtgacgtacttgcttctgcgtggaaatgggagcaacacatccgtaacaagaaataatatttatgctttatccgtttaaattcagagcacagttattccataaattatggggaggtcataccattgagaaatggtacgatcatgttcccgctgactatgagaacgtaggcgaggcttgggtgatttccgatattgagaaatatccgacggaggtctccaatggttcgcatgcaggcgattcgctgcaggatctcttggaggtttatatggatgaactggtaggagagaaggtctatgaggtattcggaaaccagtttccgttgctgatgaaattcattgatgcctcggatgacttatccattcaggttcacccggacgatgagtatgcccttgagaacgagcaatcggccggaaaaacagagatgtggtacgttcttccgtcacaggggaaaggatctatttatctcggttggaatcaaacgatgaacgcctcgctgattcatgcggcaatcgcggatggcagtctggcgaaatacctgcagcatatggacgtgaaggaaggagacgtagctttcattcctgccggtacggttcacgctatgcaacgggataccattgtagcggagatacaggagaatagcgatattacgtaccgcctatatgattataaccgggtaggaaacgacggccgcatgcgtccgctgaagttggataaagcattggatgtaatgaattattcgcagacgaaagagacgaccgcttctcatcctcaaccggtagtgaacggagctgtaaatctttgcaaatctccgtatttcaccgcgaatctactgacgctcaatcggtccgtacaacgcgattacgcacctctggactcgttcgtcgcctttatgtgcgtaggaggagaagcatcgctgacggctctggattgcgaaacagaagaccgcacggtctcgctcaaaataggcgaagccgtcctcattcctgcggcgctcaatgatatccgcattgagccgaaaggagaatgcaaactgattgagatctatatagattgaaagaaactgaaatggacgctaccgtaagtacgcgtctctacatgctgcgggtggctggtgaaatcggtatctttaccgtgctcgatgaccagccatccgttttcttttagtatctcctgcttgagaatcaggtcgggtagagcaggtagctcttccagagcataaggaggatctgcaaaaataagatcgtatttcgtacggcaggcactcagaaacttgaatacatcgccgcggatgacgctcagattgcggatgcctaattgcttgcagcaactgatgatccaattctgctgcacatgcgcaatctccactgctgtcacctcccgtgcgccgcggctgacacactcgagtcctattcctcccgtaccggcaaagagatccagcacatcaatcccctcaaaatccatccggttattgagcagattgaacaggctctcttttgcgaagtccgtagtgggcctcgcggtgatatttttagggggcgacaatcgccgccccccgtatgtgccagagattatccgcatggctgtcttgctccggttctaaaccggttactcccagttacctgcgttgttgttcggagcgtagatgtcacccaccttcagaccggcgtagtgctccagcttcgtctcgcggtcaatgaggttcaccagctcctgctcgttcaggtcgctaagatagctctcaaacggtgcacgagcctcgaacagcggcacgcggatgccttggctggtcttgtaatcattgttgacctccatctcaaaacgcttaccctcgctgtaaggaatctctgtaatacgatcgatactcttctcgtcgtactcgcctttataaagcgcctggagcatgttcaactcaatcgtatcacgacggaaacctgccaagccattgctaaccacgtctttgtcgttctcccagatataagcgtacaacgcatcattgttctcaaactggttcttcttcagcgctttcttctttgcctcattcaggatcttaacagccttatgctcggtcaaaccggcctctaactgcttatccgtcagacttccttccttcaatacctcttttttaggagcggtcttcaggaatagaagcaggctgtccaaatcagccgtgaaacggccgttttggtggtgatactccacttcagctgtacggagatctaccagattcttaatcactgctacttcgcgctctgcacgcgtgttctcaaacttgatcggcgttgttacgctcgttacgcagaaataagccatcacaactgcggcgatgcttaatacgcaaattacaatgtttcttgttgttttcattatcggttaaatttattatttgcaaaaaatcgctgcaaaggtacaaaaaaatttgcatatatgcaagaaaaatcgtaaatttgcagcgttttttaagattagtatccatggaagatagtaata

SEQ ID NO: 903 - DNA, 19533 bp, synthetic construct
  misc_feature 1..19533: note = Synthetic
  source 1..19533: mol_type = other DNA
cgatcgcgtcaatgctgaacggcgaaggaagatgcggagaggagtccacattcaccgtggccgcgatgcgtacgataggaatccctgcacgtcaggtctatactccgcgttgggcgcatacagacgacaaccacgcatgggttgaggtctggactgacggaaagtggtccttcctcggagcctgcgaacctgagcctgaactgaatatggcatggttcaatgagcctgcggcaagggcgatgctgatgcataccctcgtgctcggagactaccgcggaccggaggatgtcatcagacgcacgaagaattttactgagatcaatgtcataggcaattatgtcaggacgagacgtaacatcgttactgtcattgacacggaagggaaacctgttcccggtgcatatgtctcattctgcatatacaattacggcgaactctacaatgctgtgattctgaaaaccgatgatgagggcaaggcgtcgcttcattccggaatcggtgatatgtttgtatgggcttcagacaaaggactttacggaacaggaaagcttacatctgatggtgatgaaaatgtgaagaatccggaggctgacctgacagctgaggttaccgtaacattgaaccataaagacgctgacaagatagaattagacattgacataaaccctcctgcaccaggcaggattccggcggaagcaagcgaggaagacatcgcggcaaacaagctgagactcgctcaggaagattcgataagacttgcatatgtcgccacattcacgaccgaggccaatgcaagtgatcgtctcggaatgccaggattgtcggcggaggattctgaagcggcatgcaggcaactgatagatgcgcgcggcaactggcgcgatgtacgggagtttattttcaaggccaatgatgccggtaaactgaaagatgctctggagatgctcaagactctcagccgcaaggacttgcgtgatactaagtgtgaggtgctcatggatgccctgacgacagcggctccgaggaatgctgtcagcagtcgcggtgagaacgtctattacaattatgtgctctgtccacgtatctcaggagagtttatccagccatatcatcaggatatcagaaaggcattggcttcatatcttatctacagcaacggcactcctcgtgatatcgcctctaaggcggatgccgagaaacttgccggagaaatcatccgctggaccagagacagcgtggcacttgccgacagcctgaattccagaagattgcaggcaactcctgccggaactctcagaatgaggatggctgacaaccgctcacgcaataccttcatggtcgccgccctgcgtactttcggaatccctgcaagggttgaccagatgaccggcaaggctcagtatatgactgacaatgaatggattgacattactgctgaaaagcagggcgattcctctgtcggaaggatttcagagaaaggaacattcacattgaaatatatcccgggtgccggcactctcgacaatccggagtattacaggcacttcacattgagcaaaataagtaacggaaggacccgtctgcttgatttcgagggcggcgatgccaccgagctcggtgcagatgcttccgccaagtctttcggcaggccgtttaccctggatgccggttcataccttctgactagcggaacacgtctagcgagcggaaaggttctggcaagaatggtttctttcaatgttgctcccgggaagaataccgacgttacccttgtcatgcgtcaggccagcgaggaaatcagcgtcataggtgcaatggaccctgaggccctgtaccagccggtgacggctgatggtactgtcgatgctgcaaagtcaatcctgagcacgacaggccgtggctatttcctcgtcgcggttttcggtgacggtgacgagccgagcaaccatgccataagggatttcgagtcaatgtcgaaggaacttgctgcctggggccgtcctgtgatggtgttcggacagaacgtggacaatgtcaagaatttggccggcaggcttgcgacagctgataatcagaaccttgtccactttggtctcgattcggatgcctctgtcagaaacatgatctacgaaggctgtcacagcgcaagcatgacattgcctgtaatcgcgatgtgtgatagtttcggcagggtagtgtatctttctacaggatataacacctctcttgcatcgcagcttcgcaatgtgatcgcgggaatctgattcgcgtgaaaggttatgagaaaggccgggtgaaaatctctttcatccggcctttctcatccccaatgattattagcaggacatgatttcatgttcctgctggcaaaggcagcatgtttaatccggataataaaatcttttgaattacacgtaatttctgattatttttgcgttacgtgcggcggttgtatgccgccggaaaaataacctgtaatgacattataatgaacattgacaaatacaattctctgataaagtccatcttcctcagattcccttcggtccagacctcgtcttttggtgatgcatacaagcctggactgcaacatatgctggatttcaatgacttgctcggtactccggacaaggctttccgtaccatccacgttgccggaacaaacggcaaaggctctgtttccaatatgctttcttccgttcttgccggagccggactgaaagtgggactctacacctcgcctcatatcattgacttcagggagaggatgcgcatcattgacgggcgcgattcggctgcggacaggaatgagacggccgagttggtccctcaggaatatgtatatgattttctggagaagtggcagggtaagttcgacgaaatggaattgtctttcttcgagataactaccggtctgactttcaagtggttcgctgacatgaatgtggatgtggcagttatcgaagtcggcctcggcggacgtcttgacagcacgaacataataaatccggaactgggtattgtcaccagcattggcttggaccactgtgacttacttggcgatacccttgacaagatcgctttcgaaaaggctggaattttcaagcgtggcgtgccggtcgtgataggggagactatgccggagacggaacctgtcttcaggaagcgttttgccgaggtcaatgccggtgtggaggctgttccagcgctggtttttgccgacaggacagaaccgtccatgtggtatatgcatgaggctgtcctggaaaatatggaccttcagggagaatatcaggctatgaacctgcgtaccgtgatggctgcgatagatgttctccagaccagatggcatgatgtggaaggtctttccgataaggcggccgtcgcggattcgttgatacacacggctttgagaatgggcttccacgggcgctgggagaggctttcgaccaatccggacgtgatttgtgacatcggacacaacgcacctgcattgacctataactttgggcagctgaaaaaatatctggagacagggaaatatacttcgctcataatggtttacggtgtgatggccgacaagaatttcgatgccataatgccgctttttcccgataatgcgacatggatttttacgactccacagactgccagggctgcaaaggcgtctgcgattttcgagaaatatactgccttctgtgaagaatcgggaagatctgcttcacgactttatgtgcaggacaatgtgagggaagctgttcttctggcattgaaaacggctgcagcctatggcggaaacccgctcgtctatatcggtggctctacttttgtggtttccgaggctgtgccttgcttcgcgtagaaggcttttccgcaggctcatacatgcaagattgtccgggaatggtatttatccgaagtgccgtccgcagtgtcataagccgtggaaaggcacttagtaatccttaaaaaataacttgggaatctttgcgagtcttttcggtctatattcattttctcatcagtcgtgtgcgtccagcacactccttcttctaaaatgaatctatcctcgaaaatccatcacaaatctctaccaaattattttttaacgcttacttaaaattatatgcgtatgaaacataacttgttgaatgtcacttttatagtggtggcaatactattttttggaacattgggtatgagtgcatttttcagaaaagacaagacgaagacgtctcctgacaaggatggtcatgaactgactgaactatggtccgactggaacgctgcggttcagcaggacagacctaaacgtgaagcggaaattcttgccgaaatacgcaggcaggctgaaaaaaagaggcttgcctgggatttttatgatgcatcccgtaaatatgtggaagttgtttcatcccgcgattggaaacttcgggactcattagagacggagttcggaaagaatgtcggaaagttcgatgagccgatagtcagtttcgcttatcgtgcagaaaagtcgggtgctgatcctgactcgttgttcgactatgtccaggccaatgccagacatctgaaagccagtcacaatagtgctttctataatcatgtccaggtctcacgatataccggttttttcggaatcaatgcttctttccttaagcattttctggccaatgattatgagtatgccctctggaccctgcttccttatacgtcgctctcgaaaatagatgaaggaaaaatctatgaggcgcttaaggattatgaaggggagtcctatcctctcagtgcctatctggaatatctggccattcctgaagataaagacggcaataggcaaactcttggtttgcaggcatttgtagataagtatgcaggcaaggccatatcgatgtgggcgaagtgcgatatcatgagacttcgctttgccgctatggaaaaagataaggcttcaagtgcttcctatgagtctttctgcaaggaatgtgaggcgtttgaggaagagcgcaagggtttccgcggcgatgaggccaaggttgtttcggaacttggttacgtcaggaatgtgctgctccgcaatcttacggaaaaacatatcgggctcgatgtcgagaacggaaaaatcattgtaagccttaagaatttgaagtcggtgcgtcttacgatggggctttccggtggtaaggactttgtcattgataagaaactggagaatgggacaggcagtttctatttaagggatactttgatggtggatattccggaattgaacgacggcgactatatgattaatgccgtttccggcaaggatatcagtaattatatcacttattcttcatcgcggatttctctggcatcgcgtgcggataaccgcggaatctgcatctatgccgctgattatcagacaggtgagcctatacgctctgctgacattgaccttaagaaaaacggcaggccggtggtgtcctgcaaggggtttgtcttcgacgggttcactccgcttcctgaggatatggccgccaagataaaaggcgacacctattatactctggagtgcagtttcgtcggcaaggacgggctcttgaggaagagtgaggaactgtcgattggcaggtggagtccggaaaaagactcgtcgaaggctgcgtccaggatgcagaggcgtggcgaaatcttcaccgaccgtggcgcgtataatccaggagataccgtagatttcaaggcgctcatatatttcaccgacggaatcaatgtcgccaaggtctcgcctgccggcgcaaagtataaggtggttcttgtcaatgccgaaggacgtgacgtggagtctgtcgatctgactaccaatgagttcgggtcaatgtcagggtggtttgttcttccgaagggcgagcgtaacggtgattttaccatccgcgtcgttacggattcggaaacggcggtttcaaagtcaatccgtgtagatgagttcgttcttcctacgtttgacgtgacatttgatgacattgacaagcaatattttcctggtgacgaagttgttgtgactggaaaggttacgagttattccggtcatcctgtcgcatccggcaaggctgtttatgaagtcggaacttattggaataacgtcggttccgggcctctggaaattggtccggacggagcgttcatgattaaattcaatgctgaggatgaggattaccgtattctctataaagtttccgtaaggattacagatgatactggagagacccacgaatacaacaggccagtgctagtgtttggaaacataagtgtcaatgctagtattgtcaatgcagccgatggaaatctggaactcattgaaaagcaggctcctgttgcctctccttgggctcgccggcctcaatatgaacaggcggtcattctcaaggaagatgtcgcttccgtcagattcgctttgaattcgactgatggtgctccggctcccgggcggatatcgtatgatatcatgaatgagtccggaaaactggtcctcagggcagaagccaagtcgggagcgacggaaagcattgatgtaaaatcttttgcatccggcctttatacgctgaaggcgtatgcctcggcgaagagttcttccgggagggagtacaaggatacgacgacgctgaaggttcttcttgtccgtgaaaatgacaaggtcctgaatgctccggtgaagaatctggctgttcctgtcactactgaggtccgtgatggtggacgggctgaactgctgttcggcgcttcggatggtgctccggtatgggctttggcagaggtcttcgatgataagtccggcctgttggagactagaatggtcaggctttccggtgcccgtggtggggatggctcgctggagaggctttacttcgactacaagaaggaatatcctgatgccatccgtgtccagattttctatttcaaggattccaaaagcgtgtcatgcgattttgaatatcatcgtgtgtattctgtgcgtaaacttccgctttcgttctcttctttcgaggacaagacatggcctgcttcttcttatacgttcactgtcaagacgttgcctggtgtagagtgtcttgctgccgtgtatgacaagagcagcgaaaccatcaggaggaattattggaggacattcgaactgccaaggcccggcactcgtgttgtgtatgtcaatgcctgtccgggaagtgtgagcggcggttctccgttcgacggggattttgttctcgatgaggaatctgtcgtggcttatgggatttctccgaagaggttcaagactcgtgcggcaatgtctccggccatggcgaacctttctgtcgagagtgctgcgatggaggacaagatggatgcgggggagtctcaggaatcatccggcgactctcctgccatgcctgatgtccgttctgaatttgctaatacgttgacattccagcctttcctcaggtccgacgacaagggcgagatttcttttgctttcaatacttcggataagttgtccacttacgtcgtggcgctttatgctcataatggaaggatggacaatgcggctctccgccgtgagatgatggttactatccctttgaaagtcaatgtcgtggagcccaagtatctctacgagaccgacaagtggaatctttctgctgctgtctcgtctgtcgtggagcatgacatcagtggaacattgaccctccgtcttttcgatggcaaggattacgaggcgttgaaggctgtggggactgcccctcttctcgtcaagtccaagagggttacggttcctgcagggaagtctgtcaatgccatgttcgaggtctctgttcctgagttgggaacggatggtaaactgcctgagaatcttggggttagcctggtctttgtcgcagacgagggtgaagatgtcgccttctcggacggactgttcgtaagtatcccagttcttgcagccagacagcggattacggagagccattcggccgtgctccttgccggtatggataaggatgccgtaatcgccggtctccgcaatcagttcgtcaatggctccggcaatgatgctgcggtcaatgtcatcagtatcattgacatgatccgtgatgctgttccttccaaggtggagccggaagacaaggatgtactttctctttctgaggcgatgtacgtgcgcgaactttcatacagtctcaaggcattggcccgtaccgagcctgtggctcaagacggcatgtcagacggggagttgttctccaaggtttttgcctgccataatgccgatggcggttttgcctggttcgagggcatgaactcttctccggtaatcactgcagttttgcttgagcgctttgcaaagatggttgcgggcggttatctcgacggaactgcctccgtggcttccgatgcggcttcgtgtgctgatgtcaatgctgtcctgtcttctgccgtgcgttatttggataagaaccaattcgcttccgccggatgtccgttctggtgcggcggaatttcggatgaacaatatatgtatgtccggtcaatgttcccttctgttcctttcaatgtcaagttgccggcaggcaaggatgtgcaggagcgctacgcggctttccgcaaggctgccaaagcgtatctcgtgccggatgcagcacgcggactgaatggttatatcttggctaaagtacgtagaatcagcatcttgcgtaatttggcttcgtctaaggacgggttggctctggccaagtcctggggtcttggctttaaggtagacaagaagttggtcaagtctgtcaatgccgacgtagtttctctgctcgaatatgctgtagaccacaaggatggcggcgtgtattatcctaatcttgtgatgccgttcaggggacttctcgagagtgaggcttatgcccattcgatggtctgcgatttgctttccggctatgcggctgatgcttctgtcaatgctgcttctttcggatgcaagcctctttcttccaatgataatgtcaatgtctccgaggctcttcgtgtggctgacggcatccgtctctggctcatgctccaaaaggagacccagcactgggattccgacccggcatttgtggatgctgtcaattcagtcatgaacggcagcccggcattgaaatccaccagtgtcattgtcctgtcaatgtcaaattcagttgatttttcttcggtcaaggcttccggcaatggtttctcggtcagcaggcgtttcttccgtgaagttgtttccgcttccggcgactatgtccgtaaggaaatttcttcaggagaattgctccatgtaggtgacaagattatagccgagtattctatccataatgatgagaaccgcagttttgtacgtctcactgtccctcgtgaggcatctctccgtccttctaatcagttgtccggcacttacggctggtggatgagtcctctccgtgtcaatggactgtattctgttgtacctcagggttatagaaatgtcaagagtgctcagacagagtattggttcgattcttatccggaggagaatacgacaataaccgaggagttcttcgtcacccagtccggcaagttcacagccccggttccggtcatcgaatccctctacgcccctcattacagggccaatggtgccttcggcggtgtgcttgtttctgagtgaattttttgtgcgaagtgctaaaaacatcacaaaaagtttgcagattagaaaaatagtagtaactttgcattcccgatttgaaaacgggatgcttgggagcatagctcagttggttcagagcgtctgccttacaagcagagggtcgggggttcgactccctctgctcccactgaaaaggatagctgaaaagctgtccttttttcgtatcagtttctgaaaacgttttattatatttgtatctgctaagaatttcttgcttctgacgcaaaaaaagacgaggaattgcttccccgccttgaatgttttcacaacggaataatccttattgtgatttgcttcagatggtgcaaaattaaaacaatttatagaaaaacaaaaataatattcatacttatgaagaagattctcggtttggatttgggtgtgggctctgtaggctggagtgttatatcatgcgatgatgagcacagaccattggagatattgggcatgggtagcagaatcgttccgcttactcctgatgagtcaaatgagttttcatcaggaaatgccgcttccaagaatcagagcaggacccagaaacgtacggcaaggaaagggtatgaccgttatcagttgaggcgtcaggcattgacagtcaaactcagggaactgggcatgttgccggatgaagcattgataaaacttccggtactggacttgtggacacttcgggcacgtgctgcaactccaggagacaaactgtcattgccggaaataggtcgagtattatatcatcttaaccagaaacgtggataccgacattctaagcaggatgattctgcagataagactcagcgtgactatgttcaggccgtgaacaagcgctttcaggaaatcaaggatgaaggtcttacgataggccagcattttgctgaaaaactaaaggagagcgaaataatcacagataagggtgcgttctataattatcgcataaaagagcaggtttttcctcgtgctgcctatgtggaggagtttgacaggataatccaatgtcagagggaattctatcctgaagtgtttactgaggcaattgtcaatgaaatcagaaatgagataatttactaccagcgaccactgaaatcgtgcaagcatcttgtgtctgtatgcgaatttatgcaacgcgaactgtttgatgctgagcataatcctataagaaacgggaagggcgaaatagttgttgcaggacctaaatgtgctccgaaatcttctcctttggcccaggtctgcaaaatttgggaggaggtaaacaatatcaggattaccaacaaggaaaatgatgagtttttcatcagcattgataataaacatgagatatttgattttctgaacactcatgaaaaaatgaaggccgatgatttgttcaagattcttggccttgcaaaaaatagcggatggtcagccgatagggccatgagtaagggtatggtcggaaataccacgagagtggcgttgatgaaggctttgaagggaagacgcgatatcgatgaaattctgcggtttgatctcagggaggtggaatccaatcaggtcaatgctgatactggcgaagtcctgatggaaataggtgccgagtgcgagagtgagcctctctataggctttggcatataatttattcaatatcagacaagaatgagcagaaggctacattggagaaacagtttggcattactgacgagtcgatgctggagtcgctgtgcaggattgattttgtcaagcagggttattccagccgttcattcaagttcatgaggaagattcttccttatctgatggatggggccaaatatagcgaggcttgtgatgtcataggcgttaatcattcggacagcatcaccaaggcggagaatcaggccagggaattgttgacgagattgcctcagctgcagaagaacgaacttcgtcagccggtggttgaaaagattctgaatcagatgattaatgtcgtcaatgctgtcattgacaagtatggcgctattgatgagataagggttgaaatggctcgggaactgaaattgagcaaggcgggacgagagtctgctgcaaagaatatccgtacgagggaaaaggccaatgaggagattgctaaaagaattgaggaattgggtctggttccgtcaaagaacaagattcttaagtacagattgtgggaagagtccggtaagcgttgcttctattgtggccagcctgtgagtgcgactgaatttctcaatggtttggatgttgagattgaacatgttgtccctaaatctcttctgtttgatgattctttctcgaataaagtctgcgcttgccgtaaatgtaatgcggaaaagggtaatgccactgcatttgatttcatgaagggacgtggggagaatgcttttgaggattatttgaagcgtgtagagacggcttttaaagaaaatagaatcagtcagacaaagagaaataggctccttactcctgccgacaagattccgaaggacttcatttccagacaattggtccagacccaatatatttcaagaaaagcgatggagattcttaatcaggtttgcaggaatgtctatggctcaagtggagatgtgactgcatatctgcgtcgtatatgggggtatgacgagatactccattctttggatttgcctagatatcgtgaaggtaatcttaccggggatgttacttatgtacataaagggcagacacatactgaagaaaggataaaagactggtcaaaacgtctggaccacaggcatcacgccatagatgctcttacaatcgccagcacgaggcagagtattattcagaggctgaatactttgaatgcaaagactgccattggtgaggaacaaatttcattggacaaatggacattggcacaggctcatttcagtgtggctgatgttgctgaccatgtggcagatattcttgtttcattcaagtctggcaagagggttaccacacctggaaagaggtatgtttacaaggctgggaggcgtattgttgctcaggaaaatatccttgtgcctaggggcgctctgagtgaggaaagcgtttacggcagaatcaagagcatagaagagaaggttcctgtcaagaaattgttcgaacgtgtggatgatattgtcaagccgaggataaggtatctgattcgtgagcgtttggagacgtgtggtggagattgttcgaaagcggtgtcgtcgctcaagaaatcaccgttgtatctggatgaggaaaatacgattatgcttgagtatggcagctgcttcaagccggagtatgtcataaagtattctctgaattccatcaaggcgaaggatgcggtttcgattgttgataaccatatccgggaggttgtgactgcgcgtcttgccgctttcggtgatgatccaaaaaaggcatttgctgagcctttatatgcagatggggccggtaaaattcagattaggactgtaagatgctataccgggttgtctcaggtcgtgccagtcaagaaagatgctgacggaaatgatatcggttttgtgaaacctggtaataatcaccatattgccatctataaggatgcggatggaaagtatcaggagagtattgttacattctgcgatgccgtagagcgtaagaagtatggaatcccggtggttgtaaggaatcctgctgcggttctggatactgtcattgacaaaaatgttcctgagaagctggctggagggctgccttctcctgaatggacgtttgttatgagtatgcagcagaatgagatgtttgtgcttggaatgggggatgatgagttcaatgatgcgttggccggacgggattataagtctttgggcgagcatttgtatagggttcagaaactggcaacttcagattatttctttaggagccaatatgagacgaaattggatgattccaagggagcatcagccatgaggaagttttttaggacggcgagtcttaaggcattgtttgctctgaatccgcgcaaagtgtccatcagcctgcttggcgaaatttcattgaaagatgattaagcgttctctgtacttcggaaatccggcatatctgtcattgaaactcaggcaacttgtcataaggaagcctgaggtgaagggtgatatgcctgatttcgacgatgcggggacgtatagggaattcgtcaagactattccgatagaggatatcggcctgattgttctggattgcccgcaaattactgtcactgagggacttttggaagcgttgctggaaaataattgcgctgtggttacctgtgacaaatcgcatcttcctgtggggctactgctgcctttgtatggaaataagattcaggcggaaagatatcaggagcagatcaatgcatctttacctctgaagaaacagatttggcagcagacggttcaatgcaagatacggaatcaggcggccatgctgaagcacgttaccggacaagaggccaaaaatatgttgatttgggcggattccgtgaagagtggagacgccgacaatctcgaaggtcgtgcggcggcgttttattggaaatcggttttcattgacaatccgaaatttacgcgaatcgatgacgatattgtcaatgcaatgctgaattatggttatgcgattgtacgcgcaatcgttgctcgtgctctggtgggggcagggcttattcctacggtcggtgtgcatcatcataatcgctatgatgcatattgtctggctgatgatataatggagccttacagaccttacgtggacaggctcgtgattgatattgtcaatgccggtgttcctgaggaactagatgtcaatgttaagcgtgtcttgctggaacttcctgtcaaagaggtgattatagacggcatccgtaggccgttgatgctggctgtgagccagactgtcaattctctgcaaaagtgtttttcaggcagttcccgtaaagtcatatatccttctatgtgatggacaggttcagcgagtatagaattatgtgggttctggttttcttcgatcttcctactgataccaagaaagagaggaagaatgcagccctcttcagaaagcgtctgatagaggacggctttgtcatgttccagttctccatctatatgcgccactgtccgtcatctgagaatgcccagactcatattgcccgtgtgaagtcctttttgcctgattatggtcaggtgggcatattgtgcatcacagacaaacagttcagtaatatggagttgttttctgaacataagccgaaagagtcggaggatatttatatccagcttgaactcttttagtttacctgaagggctatgcacaatcaattaataagccccgctccacagggcagggcttagatgaaaagtttcaaaatgaatcataaccatcttctcgcatgcccctgacatagaaatgaaaggcttctacaatatttcttttaaagtctttgttgttgtaacgcatgcgatatttctatctgcaggggcagctattctgagtggcgatatccctgaatcttattccatttgccgcgggtgaagtcaggcacgaggacaggtttgctgccattctcgatggaagcggcggacaggtcaccgatgcaggaccactcggcggcatcgtaaacatccatgtcgagcggcttgccgtttcttaggcaccataccagacggtaatccatgatgaaatccattccgccatgtccgcctacagactttgctttctcttcgatatccttgacaataggactctggtacttcttcaggagttccttatatacatctccggaaacgaaagtatgtgcagagaggttctcgaaatccacatcgccgttaatctgctcaggttcgaacgcgaatcccggacgaggatacttttccgcatatcctttcgttccgacgacctggtacatcctgtcataaggacgcggagtatagacattgtgctgaagaaggatggtcttgcctttggcggtatgaatcattgtggaagtctggtcgccattcgcgaatgtctcagctcccatgttcttcttggctatttctagaccggcaaccgaaatggttgccattgaaactagatagtccatcctgtcaccgcggtgtatgtcaagtacctgacaatcaggtcccaaaccatgggtggcataaacatcgcctgcatgtgcctggtcaaatgccagacgccaattgtcgtgatatttgtcccaaaaatccgaaagattatgaatgtaagagccttccgtatggagtacctcgccgaacagtccctgctgaaccatattgagtgtggtgtgttcatagaaatcatacacgcagttttccaacatcatgcaatgcctgcgtgtctgctcggacacatcgaccagctgccagcattcagccacggaagttgcagcaggcacctccacagcgacgtgttttccatgctgcatcgcgtacactgacatttctacatggctgtcccatggggtgcagatatacacgagatcgatgtcgtcacgttcgcagagcctcttccaactttcttctccgaaatattcggcagcagcaggctttccggcgcttttcagaatatcctgtgacttctttacgcggtcttcctccagatcgcaaagcgctactgtacgggttccgtctatatgggtgaaacgagacacggcactcggtcctctcatacccagtccgatgaaaccgattcttacagtgtcaatcggatccgccgcaaactgtagcatatcttgctgaccagcagccggctcaggctcattgaacacaatgactccatccttgatcttgtaatttttcccatccttaccgcagtctccgttgcacccggacaatattgctgccgtcaggactgtcaatgccaaaagtttgtgtttcataattatctgattgtttgattattcttctaaattaattagtgtttggttaaaaattatacatgtctttgaaaatattgggaattaggtatttacaaagttttttggtccgtgatgatttgagtcattcttttgtacccacctctttgccttctttgcgtcctgctacacgtccctctttgtgcccttctttagcccttcctcacgcccgctctcatgtgcgtacttaacctgattgtatgtgtccagctcagtattcagggccttaatgtaattgattctgtcctcatcgtcaagctgggcgaatttcaggatgatgtgaactaattgctatgcatagctcagttctttcttcagcttggatacctcttcttctgagagccctgtggcctgagtgataatctcatgagaggccccgagtcgaataagattcatcgcgatcttcgattgtccctctttgagccctttttcacgtcctttctcacgccctctctcatgcgcgtactcaatctgattgtatgtgtcccgttccgtattcatggctttaatgtatttgattctgtcttcgtcgtcaagctgtgcaagttcctctacatcttaggaatcaatccggtctaattcagaaatctccttttctgtcagacctgtcagttctgaaattgtctcaatggcaattcctttttccaacattcttttagcaatgtcgaaactcttctgttttgcgccttcctcacgcccttcttcacgtccagtctcacgcgcgtattcgatctgattgtatgtgtcccgttccgtattcatggccttaatgtaattgattctgtcttcatcgtcaagctgtgcaagttccgctacatcaaaaagcttcgtgaatatcctgtctctcagtctctccggacgctccagcagattggacatgttcttcaacagatagagccacttgtccaagtccgtctccagttcatcctcacccttgtcgaacttctccacctccacgaaaacaaactccagtttgtccgtcatcagctttttcgaagtcgcctccattagccgataccggtgctcggtcatctcgtcatcctcatacttgaagttcaggattcccagaaagaaaactccatccagactgaagtcccacggcctgttcccccttgcctcttcggccaatgccttctttccctgtttcattatcgggaatgaagtgtagaacagggccctctcgaagaagtgcttctgataaccgcgctgcatctccacaagaaacgtctttccgtccacggtcctgcacagcacgtcgaagattgccttcctgtcatcctccatgattcccaactgctccgtcggaacgtatgtgatgtccgatattgcgtactgcgggaaaatcaccttgaggaattcgatgagaatgtccttgttgacttccgtcccgaaaatctttttgaagctccagtcgaccatcaggtcgatgtacttgctctcgctcccaaccttgactaattctgtcataaaattaagtatttattcttttaaaacaaattgttgacattgacatgcgccgttatgaaccggctggacatgcgtcaatcaaggttgcaatactatataaaattttcgcgcaaaacccgaaaatgtggcgaaatgccccgaaacaggcgggtggtttcaaaagatttttatgattcttaactttttgtgatgatttttaaattcttgtgccttcaaaaaccacttttgaaatcacaagaatttgggacatgttatgccggcaggggccgtcggagcggtacgccccgttggggctatccttcccaccgctaccgcggcgggcccctgccggccagtcatgtttggatggcgaatatttcaatgcctgtccatgccaatatgacattgacctgaaccgaataaatgacaaatgatacctaggcaaattacgatgtaactcgacaggcagaaacgcgcttacaagacatgtcaacacggaaaagctgagttgtttagctcgtcgggacaaagccctttgattttcgaccctcttgacaaccgcaatccgatgttacgtattaattatcagaaagttagctgattaaaagaaagccaagaggtaggaatgaaatggggtcttggcaggagcatctcgttccatatcagcatgtaacatattggcatacaatatgttacagtcgtgagtccaaaactgacaaatgtcaagagggtcgaaaattattcacatacccgaaaaacaaaagggccgaaacacggcatagacagcagtctggagcgcgcccttgaagtgttcgaacagatatcggaagacatggggcaaaagaaaactccggagatactgagccagacagaaggagaccgtctcaaaagtcaaacattcctcagcgagaatcaagaattcgtcttaggtcttgtagaggagttcggagtactttagtctcgcaaggaattttaagacagtctgatgagttgagtggagagccgcccgcgatttctttcaaaaattatttttgtggagcacgttccctgatgttgtgatttgctttcagattttttaactttacggatatacacaacacgtcaatttatcgcctgaagaaataagccgttgtgatttgctttcagattttttaactttacggatatacacaacactccaaaaacttgttggagaaaacatcagttgtgatttgctttcagattttttaactttacggatatacacaactccccttatttcttatagatctaccagttagttgtgatttgctttcagattttttaactttacggatatacacaacacgataggacaagggtagtcgttaggatggttgtgatttgctttcagattttttaactttacggatatacacaactcacggcctgtgccgagcatagtctgcaaagttgtgatttgctttcagattttttaactttacggatatacacaac

SEQ ID NO: 904 - DNA, 17018 bp, synthetic construct
  source 1..17018: mol_type = other DNA
  misc_feature 1..17018: note = Synthetic
cgtctttgcggaaccagttcacattgaagatttttggcaatgcttccggtttgggtgcatttttaccaattgtcagccaatgtccgaaataatcagccatattgtatccacagaaaggaagcatggcaaatggatccctgcgcacaccggctttcaggccaatggcagccgcagttacttcagaccctactactgaacccatgaaagtaccgtgagcccagctcattgcctggtaaaccagcggaactgtgttcgggcggcgtccgccgaaaaggatcgctgaaattggaactcccttcggatcttcccatgcagggtcgatgcagggacactggaaagcaggcgcagtaaagcgtgcattcgggtgggcagcaggtttgccggatgccttgtcgtatacttcgttggtccaggtgatagtgccagctggacattcagaaccgataccttcccaccagatgtcgccatcaggtgtcaatccggtattggtgaaaatagtatttgaggcagctgaaagcatggcattcggattggtatccatggaagtaccgggagcaacaccaaagaatccggcttcgggattgatggcatacaactgtccgtctttcccgaatttcatccaggcaatatcatctccaacggtctcaactttccatccaggaatagttgggatcagcatggcgaggttggttttaccacaggcgcttgggaaagctgccgcgatgtatttttttacacccttcggactggtgatgcccatgatcagcatgtgttcggccagccatccctcttcttttgccatggcagaagcgatacggagcgcaaaacattttttacccagaagcgcattaccaccgtatccgctgccgaatgcaatgatctctttggtttcagggaagtgggtgatgtatttttgatcaatcggagcacatggccatttcacatccttttgtccgggttgcaatggtgcgccaacagaatgaacgcaaggaacgaattcaccgtcgccaaggacatccaaaactgcctggcccatacgggtcatgactttcatgtttacaactacatagggagagtctgttatttcaattccgatgtgagcaatttctgagccaagaggtcccatgctgaaaggaatcacgtacatggtacgtcctttcatggctcccttgaggagtcccttgagggtggctttcatctcagcaggggcagcccagttattggtcggacctgcatctatctgtttttctgagcaaatatatgttctgttttctacacgggctacgtcacttggatctgactggaaataataactgctcggacgttttttctcatccagcttaacagccattcccgaggcaaccatctcagccatcaggcgatcattttccttttccgaaccgtcacaccagtacacattatcaggctggcaaagttcagcccattcgtttacccaactgattaatttttgattgtttgtcatgaatctgaatttaattttgaatctgttctatttatagttccagtaaatctgaaaaatttttattgacctaaataatcctggcaagcggaatgaatgttctccaccagttgtgcaatcttcgcttcgggaacagccgagtaggcgatcctgatcagatttccgaagacgattactccggtactgtacttatccagcaggattttgcgtacgtcctccgctatcaggccatccttcaattctatacacatgaaatatccagaattgaatggcaaagcagaaaaatagcggttgtattttagatcagccagcacggatttgatcttctcatacctggaatgcaggatattgaatttctccaacttgcttttttcgtaattttcagatgaatagacagcttgaagcaaggattgcgaaaggtgactgatattggaaatatttccacggaccgcaccggctgtcttattctccaaagcttcatatactgcagcggttccatttttaattccaaaagtgatgaatcctaccctgaaaccccatacgtagtcctctttggtcgcaccatccagttttactgcaagcacgtttccgctcagggtggccagtccgttaaagattgattccgtgtagacccctttctcatacaccagcccgaaataggcatcatcaatcagaacaacgactttcttccctttgtcagcctgcatcttgatcagcgcgacaattttttcaatttcgctttcgagcggggtatatccggatgggttattgggaaaattcaataccaggatgatctttccggatgatttttccatcttgtcctcgagtccctggaaattaaaacctccgttatgaaacaacgggaaattttcgatctttcccagatagttgttttcgaagataagggcgtaattttcccagtacagatccgggacaatcactgtatcaccttcatcaacaaaaagataggccgaaatgcttaagccatgggtaatgccgtttgtggcaatcggaagactgatggctgtatcaccaagggaaggattcttcttgtatataaaagatttccaggtagcccttaaatcaggtttaccgaaacttggagcatatgggaaaacggatgaatcgggaagattgatcatctggtcaaaatcagagagatgcatcggatgtccgttgtcttcaacagcctcaccgatggtggcattgatctccttacctttcgcctgagccgattgtgccaaaatccccaatttcgggaagaaaatatttttccctctttcagaaagtaattcaaaaatagaggggttgctcttttgaattacttcgttcaatgtgattgcttgtggatccacttagtagaagattaattaatttaaaatgaacttgattgcaaagttattcaaaaaaacagagtggattcgcgaacgcaatcatgaggatcaaaacttaacgatgaattaatgtttttgggtattggacaaagagaagggcgctgatttcgacagcgcccaactctaaaccacttaaccttaaaaaaaaaacaaattcactatgctctaggatgatatttattgactgtttccttgagaaattccttgtccaaatgagtataaatttcggtagttaaaatagactcatgccccagcatttcctgcactgcccgaaggtctgcccctccctggacaagcgcagatgcaaatgaatgacggaatgtatgcggacttatgctcttttcgagtttaattttctcggcaagatttttaatgatggtaaatatcatgacgcggctaagtttctttccccttctgttaaggaaaaggatattttcgctctgcttgtcaattttcatcttttttctgtaaccgacaatgtattttttgatttcattgatggcacgtttgctgattggaaccaaacgctccttctctccttttcccgaaattttaatgaattcctgctcaaaatgcaggtttgacacgcgcaggctgacaagttcggagactctgagcccacagcagtaaagcgtttcaaggatggctttattcctgagcccctcaggcttgttcaggtcgacagaatcgataagacggttgatctcagcgtcagtaagtacatcaggcaatttgcgccctatctttggcgactccagcaaggtagtcggatcattttcaactacctcttcaattaacagaaatttataataggacttgattcctgaaattgtccgtgcctgtgtccttgggcttacccccttttcattcatccattcaacgaactttctaagttgaacaagtttgaccgtatcaggagaggtcgcaggataatgctcttcaatgaatgtgataagtttattgatatcattgacatatgcactaactgaattttgagaaagagatttttccagtctcaaaaaagtctcgtacccttttttgctttctgcccagttcatggtgttatttttaggttgaaacaaatgaaaatcaaatttgtttggtgaatctgcttattaattagtcagataaaccataaatttatattatttatggcttacaatcaattatttttccgaatttcggtgaatctttacgtagaacaatcaggaatactcagaagcaacgacagaataatccaaggatgaaatacccatgatttggagttcaatgaccgggatgataacaacctcagggatattccatgtggccattaaaaaacaaattattcgcacatgaaaatcagtattatcaacgggccaaatctcaatttactgggtaaacgcgagaaaggcatttatggaaacagttcatttgaagagtggctcgaaaaaatcaggcctaactatccacaggttgaattggactactatcagtccaatatagaaggggaaattgtttcctatattcagaaagttggtttctcggcagatggtatcgtgctcaatgcaggagcatactcgcatacctctgtcgccatcagggacgccattgcggcagtgaccactcctgtggcggaggtgcatatctccaatatccttactcgtgagtccttccgccatgaatccatcattggtccggtttgcagagggagcatcatggggttctcgcttgattcctacaggcttgggatagagagctttttgaaacctgatctcggctgattcagtcttaaattctaaaacatgttcaattaaatatgaagaaaagtaaactcacaaagatagttgctaccatttccgataagaactgttccccggagtttttaaagtcacttatggaagcagggatgaatgtcgtcaggattaacacggcgcatcagaccacggaatcggccatgcaaatcattgacaatgtaagggccgtaagtgacagccttgccatcctggttgataccaaaggaccggagatacggacaaagaatatcatcgatccggtcaaaatcaccaaaggggaacgaatcaccatttcaggaggagatgcaccatctggtgaagggcacctgactgtcgattatgccaattttacccgcgacatcccggtaggcagttccgtactgatcgacgatggcgaactggaattgactattgttgaaaaaaaggacgaccaactggttgcccttgtcggcaacgatgggtttatcaaaaacaggaagagtatcaacgtacccggaatctccctgaatctgccttccctgacggagaaagacaaatctttcatccgctgggcagctgccaacaacctcgattttatcgcgcactcctttgtcaggaacaaggaggatgtgattgccgttcagcaagttctggatgaggaaaacagtgccatcaagattatcgccaaaattgagaatacggatggagtgaagaacatcaatgaaattcttgaccatgcttatgggatcatggttgcccgcggtgaccttggaattgaaatcgcggctgaaaagatacctgccattcagcgaatccttatcaggaaaagcgtggaaagaaagaaacccgtcatcattgccacgcagatgctccacaccatgatcaccaatccacgaccgacacgtgcggaggtaagtgatgttgcaacagccatcttcgacaggaccgacgccgtcatgctgtcgggagagacggcttacgggcaatatcccgtggaggcagtgcaattgatgacgcgggttgccctggaggtcgaatcagtaaaggacaaaaggaacgatttgcctgttccgcgactcgaaaacgaagtctctgccttccttgctgaagcagctgtgatgtcggccagtgaactgaaagttgcagccatcattaccgatacgcttaccgggaaaattgcgaggtacatctccgctttcagaagcccaagaccggtctatgccaaatgccattcaggaagtgtaaaaagacagcttgccctctcgtacggagttttcgccagcgaaattgtcgtcaaaaagaacaaatacaaactggttgaatcctccctgcttgatttggttgacaggggattcatcaatgaaaatgaaacagtcgtatatgttggcggaaattttggcgtcggaggaggcacttcatttatagaaattgcttctgtatctcagttgatgcaccagaaagcacaaaagaaaattaaaaattaaaaattaaaaatgaaaaatggaagaaacatttcctccatttttaatttttaatttttaatttttaatttttaatttcttacctcatatcattgatctcgacacccggatatttcgacttgtcaaacttaaaaaagtcgtctttcaaatcgatattggtcttcatggtcttcagcacaagggtataggtatttccatctttattaaaggtctgtgcctttgcaatctgagactttaccttgtcgatatacagcctaaccttgacaaattccttggtcttgtcgatagggaaaagatccagaacctgaacggtcttcccggcaaaattctcttccccgatgtaggtgaaggtatatcccttttcataaatcgtaaaaatattggccgggtttagcgctccttccttttcctcctcaacagttgaaatattgcactccttagcctctgtgaggtaactccaggttgtggtaccatcgcagaaaacctccatgctgataggaaccggcatgtgcagcctgtaactcttccctttcatcgaaacctccccatcattggtattgttgacattgttcttcttattctccagggtaaaagaaaaatcaatctgaatggtcttgtaactcctggtggtcacggaaagtttatccagaatctctttcgctttgggatcctgctgggctactaacccagatacaatcaacaacaatgcggctgcaaatgcaaatcttttcattttttctgtctactatttattttttgttcctttttactttctgttacaggttacaggttacaagttgcaggatacgggatatgcattatatgcaaatttcgattaaagcgttctttactttatcctttagcctttttcctttatcctttattgcggaagcttccgcaaaatctgttccaaactattttcgtcctgaatcaatacctcccttgccttgcttcctgcattgaccccaacgattccggctgcttcgagttggtccatgatcctgcctgccctgttgtagcctatcgaaaactttctctggatagacgaagtggagccggtttggtttaataccacgatcctggcagcctcgtcgaagagctcgtccctgtttttcagatccatttcatcgttgctttcagaactgtcgctccggtattccggcaaggcgaatacgttggggtaaccgggctgtttcccgataaaattagcaattgcctccacctcgggcgtatctacaaatgcacactggattcgcgtcagcacgtttccaatcgagacaagcatgtcgcccctgccgatcagctggttggcccccggtgtatccaggatggtccgggaatcgaccatcgatgctaccttgaaggcgatcctggtagggaagttggctttgatcacaccggtaataatgttgatggaaggccgctgggtcgcgatgatcatgtggatgcccactgcacgtgccagctgggcgatacgtgcaatcggcaactctatctccttgcctgccgtcatgatcaggtcggcaaactcatccaccaccaccacgatgtagggtaggtacctgtgccccttgttgggattgagcctccttgaaataaatttcacgttgtactccttgacattcctggtctgggcggcttttaacaggtcgtacctgcgctccatttctatgatcagcgagttcagggtatctttgacctgctgcacatccgtaatgatagaatcttcacaaccttccatcttcgccaggaaatgcttttcgatgacagaataaaggttcaactccaccttcttgggatctatgaagacaaatttgagttgggaggggtgtttcttgtagagcagcgaggagatgatggcatttaatccgaccgatttcccctgtccggtagctcctgcaacgaggatatgcggcattttggtgagatctactacaaatgtctcattcgaaatggtcttgcccaatgccagcgggagctcgtaatccgattcctggaaaaccttggaggcgatcagagatcgcatggagaccagttccggcttgttgttcggtacttcgatccctacggttccctttccgggcatcggagcaattattcgtatacccagggcagacaagctgagcgcaatgtcatcctccaggttcttgatcttggagatcctgacacccggcgccggaacaatctcgtacaaggtgacggtcggtccggtggttgccctgatcttctctatctcaatgctgtaatttttaagcgtctgcaggattttattcttgttggccctcagctcgtcgtcggttacctgcggattgccggtggatctttcctccagcagatcgagagtcgggaaaacatacctcgaaagatccagggtaggatcgtaatcggcttcaggcatttcttcctcctcctcatcaggatcgcctctcctgcgcaacggaatgtggacaataggttccttttcagtggcaatgtatggttcttcatcaacaaatatctctcccatctcaagttccagcccatcatcgtcgggttcggcatagacgatctttacctcatcatcatcggtgactttcgaaaaggagcggtccttttccatcgtttttatgggctgtggagcagctgttaaatcggcggttgtcaattcaatttccttcttttttgggggtctccggtaggaaagaatggtacgtatggttccccaggcatcgtcaaaggcaacgattatgacaatcagcaacgaacccagcaaaacaaagaatgtaccaagcctgccgatacccgtaatcatgtgctgcgacatcaggaatccgtaggctcctcccggcagaatgggtgaattcttataaaaatacgccagcgaaaatgcaagtgtgatggaagcccagacaacaaaaaatattccgtagccaaaattccttgccagggaaactttgccgattttggccagccgcatggcaaaaaccatgaacagatagaggataataaaggaactgaatccgaatcccttgttgataaaccagttggccaggatagccccgaatttgccgccggagttctcaattttaatgttgggattggtcaggagttcgcgcatcgaaacatcgagatgactcacatccgctccatcctgcaacaggaaagagacaaacgcgatcaacaggtagatggtaaagaaaccaagcaggagcgcaaaaccccctttgatcttttcccatccggtatgtttgccgccccggctcccgcctccgttcgatcctggagcggatttctgttgattatcactcttttgctgagccatcgcctggtaattttgaaaagtcaaatttaggattaaatcggaacaaattgaagagggttcaagaaatatcaggggagagagtaagtgaccgggtgacttgaagctctaaatctcaatatccgaggagagagtaagtgaccgggtgacttgaagctctaaatctcaatatccgaggagagagtaagtgaccgggtgacttgaagctctaaatctcaatatttatttgaatcatccagtcacccggtcactatcaacatcctaaaaatatagcgcaaatgactggttgttttacaaaagtattttccctaactttaggtctctttagaaaaaacgtgatttgatttaaagtgatacctaccgcctaaatattaatgaagaaattttattcctccctcaactgctcatggctgagtttaataaccctcgccataaaattcccgctattctttaatcaaaacggaggtaacccctgtaaacaaacaaaggcgacttgcgccgccttaaatgttttcacaacggaataatccttattgtgatttgcttcagattgtactgccaaagtaataataattatcgaaatacaaaattaaatgaaaaaaatcttaggacttgatttgggagttgcttcaattggatgggcgctaataaatgttgaaaatgatatcccaactgaaattttaggcattggcagtagaataataccgttgactacggatgatgcgaatgagttttctacagggaatgcaatatcaaaaaatcaaaatcgtacaaccagcagaactcaaagaaaaggctatgaccgttatcaattacgcagaaagaacctgactgattttttgcgaaaatacaatatgactccaactgaagaattaatcaaactggatgtacttggattgtggggacttcgtgcaaaagccgcaaccgagcaaattacgctcattgaactgggacgaatactttatcatcttaaccagaaaagaggctacaaatctgccaaatcagatggtattgatgataaaaagcaacgggattacgtagcaaatgtcaataacaggtatggaattataaaagaacttggacaaactattggtcaatttttttatgggaatttgcaaaaagacgtccattatagaacaaaggagcaagtatttccaagggcagcctatgtccaggaatttgaatccatttgggatgctcaggctaaatactatccggagatattaaacgaagagaacaaaggcattgtaagagatgagataatttattatcaacgaagtttaaaatcatgtaaacatcttgtttcattgtgtgaatttgatatgcgagcctataaaaacaaagaaggtaaaacagtttatgacgggccaaaagtggcacctcgatcttcgcctctttttcaggtctgcaaaagttgggaaagcctaaataatatagttttgaagaacagaagaggaaatgagtttgaattttccctggagcacaaacaggctatttttaaccatcttgaaaatcacgaaaagttaaccatcagtgacctttataagatccttgggattaataaatctgaaggttggtggggcgggaaagctattggcaaagggttgcagggtaattcaaccaaaatgcaaatttcaaaagcaatcgaaggtcttgtggattatcagaacctccttcaattcaacctaaaaattattgataccaaattggttgatacagaaaccggagaaattatacagcaaattaatcctgattttgaaaaagaacctctttatcgtttatggcatacaatatattccatcaatgacaaagatgaacttgcaaatgtgttacacaaaaacttcggaattgaagaccctgaagctattgacgcattgtacaagattgacttcgttaaatccggttttgggaacaaatcatctaaagctattagaagaattttgccttatctccaaagtggattgatgtatagtgaagcatgtttggccgcaggattcaaacattcagaaagtttaactgtagctgaaaacgatgcaagaatattattaaccaaattacctcaaattagaaaaaatgaacttaaacaacccattgtagagaaaattctcaaccagatgataaatctgatgaatgcggtaattgatcagttcggaacaatagatgaaataagagttgaattggctcgtgaattgaaacagagtaaagatgaaagaaacgcagcggataaaaatatgcgcttacgtgaaaaagagaatgattatttcgccaagagaatttttcaggaatatggattggcggcctcgcgaacccgtattcagaaatttcgtatgtgggaagaatctaagcagaagtgtttttattgcggacaaacagttaacgtgcaggaatttctgcgaggttttgatgtggaagttgaacacattatcccaaagtctctattctttgatgacggtttctcaaacaaggtatgtgcgtgtcggaaatgcaatgcggagaaaaataatcaaacagcctttgattatatgaaatcaaaggcagaaaatgaatttgagaattatttagttcgcattgaagagtattacaaaaacggtgatattagcaaaacaaaaaaggaaagactccttaccacaaaagaaaagataccaacagacttcattgacaggcaacttcgcgagactcaatatatcgctcgaaaggcaaaagacattttagctcaggttgcaaggaatgtctgggctacaagtggcagtgtaaccgattttattcggcacacatggggatgggataatattctgcatgatctccaaattgacaagtacagaataaatggtcaaactgaaattgtggaatttaaccacaaaaatcaaaaacatagtgaggaacgaattataggttggagtaaacgccttgatcaccggcaccatgcaattgatgcattggtagtggcatgtacccgacaaggatatattcaacgcttgaataacctgaacactgaaagggatgcaatgtggcaagaattgaaaaatcaaagcgaagagcacagaaataaattcatgtcgctggaaaattggctaaatgatcaacctcatttttctaaagaactggttcaaaataaagtagcggggattctcgtttcattcaaaccaggtaagaaagctgcatccaccggaaaacgaattaagtatgtaaacgggaagaagattgttttgcaagaggggattattgtgccacgtgggtctttgcatgaagagagtgtgtatggaaggattaagacacttgaagaaaaaaaatccatcaaatatgtgtttgagaacccacaattgatattcaaaccatacatcaaagaattagttgaaaaacgacttgaagaatttgatggagatccaaaaaaagcaattgcttcattgacgaaaaatccaattaaacttaaggatgaagaaaatttagagtatgcaacctgtttcagggaggattatgttataaagtatccattacaatcgattacacccaaagatgttagttctataattgataagcacctgagagatgttgttaaagaacgattgaaaaaatttaacaacaacgaaaaggatgcatttaaagacttgcaaaaaaatccgctgtggttggacaaggatgaaactattcaggttaaaacactgcgttgcttcactggtttatcagcagtagaacctataaaaaacaatggaattggagaggcaatcggctttgtaaagcctgggaacaatcaccatatagctatatatacagacaaaactggtaaaaagatagaacattcggtaaccttttggagtgctgtacagcgcaaaaaatatggaattccagttatcatttcaaaccccatagaagtttgggatagcatttttgaaaaagacatttcggaaaacgttctaaatagcttaccactaattgattggaaatttgaagtaagccttcaacaaaacgagatgtttattcttgggatggccgaagaagattatcaaatggcaatcgaaaaaaatgatttaacattattgagcaaacatttgtatagagttcagaagattgccccttctgattacgtttttcgctttcatctggaaactaaattagatggctcaagtgatgctaaggaagtaaaatgtttttatcgaataaagagtttatctgccttttttgcattaaatccatggaaattaaaaataaactgtttaggtcaaatcactgtagctaaaaataaaccaatcatgaatgaaatgataaaaatgacttgaagttcatttttgattcagaagtgacctgaaatgagaaaaaatcctgtaactcctaacactgttgcaaaacgttttcgggaacttccgaaagcttcaaacagtgctgcaaaaaggtttcgggaagtccggagatttcatacaatgatgcaaatgggtttcggaagaaaccgacgacataaaatataatcttgcggtttttttatagttcccttattattaactatctaaattaaattcgtatgattacttcaattgatctggcgaaacttcgcaatgcggagtttctgcaatttggtgccacgtttacgggattggtcatggcgaacaatccggaagtgctgaatgttgccgcacaacaaacagctcttaaatcaaaattggccgaaatggctgatctcttcaaactggaaagggtgagtcccattacccaggaacttgtccagctggatgaccgccgcgacaaggcgatcaatggattgacggcagttataaatggttattgcaaccatttcaatgccgaaatttcaatggcagcaaatatgctgacagtaaatttaaatctctatggtgtcggagtagcccggctcaatacacaggctgaaacctcaacaatcaccggaatcatcagtgattgggagacaaaatccggatttactgcagcgatttcaaaacttggacttattgactggttagccgaactcaaaactgccaaccaattgtttgagcaaaagtacatccaaaggacccaggagtacggcgctgccaaccctgacaagcttaaggcaaaacgtgaggaagccatggttgcctattacgaattacgtaagtttattgatgccaactcagttgtcaatcccagtgccgcctgcgagaaattgatcaacgagttgaatgcattgattgatcagtacaacatgatgattacctccaggcccgtaacacctgtgccagaacctgctccggctgtctaaaacagcgatcaaacgatttgcccagtgaccgggtgacttcgagtcacccggtcacttcgggaactcatggaacgccaaaaaaccagttatgattcttgaacccaaccatatttatcatatttacaaccaaggcaacaatcgacaaaagattttcttcaaccaggcaaattatctttatttcttaaagaaaatcaaacaacatattttgccttttgccgatattctggcatggtgcctgatgccaaaccattttcatttgctcgttgtggtgcgggaggatcaaaccgttaagcctggccaaggaagtgaccgggtgacttggagtcacccggtcactggcccccccgcaacttcgccgctgaacaattccatcgctgttatgttacgttcttatacccgtgcaataaatatcgaacaaggaagaacaggttccctcttcagggaaggtaccaaggctaatttgataggcagcatgaaaagagagatgattaaatgtcaaaatcgtagaaaagcagaatctaatgatcatcgaatagaggaggaaaatgatcttcagatttgcttcaattatatccacaataaccctgtgaaggcaggattggtaacctttgccacagattgggaattttcttcagccagggatattgcagagctacgagcgggatcgctcatcaacaaggatatgatttcttccttagggcttaatgcgtgaagaagtgaccgggtgacttggagtcacccggtcactatcgtccccgatctctttcttccccacctctcgccaaaacctaaccaaccatatatgatcaaacgtaccctctacttcggaaatcccgcctacctgcgctttaaggatgaacaactcgttatcagtttaccagaggcatctatgttgcctgaaaaagatcggactgtaaccatcccgatcgaagatatcggcgttgtcgtaatcgaccatccgcagattacagtgactcattttctgatcaacgcgttgctggaaaataatgttgcgctgatcacttgcgacgaacgccatatgcccgcaggattgctacttcctctcgaaggaaataccacgcaaagtgaaaggtttaagcaccagatcaatgcctctgagcctttgcgaaaacagttgtggcaacagaccatccggcaaaagatattgaatcaggcagcgttgctcaacgagcagaaacggaaagtcgagaacatgaaatattgggcagatcaggtgaagagcggagacgccgaaaatcatgaagcccgtgcggctgcctattattggggtgaaatatttgatacatccatcgatttcaggcgtgacccggaaggtttagcgccaaacagtcagctaaattatggctacgccatcctcagggcggtggtggcacgttcgctggtgtcgtccggactgttaccgacctttggcatacatcaccacaacagatacaatgcatactgcctggcagatgacatcatggagccctaccgcccgtacgttgacaaaataatagttgggatgatgaatgcaggtgatatctctgaagatctgaccaaagctcagaaaacgagtctgctccaagtaccggttctggatgtgaccatcaatggtcgccgaagtccattgatgcttgcagtgcagcaaacaacggcatcattggcaaaatgtttcaggcaagaaatacgaagggttgaatatcctgaactttagactgaagcgagtgaccgggtgacttggagtcacccggtcactcgctcccggcacctaaaaggggaaaagatggaacgtttgagcgaatatcgcattatgtgggtaatggtactttttgatttgccgacaggaacaaagaaagagcgaaagatctatgccttgtttcggaaaaaattattgaaggatggtttcaccatgtttcagttcagtatttatctgcgtcattgtccaagcaaagacaatgcggaggttcatatcaaaagggtaaaatccgaattgccggagaatggccatattggcattttgtgcatcacggataaacagtttggagacatggagcttttctatgggaaaaaagctgccaccaaaaatgaagtggtgcaacagcttgaattattctgatattcaatcaaacagcataaaaaaaccggacgatgatccggtttttttatgctgaaaacaccttttttttaaattctaaaaatcaaaccaacaagcacatccccagtcaaatacatgggggtctggtgtttatcagtaagtcaaagatacaatctgaaagcaaatcacaacattttcgatcaattaagtagaatcagtcgaggtgtttatcagtaagtcaaagatacaatctgaaagcaaatcacaacac

SEQ ID NO: 905 - DNA, 15563 bp, synthetic construct
  source 1..15563: mol_type = other DNA
  misc_feature 1..15563: note = Synthetic
catcagccatgcgctgctcctcatccaagtcgtagtagccgtcgcatttggctgccagatgatagacgcccggctgcaggtcatagaacacaaacgtaccgttgtagaacgagtccacctgatagctctggagcgtatcgccggttgcgttcaacagataaacggtagcaccgttacagggcatccactggtcgttagtgcgggcagcatatttgtacagcccgtgagagatcttgttgtccatatccttgacagtaccgcagatgtaaccgcgcgtgtcgggagtggctccgaaataggccatgatgccgcggaaataactcagaccctctatgtggcagtggtcgtggttcagcgcgcggtgacgacccggttggtaagtatggaaataaccttcccacaatccgccgggtacgccgtgcttcagtacgccgtagtaaccataataggttttgccgctgcaagaacgggtactgttgctgcccgagcccatgaaattgacgtcgccacgtacgttgggactcgtcagcgaataggccgaggcgggttcgtaccccgctgcgaacatatcgaatcggtagggccagatggtctgtccgatcgccttacaggtctgctcgaactccgaggtggctgcgtcgtagccgcgatagaggaaaagcggatagttggtcgtattgccgtcggtgatggcgttggagtgaaccgagatgaacaggtcgaagttgcctgcctccacttcctcgctgatctcggagagaggacggttatacatctcgtagtccgggcggttctgatagtcagcccaactatagtcggggtattggccgttgactttctgataaggccagggaccgttggcctcgcgggacatcactacggtagcgcctgcctgaaccagacggtcacgcaggtactggcatttccacaggttggtgttggtctcgtagaatccgcacgtgtcgggcatgcccgtggaagagaggttcgggaacggaatagtggccatcggacgatcgttcggaccgaaggaaccgtgacccggattgacatagattcgcttgccggtaaggtcggtcgccgaagcggtcagaaccattgccaccagcgcgataagggtaaagatatactttttcataatcatcaatttacaaactcttaacttacaaattcacaaattgaatcaacgcacgttgataagataggtctcaccgttcaagcctgagcaaacaatcttgccgctgcaagcgtaaggatacatcgcgtcgatgccgttggtcagcacctgcgtttgtccgttcaggttaacggccacgatttcggacgagataacggtctcgccgttgtctttgtcgttcatgccgagcaccacattgtcgttgtaccatttgggcgcacgtaggttatggccgaggaactggatggccgaaccgtcgatgttgcacacgtacgcgcccacgccacatacataaaagaggactttcctgccgttaggactgatggacggccagatgtaactcttgttcgtgccgagcggcgagagctgagtggtcgtaccgccaacggtgatcatcagttgacgatcctcgatactacacgtcggacgtgctgccaccaggttgccgctgactgccagtttgcgcgaggagcgagtcttgttcaccaactgctgcttctgaccggaagtcaggttgtggctcttcaaggtcatctgacgcagacgattggcgtcgtacgagttctcgcgataaaccaccgtctttccgtcggtcgaaacggttgcgttgtaacccgcacccggtgcttccgacaaggtcaccatcgttttgtcagccaggttgaactgcttcaggccctgattggcgccggttgtgagaaggatgtaactgccgtcaggcgcgatgcctgccactttgacgtcacccgcaggcacgtccaactgttctacggaagtcacgttcagtacttgcgcattagccgccattgtcagcgctaacgcagccaaaaagaatacttttttcatgctttcattttattagttgtgttttggatttcttacattactcctccccttttatctctccccctacatgggggagcaggagagggtctggagggtcacttacctcaccctctttcccgtggtgtcgtagagcgcatcgccgcgacgaatcagcagttggcctctgtagaagatcagttctgcctgatgttcaccttccacttctttcagaccgcttccgccatacacggtgattttgcagaacacttgatagccgccgtccaccgtcgtacccgtgatgaccgcttcgccgtcaccaaagcccactacggtgccgttgttccataccaacgccacatcctcgtcgctgctggtccaaatcacggtcttcaccgtggcattactgggcgtgatggttggattgagagcaatcgactcgcccactttcagcgtagtttccgtcaggcgcatcttgatgcccgtcacgtgcacgtctatcgtgtccaccacctcgctgtcggcgcggttgtagaaagccggagcaaactcgttgccaaaacggtccagcgcgcagacgatgaccgacttgttctcgcggtcgctcaccttggccagactgatctgcttgccccacgcgatgtcgtacaggtaacggccgctggtctcgtatttgggcgcagtgcctttgggatagacatacacggcgtatcgcggagccgactcggcgtgttcccacgtcagcataccgtcagcagaaagggcgatgtcggtcggcgcggaaaggctgtccgtggctttccagtccatggcgggaggcaacgctttgtcggagaaaaccgaagccttcagccccggaatcaggcctttggaacgatattggttggtgttgtagaagatggctcccggcgcgttatagggcgcagccttacggttggcgcgcacctgagccgcctcctccgccaccgtcacccagtccgagtagtcgttgttggccgaatagaaatgtatcttctgaccgttaggcagcatctctgcgaaatgctcggtcatgtcgccccaccaattggccagtttgttgtagttctgacccgttgaagtggtcggccagtatatctgcggagctatgtagtccacgtatccgccctgtatccaggccatcgggtcacagaactgcacggcgtagtcgtccaagccaactatgccttgaggcaatgtgacgccatacgactcggccacggctcgctgggtcgtccagatgccgaaaggcgccataccaaagcgtacccacggtttgaccgcctgaatcgagtcgtaaatcatttcgatagtttggttcacgttctgacgcctccaatctcccgcatccatgcccgcgggtttgaacagacgctgcgacgtgctgtcctcgtatgtggtgccaccgtaggggtagaaatagtcgtcccaaatcatgccgtccacgtcgtagttgttgaccatctccatcatcacgttgcacacgtattggcgcacgatgggttgccccgggtccagaatcgtaccgttgtagctgccgttctcgtaatagagcaaccagtccggatgcgaggcacggatatccacattgccgtagctgttcttgttcacctcataacggaaaggattaacccaggcgtgaatctcgatgccacggttatggcactcttcgatagcatattgcagggggtcgtagccgggattggctccgcgcgtacctgtcagattatgactccacggctcgtaactggactgatagaatgcgtcagcagtaggacgcacctgcagcatcaccgcgttgatattacctgccttcagcgtgtccaatatggcgcaaagttgtcttttttgcgcagcgataccatttgcactggttgccaaagtgccgggccagtcgatgcgatagtgcgttgtcagccaggtcgcccggaactcacgcttcggattcggctcggcattacataagtccgtggaaatcagcgctcccacgagaataagtactgtcagaatgatttgttttttcatactctcttgtctctttcacatacaaacggaaacgtttgcgggtgcaaagttacaacaaatttctgacatatgcaagtgtttggtcaaaaaaaaatacactttttgcatttttctcctctcacacttccccttttgacttctgaccttcgacctttgacttttagtattatactacgtataatacacacacgtgtccgtcccgaacacttttatcgggacctaatgaagggaggttgctacgaactacgtccccctacaccctcttccctaattcgtacgcctcctgcagttttgggttgccggcaatctcacgaggggcgttcactccgccgcagaacagatgggctttcagttctgccttctcaaaacagtcaatccagccttgcagaccactctcggcacgtttcggagtgtagtcctcgtcttcggcggctgtagtcaacaaatagatgtcacggaacttgtagtctttcggatacatggcgttcattcggtctatgagagtcttcatctgacctgccatctcatagtaataaataggcgttgcccaacacacaacatcggcgtcaagcacgcgctccatgatagccggcacatcgtccttgaaaacacaggcacccgtctcctgacatttgaaacaacctatacaaaacttgatttctttgcctctcagcgaaatcagctccacttcatgccctgcactctttgcgccctcggcaaactgctccgccagcgcatggctgttcgatcccgctcggagagaggtagataatacaactactttcatatatgcaatttactttagattcttattgaagaactcagctaacttgtcccatggaatgaggttcttgggggcgccttttcctgccggctcggtataaccgccgtcatagaggtcgcaatgcgatgcgtccggaataataagcagttctttgttctcaggacagggattcggagctaccacactcttgtagccgtctgctttgccgtccaccatgtaatggtacgccgcttcgccaaaataacggctatgggcgttctcgccgtgcatgatcagaaccgcagaacggatctcgttgatgtaatacaggaaacggctgttggcataagcctgcgtgccgatgacacgccatccgtcattcgagttaggagcctgcggaggaacggtgtccagcacacctcctgccatagcattaggatccgcaagacgctgttgggacaggttctcacgattcctgtgacgccactgctcgtcatcgaaagcatcgttatagtcgttgcccgacacacgcgtcatgtcgtacatcgtcgaagcgactgtcgctttgatacgcgtatccgctgccgccgcattgagcgcaatgccgccccatccgcagataccgatgatacctatgcgattagcgtccacctcaggctgttggctcaaaaaatccaccgctgccataaagtcctccgtattgatatccggcgaagccgtacgtctcggctctcccgaactctcacctgtataagaaggatcaaaagccagcgcaataaaaccgcgctccgccatcttcatcgcatatagccccgaactctgctctttggtcgcgccgaaaggaccttgtaccttaggctggtataggtcgccaaccaacgtgaacccgtattgggtctcgaaggatacttttttgtgagagactttctcacttaacgggaacactttatcccatgattcttttcccatttctttatttgtttttgcgcagccgaccaaaagcacagccgcaaggatgaatagtgtttttttcatatctcatttcaccatttgtccattgacgttatactctttaccgtcacgaacgaccagcacttgcccgtctcgtagaaccttcacactttgcacagcttcgcggtgttcttttgtagagaggtttccggtggctgcagattcgaaacgaacagtcacattaccggaccccagagcggaagccaggccggacgggttgtctatagaaccgatgcgcgtataggaatatgcgctactgaaagtctcataaaagaggacgatacagttgttgccatatagcatcaaatcgccggcttgaatagttcccggggcataactgttcgtgggcaacgaagaactcagatagtgatatttctcgttgccgttcagttcgttcatcgtgacagacaagggtagcagagcgacaaaagcttcgcttgtttcgttgtctgccagcgtggcagcaaaggttctcccgcctacgattacatggatgtgcatgttggtatttactgtttggctcaatccacaggtttcagcccaagacgtggcaacaagcacacacatggctgcaaaaaatgtaaacaatcgtttcataaatcatatgttgttgacactgttttcaattccgactgcaaagttactgctttttattcacatagaataacatataatcgccaaatatctaccaattttgcagaaaatgcacttttttgagcgtttttggctttctattttgcatatttgagatattttttgtaattttgcagccctaattgaaagcatcatgaaaaagctgctgaatatccgggagccgaatgtatatgccaggcacgtcggggcaaaagaattgcacccgctgatcagtgtggtgcatttcgacgaactgaaggacggggtgcgcaccagtttgaacaattacagcgtctatgggttgttcattcagcgggagttcccgcagaacttgtcgtacggcatccgccccgtgcaagccagcaattggtcggttatcgctgtcgcccccggacaaatcggaggcaaagaagacgacggcgttgccctttctttgagcggatgggccgtgctttggtcgcctgaattgatgagcaaaactgacctcgaggcacatatatccgaatataagtttttctcctatttctttaccgactctattccgctggatcctcaggactgggatgcgatagaccaactcttgagcagtctgcgtgaggaacttcggactcattccgacagctccgcactaaggaatatcatcgtgggctatctcagacttatcctcgattactgccaacgcgcttattggccacaaagccccagaagtacggcagcagagccggatttgctcaagcgctttcacgctttgttggaccgctactactacgaagaacagcagacacaacacggtttgcctactgtagcctattgcgcatccgagatggcttattcagcaggctatttcggcgatttggtcaaacaagccaccggagcttccgccaaggagtacatccagtcgtatatcattcgtttggcgaagaatatcctcatgagcgggcgcagtatcagcgaaacggcatatatgcttggcttcgattatccgcatcatttcacgcgcatgttcaagaacaaaaccggcatcacgcccggcgaatacatgcgcggacaattagacatcagtcttcctgagaggagctgagaaggctctgtcttctcagctaaaaacagcaaacaccccttaatgaggtgtctgctgattcttgcggaagcggccggattcgaaccgacggtacctttcagtacggaagttttcaagacttctggaataaaccactctcccacgcttccttcgcgctcaccaacgaattcgttggctggcatcggggccacttgaaggggcttttttcaaaaggggctgcaaaattactgcttttttttgaattgaccaaataaaaacgcaaaaaaatgcattttgggggtcattttaggcgattttagggggagtaagcgcgaaaaagcgtcagaggacgtaggttgtctctatctgctcgatgacgcgaacatcggcctctgtgagggtgacggtgtgacccgagggctgcgagaaacggctgatgagatgctgctgcagagccgacaaatcgcggatgcccatatcccaaagattggtgacccgctgacgaacggactgcaccgcatgtttggccaacttggcctcggagggcgtgatagccgccgacaggtcatccatgttgcttttccacaacagcgtgccgtggacgatagtggcggttgggcgggcaaaagaggcattgccgctgacttttctgtcgcctatcatcacgtcgttgtgcgtggacgtgacggcgggcaaacccagcgctgacagattgtccaccagccgctccagatagtaaccaaaagcccgctgcgcgttggtgtcacgcagaatacacgaaatcatctggttgccgctgtccgaatagacgcagccgccgccggattttctgcggcacacatccaccccatgctcccggcaccaggggaggttgacctcggcttctacatcctggtgcttgccgatgatcaccgtgggacggctttgccacaggaagaaagcgccctcctcgtcggcgggaatcagttcgtccaggtgctcggccacaaattcctccatcgccaggtagaaaacaagccgacggtcggcaaaaacagtgtcaggtaacaggatatgcgtcatggggcgggcaggggttattcgaggctgttgatgtccaccagatggttgacaatggcgtagatggtgaggcctgcggtggagtggatattcagtttgcgggtgatatgcttgcggtgggtgacgacggtatgggtggagatgcacagcacgtcggctatctctttgttgctcaggcctctaaccaactgaaccaacacatcgcgttcgcggtcactcagttcctcggtttcctttgctacggcagcaggcactttacgcgagtgctctttctgacgaagcatcaccgggcggaggatatcgtcctcgatggcgcagtggtccgcaaaatcgtgctccgtatgccataagtcgctcatcacgctgatcagggtgtaggtcaccgttccctccgaggaggtgggtttggtgggatagtacttgataatcaggttctttatctcggtcagtttgtccgtgatacgctggtcgtcgtgtacgtgttcgtcgaacaggccctggttctcgtgctcgatatgcgtgcgaatctcgtccacaaactcgtcgtagcagcgcagaatcagcccgggaatcttcgtcatcgggtcggcaggaatgatggcctcgatgagcgaacggcgcaggcgaggcagacggaagtccaggaaataggtatgagcgttgtgcaagtagcgctgcagcgtgggcacgtcgatgtcggcgggaagggcgcgctgatggaacaccttgtagttgacgatcgacaggaaagtgggtgtgtgcacatggtgcgcatcacacacttcggcgatagtctgttctcccacccccatctccagaccgaaacggctgattatctggatagcatcctcctcgtgagccatcagatcgcatatcttatcactcgctttatacatagttttgtaatcaaaatcgggcacaaaggtactgcttttttttcaaatatgcaagagtttccccaaaaaatccccatttttaggtattgcagggttgcataaaaatgatgatttgttgccgcaaaagcgcctcttttgcgcagttttgtgtctccaagtgtactcaaattaccaacgtatagtagtcattttgtttcaatcttgcttgcagatacggacaaaaggcggaacacctgcagatttcatctttttccgatgttaaatgcaccacccgctgcatagtgctgcagcagacatatagaaataaagcgttataagcaataatgagggtcatacatgcgatgggcctcagtgtttggtgctcaattatcacacaaaaaacgcaaaaaacactctttcagggcaaaaaccacccaaaaaacacacccaaaacgcttttttaacactttccgctttgtcatgtcaaatctttttcgtacctttgcagcctgaaaacatagaataaaatagtataaaacaaagaacaatatcttatcatgaaaaagaaagtattgggattggatttaggtgtaggttctattggttgggcgctgatagaaacgactgataatcagccggaagaaatcgtcggaatgggttgccgtattgtgccgattggcaaagatgacagtgatcagttcagtaagggacaagccattagtaaaaatgctgaccgcacggctcgtcgtactgctcgcaaaggatatgaccgataccaattgcgccgtgccctgttaacgcaagtattgcgacaaaacgggatgctgccggagcgcatggatgagaatgttattgatttgtggaaattgcgcagtgatgcagctacagaaggagaaaaactcactttgccgcaaataggtcgcgtgctttatcatatcaatcaaaaacgaggctacaagcacgccaaggcggacgacagtgccgataagaaacagacagattatgtggcagccgtcaatcaacgttatgctgatttgcaagcggaaaacaaaactataggccagcatttctatttggagttgttgcgcagcaaagtagagggagcaagtggtccatactatacttttagaatcaaggacaaggtctttccacgtgcggcatatattgaagagttcgaccaaataatgcacgtacaaagcacatactatccgacaatcctgacagatgagttgatagacacgcttcgcaaccgcatcatcttttaccagcgcccgcttaaatcgtgcaagcatctggtgagcctttgcgaatttgaaatgcgcccctataagaccaaggacggccgtatcgtctacggtggtcccaagtgcgcgccccgcacttctcctttggcgcaattgtgtgccatgtgggagacagtgaacaatatcacgctgaccaaccgcgataatgagaaattggacatcacgcttgagcaacgcaagcagatggtagagtttttgtgcgcaaacaaagaactgaaactaacaaacttgtataagattctcaacatcagcaaaaaagacggttggtatggcggaaaagccataggcaaaggcctcaaagggaatgccacattgctgcaacttcgtgaggctttgggtggcaagtacgaccagtggttggagatgcctgtcgagttgaaagacagtaaatgggtggatacggaaacaggagaagttatcaaagaggtggcagaaacgatagaacaaacacctttgttcagattgtggcacgcagtctattcgttgcaaaatgcagacgaattggcgaagacgttacgagagaagttccaaataacggacaaggctgttattgatgctctatgcaagattgattttgtcaaaccgggctatgccaataagtcacataagttcattcggcgtctcttaccctatctcatgaatggttaccagttcagcgaagcttgtgcacatatcggtattaaccattctaacagtatgacagcagaggaacgagattctcgaacattagttgagcaaattgagttgttacccaagaatgccttgcgacagcctgtaatagaaaagattctcaatcagatgatcaatttggtgaatcgcctgcagcaggagtacggcccgatagacgaagctcgtattgagttggcacgcgaactgaagcaaagtcgcgaagaacgcgataacgcatataaagccatcaacaaaaacgagagagagaatgccgctatcgctgccaaaatagccgaattcggtattcgcccttcgcgctctcgcattcaaaaatataaaatgtgggaggaaagtaatcatcgctgtttctattgtggaaaaacaatggatatagcgcaattcctcaatggcgcagatgtcgagattgagcatattattccgcgaagtattttgtttgacgatagttacagcaacaaagtctgtgcgtgtagagactgtaatcgcgagaagggtaatagtactgccatggaatatatggaaggtaagcctaccggtgagtttgaagcctacaaacaacgcgtggacgaagcgtttactgaacatcgtattagtaaaaccaaacgagaccacctgttgtggagacgtgcagatatcccacaagattttatagaacggcagttgcgccaaagtcaatatattgcagttaaagcggtagagattttgcaaaccggtattcgccgcgtttggacaagtggtggtagtgtgaccgatttcttgaggcaccaatggggatacgatgaaatcctgcatacactcaatctgcctcgttatcgaaaagtagatgaactgacagaaatagtgcacttcgaacacgctggacaagagcacgaagaggagcggataaagaattggactaaacgcattgatcatcgccaccatgctattgatgctttaactgtcgccttaacacaacagagttacatccaacgcctgaacaccttggaggcatcccatgaatggatggaaaagcaagtcaaagaggccaacactgcgtacaacgagaagaagtctgttctggaaaggtgggtcgctgaccaaccgcatttctccgtagctgacgttaccaacaaagttgatggtatcttggtttctttccgcgccggcaaacgagtaaccacacccgctcgacgagccatctactctggaggtaaacgaaagattgtacaaaccggtttacaagttccgcgaggtgctttgacggaagatactatttatggaaagcgcgaagaaggatttgtcgtgaaatacccgcttgaccatccaagcatgaaagtcgaaaacattcttgaccctacaattcggaacttggtcaaggagcatattgctgcttttggcggcaatgcaaaagaggctttcaaaatgccgcttttttccgcagaagggatgcagataagaagtgtgcgatgcaaaacgaacttatcagagaatagtgttgtgccagtcaaactcaatgaggatggtcaacccattggatatgccaagaaaggaaacaaccatcatgttgcaatatatcaagataaaaaaggtgagtatcaagaattggtggtcagcttctgggatgctgttgaacgcaaacattatggcgtccctgtagtaatcatcaatccgcatgaagtttggacagacttggttaataaagacttatcacaagattttctcaataaactgccacacgatgattggcaattcgttctttctatgcaggaaaacgaaatgtttgttttgggtctggaagacgacgagtttaatgatgccatcgaaagacatgactataatctattgaacaaacatttatatcgcgtgcaaaagattagtcatagagagtatagtttcaggtatcacaccgaaacaaaggtggatgacaaatatgatgggatagaaaacggacgaagtacaagcatgtctttaggagcgttaatctcgtttagaagtatgaacggattattctcccaattcccccacaaagtcaaaatcgatattatgggacgtatcacaaaagcatgataaaaagagtactatgttttgagaaccctgctcaactgagtttgaagttggaacagttggtggtgaggcgtgacgaagaggtacgcaccttgcctattgaggatatcggcgtagttgttcttgatcacaagcaaattactatcacccatgcactcataagtgccttacttgccaacaatgttgctattgttacttccgatgacaaacatcttccagttggattgatgttgcctttagatggtcataacctgcaaagtgaacgattccgtgaacaaattgaggcatcagaacctctcaaaaaacaaatgtggcaacaaacagtggtagcaaaggtattaggccaagcacatatattaggcttgcaaaatattgaacatgaaaatatgttaatgtgggcaaagagtgttcgctccggagatacagagaatattgaggcacgggcagctgcattttattggcgcaatatgtttgactccgaatttttcatccgcgactcacaaggcctaccgcccaataatttgcttaattatgggtatagtattgtccgagcaatgacggcacgcgcattggtaggagccgggcttttaccgacattaggtattcatcatcatagccggtacgatgcatattgtttggctgatgatattatggaaccttaccgcccgtttgtagataaaatcgttttggaaatgtgtcaacagggtgaagtgacagatgatataacatccgagcaaaaacgccagctattaggaatcagtacaatggatgtttctatcaatgggcatcgcagaccgatgatgctggcaattcagtctactgctcaaagtgtgcagaaatgcttcgcgggcgaagcaagaaaaatagtgtaccccgattggtaaaatggaaaaagtaaacaatatggtctaaaacaatcaaccgtacatctcgaagctctgctacccgttgtgtatgtcattcaaaaaaagtaaacaatatggtctaaaacaatttcacaggcagcggccgcacaaagaattagttgtgtatgtcattcaaaaaaagtaaacaatatggtctaaaacaatgcagtcacccagatgactgacgcaaccaagttgtgtatgtcattcaaaaaaagtaaacaatatggtctaaaacaattagcgttggcacatttgcccggccaaagctgttgtgtatgtcattcaaaaaaagtaaacaatatggtctaaaacaatattgcgcagacaggcacgcggtgggacctgttgtgtatgtcattcaaaaaaagtaaacaatatggtctaaaacaatgttgggtcggaaggctatctcatcaatgcggttgtgtatgtcattcaaaaaaagtaaacaatatggtctaaaacaatgcaaccgggcgtaaatgcaatgtatgaggcgttgtgtatgtcattcaaaaaaagtaaacaatatggtctaaaacaatccccgttgaatgaggtgactttcctcggagttgtgtatgtcattcaaaaaaagtaaacaatatggtctaaaacaatgcctcgcagatgaaaatcacagacccgattgttgtgtatgtcattcaaaaaaagtaaacaatatggtctaaaacaatagtgataatccagtaactgataacctgattgttgtgtatgtcattcaaaaaaagtaaacaatatggtctaaaacaatcaacaatgaaaaaatcattcaacgacattggttgtgtatgtcattcaaaaaaagtaaacaatatggtctaaaacaatagactatatgtaaagcaaagaaaaacaacaagttacatcgtgttttagagcataaaaaagtggcacttttgggtgtcacttttgtttttgatattccactttttctattctaaaagagctcaagttgttgtacgggttgatcacattcaatcttcttcctacattcataaatctgcatatcgccaaattgtttgtcggttattcgcaagatgcctattttgccaaaaggaggcaaactccgtttgacgcgttcaatatgaacctcggcattttctgcgcttacagacccgttttcgtccccattttcctcagagttcgtatcacca

SEQ ID NO: 906 - DNA, 15310 bp, synthetic construct
  misc_feature 1..15310: note = Synthetic
  source 1..15310: mol_type = other DNA
aaacgacaaatccgcaggattaaaaagaaagagacaaatagccgcaattcagttttgtatttcggtattatgtctgaaacaaaacaccttttgctccaaaccgtaaatttattaaaagcaacacgagactttgtttcatacactaaatcaggttctaacgggaattaaaggcttaatttgacttcagtaacataaagcaaccaaacctcaataagaaagttataaattcgcacaatcaaatattgagattaattaaaatgagaaaaatatgattctggacaaaatattcgggtttcttgttccaaaagaccgcaagttctttcccctttttaatgaagcagctgacaatctcgtactggcttcagagttgttgataaaattgatgggtgaaaatgatctgactcaacgagaagtatatatcaaagaaatcaaagatgctgaacatcagggagatgatataactcacaaacttcttgttcaattgaacggcaccttcattacaccttttgaccgtgaagatatccatcagcttatttcaactatggatgatgttgttgactatattcacacagcatcaacacgggtacatttttataaactgccaacttttcctgaggagtttgtaaaaatcgcaaactacattcttgcagcaaacaaagagatacaacttgtacttcgcagtgtaaaaagtgcttccgattttttggaattcgcagagtcttgtgcaacaatcagtacctacgaaagcgaagtagattatttgtaccaagagtacctatctgaactattcgagaaggaaacaaatgctattaacctgataaaaaaacgtgatatcctggcctctctcgaaaaagcgattgacaaatgtgatgatgttgccaatgtcttttcttcaattattgtaaaagtatcgtaatggatttcaccattttaatagccataataattttggctttgattttcgatgttattaatggctttcacgatgcagcaaattctatcgcaaccgttgtttccacaaaagtccttactccattacaagctgttatctgggctgcctttttcaattttgcagcttatgccatttttgagttaagaattgcagatacaatagctaaagttgttgatacacaatcaattaatcttcaagtgattttagctggcattattgcagcaataatctggaatctgataacatggtatcttggaataccctcaagttcatctcatactctggttggaggttttgccggtgctgcaattgcctacgcaggttgggatgttgttcattctggaaagataatgaaaattgctgcgtttatttttcttgcacccatgcttggaatgttactatcctatatgatatcgattgcacttttgtggatttttaaaaatttcaaccctttccgattaaagcgatggtttaaaataggacagttggcttcttcagcaatgttcagtcttggacatggcggaaacgatgcacaaaaagtcatgggaattatttctgctgctcttctcgtttactttaaagccgcagatcctgctaccattcccgactgggctaaaatcacttccgtggccggaaaaatccatactatccctttatggattgtatatagctgttatctggcaatatcagccggaactttaatgggaggatggcgaattatcagaactatgggtgggaaaattaccaaacttacccctttcgaaggagtggctgccgaaggtgcaggtgctatgttacttttcggaactgaagcatttggaattcctgtcagtacaacacatacaattacaggcgccattatgggagttgggataacaaaacgagtctcagccgtaagatggggtgttacaaggagtttactttttgcctgggtattgacaatacctgtatcaatgggtattgcagcaacgatattttttatttttaaaataataaacttcgtttaaattataaacttcaatttaaaattaaaccttcaaggttttaaaaaccttgaaggtttgtactgaaatatgaaggttttcaataactccttacttcaactccagaaccatagaggtttttgcaggcattacaatattattcaaatcattaacaatctttcctgacataacttccttagctgaagtaaatccctttaaagattcagcaaaccgattagtatttatcgtcttttcttctgaattcatattgagtattaccattacagtttctttttcgttatatctgaaatagacataaaaattatctttgggataataatgttttaacattccattgtgaatcagatctttcccttttctccagttaatcagttttttcatgaattgctgagcgtcaagctgagctgaagttaaacctacacctgtaaagccatttacctggtcaccttgccatccacccggaaaatcttttcttaaaaacccatcgccttcgcgcttaaatcctgtcatcaatatttcgccgccatagtaaacctggggtattcctcgtgttgtcataaggaatgtaactgccgttttcaattttgaaacatcttcaccgattgcggtaaaaaaccgctctgtatcatgattatctgcaaaaataacaaggttatcagctttcggatagagatgatcgagcgccagcgtttcgtacaaacgatttagtccataattttcgttcatcgctcttacaatagcatcctgaatcgggaaatccataagacttggcaaacacgaagtataaccattcggattaattttacctttctgccaaaacgacactgccgcctgatttaagttccactcctcccctacaatattgaaattagggtattcttccataactttacaagtccagtcagccatcataagtttgtcgggataagggtaggtgtccattctgattccatcaagtccggcatattcaatccaccagatcgaattctgtattaagtactttgcgagatacggattacgttgattcagatcgggcatagttggcacaaaccagccatctgttagttcacgtgaatcaacttcggccacataagggtcttgggttacagattttctgtggttggtaatcttgtaattaggaaatccgttaatccagtctttcatcggcatatctttcatccaccaatggctagaaccacaatggttgaaaatcatatccataaccattttaattcccctctttttcgcctcggcactaagctgttgataatcggcatttgttccaaacctgctgtcaactttgtaaaaatcggtggttgaataaccgtggtacgaaaactcaggcatgttgttctccaaaaccggatttacccatatagccgtatatccgttttcttttaaatagtcgagattatcctgaatacctttcaaatcacctccatgtctgccatttggattaatgcggttgactttttcgagctggtctggttttgagtcattcgagggatcaccatttgcaaaccggtcgggcataataagatacattacatctgaagtattgaaaccgacccgttcggaagaaccgttttgacgtgctttcaattcgtaaggcgcagataatataatttttccgttttgtttgaaaacaatgtcaaacgttccggcctttacttttggcgacaatcgaagatcaatgaacaggtagtttggattttcgaccgctgtgaatgtaactaattctaccccatcatagtttatttccggtcgagtttccgatatacgctctccataaaccatcaattgcagcgatggatttttgaattctgtccaccaaaaaggaggctcaattctgtttattgttgttttattggcggcattaaccggcttttcattgatggaaatgattaataaaaaggcaataatcctgattgttaattgtttaattttcattttgtgatttttttagttgaacttctattttattatttccagcgataaactgttcctcactattcagaagtatggacaattccttccccgaaaggttctcgatgcgaactgatttgctattaacgtttatttcaagaattgattctctgaagttaattctgaaggaatatgaatcccatttttcggggataattggtgagaatgacaatttacctttctttatcctcataccgccaaatcctttcacaaaagccatccatgttcctcccatcgaagttatatggcaaccatcggctgtgtcgttgttgtaatcatcaagatcaagacgggcagtttgaagatataatttatatgcttttgactcatatccgattgcacccgccaaaattgtgtgaatacacgatgacagcgaagactcgtgaacggttaacggctcataaaaatcgaaatgtcttttaatggtttctttgtcgtaatcatcttcgaaaagaaacatactttgcaaagtatcagcctgtttgatataaggagaacgtaaaatacgatcccacgaccaatgctggtttattggccgctctgcctcaggaatctggtctgctgcctttagttctttatcggcaaaaccatcctgctgcaaaaaaatatctcgtttatcatcataaggaaggtgaattttctcaatgatatttttccatgctgatgtttccgtctcttcatcaaagccccatttctcttttaactcattatactgcgaaagataactctctcttaagtattcaattacttcgagcgtatataccaatgtccattgagctatacgattagtatgaaagttgttactgacattgttctcgtattcattggggccggtaactcccaaaataacatatttttgacgctctgccgaccagttcactctttgtgtccagaaacgtgatatggcaagcaaaacctcaaatccgaacgggcataaatattcacggtcatcggtatatctgatgtaatcgaaaatagcataagcaattgcaccgtttctgtgaatctcttcaaaagtaatttcccattcattgtggcactcttcaccgttcattgttaccattggataaagtgcagcaccctggctaaacccaagattagtaccgttttcgattgcctttatcagatgtttatggcggtatatcaataaattacgtgctacccgggtaggtgcggttgcgagataaaagggaaggcagaaggcttcggtgtcccaataggtcgaaccaccatatttttcacctgtaaatccctttgggccaatattcaatctttcatcttcgccggtataagtttgatgaagttggaaaatattgaagcgtatcccctgctgagccgcaacatctccttcaataataatatcgcttgttttccatttttcgagccatgcttgcgtgtgttcaagctcaagttgatcgaaacctttctcaaaagctaaattcaaatgttttactgcggttttcatcagactatctttcggaaagttttcggatgaaaggtttattccaaatttttctatagttatggtttctccctcattgattattaccgggataatatttgaaataaatttagtgcggttttcaacatcagccgaaaaagaaaatttatctccgttgcgcaacatgttaattttcattcctgtacagacatgaaacaatgtctttcgcacttcggcagttacataaccttcacccggtttaacgtttacttcaacctcgtcccagaatttctcatcataattggcatcctcattcctgatatcaaaatctatgtagggtgtaaaggtgattttatccgaaaagtttaaagctgttacggcgtaccttattgccccaatttcagaattaactatgcttaaaaaacggcgtgcgacaacctttactctcttaccagacagcagttcaacaataaatacccggtttaaatgaccctcctgcatattcaactcacggttaaactccataattttcgcagtattgatgtccagcgtttcattgcctattttcacatcaatcccaatccaattagccgcattaagtactttagcaaaatattgcggataaccgttcttccaccaaccaacacgggttttatcgggataataaacgcctgccacataattgccatgaagggtttcaccggtaaacttctcttcaaaatttgcccgatgacctatcctcccgttcccaagactcatcaggctttcagttattttattgtattcgggatgaaatgtatcttctataattttccatccgttatgtatgatgtattctttcattctcatgtacttttttgactatgaataccaattaattagttgatcaagagttatcgtttcaaaacccggaatgacaaaatcagcatttttgaggttttcagcctctcctactccaataatgtacattcctccgttgcgggctgcttcaataccagcctgagcatcttcaaacactacacaatactgtggctcaactcctaattcagctgcaccctttataaatacttcaggatccggtttagcttttgaaactttattcccgtcaattatcacatcaaataattgtattatattgatcttattgagaatagtcattgcatttttacttgcagatcccaaggcaatcaatatgcctccatcgtgtaactcgtttaaaaatctgatcacaccggggagtatttcatctgagttcatcttttgaatagacgaaacatagaaattatttttgatttcagccaattcatttttcgtttccgggtcaagttttaagtttcctatttcgagcaataagtcaagagattccgttcgactgattcctttaagtcgttcgttatcaagttccgaaaactcaaaaccaagatctgtggctatctttttccacgccagataatggtatttagcagtgttgactactaccccatcgagatcgaataaacatgcttttatttgcaaaacttacgattttgatgtagaaatatgctcttttacaaaaatgaccgaacagcctgcaataaccattgacagacctgccacacccaacataagaatggcctggccacctactaatttcaaaactacacttcccaacagacccgcagcgatttgcggaatggtaatcgtggcattgaaaattcccatgtaaacccccattttttcagccggaagcgaggccgacaaaatagcataaggcattgcaagtattgctgcccaggctatgcctacacctaccattgagaaaataagtccatattgattttgaataaaaaccattgagatcagtccggcaccaccggctaataacgacagcatataaacagttttacgaccgagaccatttgcaaggcgagccataatcaacgaaaagagtgcaccaaataaactgtatccggcaaagataacaccaacccagtttcctgcctcgttgtatcctgctgaagttgaatcaccggcaacagtattccaaacgttttgagctactcccggagttgtaaatacccacatcataaaaagtgcaaaccatgagaaaaattgaactattgccagcctccacatggtaacaggaatctcttttaacaatgataaaaaagaactcttttttgcagcaccttcttttgtttcgttgtatttacgatattcattgggtgggtattccttagttttgaaactggtccaaagcacagaaagtaaaagtgcaccgcctccaaaatagaaagcccagataactgtgggagcaactttttcaccctcggcagggatattcgaaacaccaatccaggttaaaacaaaggggagtattgaaccgataactgcacctgcgttaatcagaaagctttgaactgaatatccctgattgcgctgctcttccgaaaccatatcgccaaccaaagctctgaatggttgcatggtaatattgaacgaagtatccataaacagaagcataaaagctccaaaaaacagaggaggcaaaatatatgcaaagaattcagaattaggcataaaaaacatagccattgccgaaataattgctccaaggagaatatatggaatcctgcgacccagacgagtccaggtactatcactaaaaagaccaattattggctgaacaattaatccagctaatggagctgccagccagaaatagcttaaatgctcaacttcagcacctaaagcagataatatccgacttgtattgccattctgcaacgaataaccaatctgaactcccatgaaaccaaagctcatgttccagattgaccaaaaagagagacgcggtttttttgccataattttaaaaatgtagtttgtaaatcagacctaaaattaatattggaaaaataagaacgatcagaattaacttcaagtgaactaaatcataagaagcataaattcagacgaaaacagtaccaaaatatgggaaacatgaaaaatcgtaatcctgaaaaggaaaacgttttatttatggggggaaagacaattaatattcgttggcaaatataatgcgcaaaaactaaaaaaacaatagctaaacacttttaaatcaaaataatagtaaatattttgaaaaccctttatgcaaacgtttgcgaacatattcaaaatatcagattctttttgttgattcgcgtattacgaggtttgtatcaataaaaaaggtttcgcccttgcctgttctctccgattcgatacgctttaagagtacagttgctgctttaacacccatctcataaccatgctgatcaaccgaactaagtgtaggagttgtaatatcggagaagcttcctgccgagaaacccattattgccaccttatcgggaatagcaactcccattttctgcaaagttttcatagcaccaactgcagtaaggtcgtttacagtaaatattccgtcaggcggaaccggaagctgaataagttttcgggttgcaattgcagcaagctcaaaagaatcggcaacaatcacataatcttcaatatacggcatgttattatctttcagggcctgtttgtaaccctcgtgccggtactttccgatttcgagcgtgtcgggtgcagcaaggtgggcaatacgtttacaacccgattcaattaaatgacatactgcgttatagcctgcttttttatcatcaataatcacgctatccgaatcgaaaccacccggaactctgtcgaaaaacacaattggtattccactctcttcgagcataagtaaatggtcaaactctttggtttcttttgatattgaaatcaatgcaccttcaacgcggtttgagagtaaagcttgtgtattaataatctcgcgctcatatttttcgttcgattggcagatcataacattgtaacccgaattgtatgctacttcttcgatgccgctgattacagatgagaagaaataatgaacaatctcgggaattattacacctatagtgttggtcttgctgtttttaagcatcaatgctactgcattaggcttataatgaagcttttgagccaatgagttaacggcatccttagtatcacggctgatgtcgggatggttttttaaagcccgtgagacggtagaggccgaaataccaagggcttttgcaatgtcttttatggtaatctgactgttcatcaatatacgtagttcattggtaaaaattagttcactaaagtaattattctttttggaattacaaaccaaattttttttgaatgattaacagaaaattgcaaataattataagcaaaataataaagatttttcataattttcgaaagtatttaaaaacagaaaaaaattgtcgttaattgaaaaaaccgttaccttattatcatcttgaaaacactgtaaaatatggaaaattgaagatattgaatcgaatttaaagagggtgatataggtaagagttttggttggcagaagtgatttttgggcagaatatgaagcaaaaaaatgcccccgtattgaaagacgagggcggcttaaatgttttcacaacggaataatccttattgtgatttgcttcaaaatgtgcggctaaattaataataaatattgaaattcaaaatagtatgaaaaaaattttaggcttagacttgggtgttgcctcaattggttgggcgttgattaacgttgtaaatgacattcctacagaaattatagcactgggcagtaggataataccattaagcaccgatgatgccaatgagttttcaactggaaatgcaatatcaaaaaatcaaaaaaggactgaaagaagaactcaaagaaaaggttatgacagataccaattaagacggaaaaaccttaccaactttctacgcaaatacgatatgaccccaacagaacaattaataaaacttgaagtacttgaattatggggacttagggcaaaagctgtgaatgaacaaatatcattagttgaattgggccggatactttatcatttaaaccaaaaaagagggtataaatcagcaaaatctgacgacatagatgacaagaagcaaaaagactacgtttcagatgtcaacaatcgttataaaacaataaaagggtttggacaaactataggacagtattttaatgaacatcttcttaaggataaacacttcagaactaaagaacaagtattcccacgaattgcttatgttgaagaatttgaagttatgtgggattgtcaggccaaatattacccaacaattttaaccgcggagaacaaggcaatagtaagagatgaaatcatttattaccaacgtaatctaaagtcatgtaaacaccttgtttctgtttgcgaatttgaaatacgaccatataaaaacaaaaagggtcaaactgtttacaacggaccaaaagttgctccacgctcttcccctttgtttcaggtttgtaaaaattgggaaagcctaaacaatatagttttaaaaaaccgaagaggaaaagaatttgaatttacagttgaaataagaactaaactgtttacccatttagacaataatgaaaaactgacaacaagcgatctttttaacatactcgatgttaaaaaatctgatggatggtggggcggtaaagccattggtaaagggttacaaggcaacactacgaaaatgcagatatctaaggcattgaaaggaattcccgaataccaaaatcttttacaattcaaacttaaaaatattgatacgggcttggttgatctcgaaactggagaaatcgtggaacaaataagctccgattttgagaacgaacctctttatagattatggcacacaatttattccattaatgataaagatgaattaacgaaggttttacttagaaatttcggcattgaagaaccagaagtaattgatgccttgtacaaaattgattttcggaaagcaggtttcgggaataaatcatccaaggcaatacgcaggatattaccttacctccaaaatggtttaatgtatagcgaagcatgtttggcagcaggattccgtcattcagagagtttaacagttgtagaaaatgaagcacgggaattgttgtcgaaattgccccagattaaaaaaaatgaacttaaacaaccaattgttgaaaaaatattaaatcagatgatcaacttggtcaatgctgttattgatcaatatggtactatagatgaaattagagttgaacttgcacgtgagctcaaacaaagcaaagacgaaagaaatgcaaccgataaaaacatgcgccaacgtgaaaaagagaacgacaactatgcaaatagaattcttcaggagtatggattgacagcatcacgcacaagaattcagaaatttaggatgtgggaagagtcaaaacaaaagtgcttttactgtggtcaaacagtcaatgtaatggaatttctaaaaggtttagacgttgaagttgaacacattatacccaaatcattattctttgatgatggtttttcaaataaagtctgtgcctgtcgaaaatgcaactccgaaaaaggaaatcaaacagctttcgattacatgagaacaaaagctgattatgaatttgaagattaccttatacgtattgaagactattacaagaacggagatatcagtaaaacaaaaaaagaaaggcttcttacttcaaaagaaaagatcccaactgattttatagacaggcagcttcgtgaaacacaatatattgcacgtaaatccaaagcaattctatcgcaagttacccgtaatgtatgggcaacaagtggaagtgtaacagattttgtaagacacacgtggggctgggataaaattctgcatgatctacaggttgataaatatcgtgcaatgggtcaaaccgaaatagtggaatttatacacaaaaatcaaaagcacaaagaagaaaggattaaagattggagcaaacgattggatcatcgccatcatgccgttgatgctttagtagtagcctgtaccaaacagagctttatccaaaggttaaacaatctaaatactgaaagagactctatctggcaagcattaaaagaccaaagtgaggaacacaaggagaaattcagttcactggaaaattggatgaatgaacaacctcatttttcaaaagagtaccttcaaaataaagtcgctgagatacttgtgtcgttcaaagcaggtaaaaaatctgcctcgattggtacacgttcaaaatatgtgaatgggaaaaaaatcatattacaagaaggaattattgtaccacgtggagcattacatgaagaaggggtatatggtgaaattagtcggtattttaaagacaaaaaaactggtcaagtgacatatgaaccacaaattgttataaagtatgacgttggattaggatctcaaggatacatattttccggaaaagaaacagttgaaattaaatataaaacggataagaaaacaggaataataaatatagttattgaagataaaatacaaaaagtgctggacagtattattgacgaacgagtaaaaaaagtgcttttggaaagattgaattccggttttgaaaatgggcaaacctataaggatgatcccaaaaaagccttaaatagctttagagatttaataaatcatcccatttatttggataaaaaccagtctattccaataaaatcggtacgttgttttacaggattaagtgctgttgaacccttacgatataatgataaaggtgaggcaataagttttgttaaacctggaaataatcaccatatcgcattttatcatgaccaagagggaaataagcaggtgcatgttgttactttttggcacgctgtacaacgaaagaaatatggcattccagttttcattactgagcccacatttgtatgggattttgttcaaattaatgaattccctgaagcgtttttaaaaaacttaccgaatgtaaactggacttttgaaaatagtcttcaacaaaatgagatgtttattcttggtatgtctaatgatgagtttacaagtagtattgaaaaaagcaattatgaactactgagtaaatttatgtataaaatacagaatctttcagcaaacccaaatggtaaggttattcagccagtaattaggctgtgtcaccacatagaaacccggtttgaaataaataaggcaaataaatcagacaaacgatttttaaatattgtaagtattgaggtttggaataaattaaatccggttaaaattacattaaattgtctcggcaaaattacatccataaatggtaaagcaattagctatttaaccacttagattgttaattatcaactgaaaagctattttataaaaaatccatattaagcctaataatagataaaccaccgactgccaaaatatgatggtatattaggaggtatattgaaatctacaattctaagcaaatgatcaaacgtaccctttattttggtaaccctgcttatctacgttttaaagatcagcagttggttattgacctgcccgaatcttcgatgttgcccgaaaaagatcgaactatcactattcctattgaggacatcggcgttgttgtcgttgatcatcctcagatcacactaacccattggctgataaatgctttattagaaaataatgttgctgtaataacatgtaacgaccgtcatattccgtcaggcttgctcttgcctctggagggtaacacaattcaaagcgaacgttttacccatcagatcaacgcttccgaaccattacggaaacagctatggcaacaaactatcagacaaaaaattttaaatcaggcagccttgcttaaacagcagggacgaaaaactgaaaatatgaaatactgggccgaccaggtgaaaagtggcgacaccgaaaaccacgaaggacgagcagcagcatattactggggcgaattattcgattcttcacttgacttcaggcgcgaccccgatggaaatgcaccaaacaacctactgaattatgggtacgcaatccttcgcgctactgtggcacgttcacttgtggcatcgggtatgttaccaacttttggtatccaccaccataacagatacaatgcctattgtctggccgatgatatgatggagccataccgaccctatgttgataagttggtgcttgaaataatgtctggcaccgcaatacctgacgagctgacgaaagctcaaaaaactaaactattgcagatacctgttttagatgttactatcaacagccgcaggagtccgctgatgctcgcaactcaacaaacagcagcatcgcttgcaaaatgttttcagggagaactgcgaaaagtagaatttccggaaatgggtgaatgaaattgaagccttcacttgaagtgaaggcttcaatacctaacaaaatttgatggaaagacttagtgaatataggattatgtgggtaatggttctattcgatcttccgactgagacaaaaaaggaacggaagatttatgctgattttcgcaagaaattgctgaaagatggttttaccatgtttcagttcagtatctatttgcgccattgtccgagcaaagcaaatgccgatgtccatataaaacgggtgaaactcgaactcccgccacagggacatattgggattttgtgcattaccgacaagcaatttggcgatatggaacttttttacggtaaaaagccgactgagaagaagggacatgtacagcagttggagttgttttagtggttgtattaaaagcaacagaacaaaaaaaaccggcacgcaggccggtttttcaatactgacaacaccctttttttaatcctgaatttcacattaataaacacgttttcaatacattagatagaggtatggtgtttatcaatacgtcaaagatacattttgaaagcaaatcacaacgctataacaaacatcccgttgcaaaatgcaggtgtt

SEQ ID NO: 907 - DNA, 14171 bp, synthetic construct
  source 1..14171: mol_type = other DNA
  misc_feature 1..14171: note = Synthetic
ggttataggcaaggattgatagaattgataggaaatgcgtatcagtaaatgcaattaactattaattattacctattacttattgagcaatcgcagattgcgaaacaaattgaggtggttatagtgctgaggtcccaccccttcccattccgaacagggtcgttaagctcagccgcgccgatggtactgcgtttgtgggagagtaggtagccgccattttcaggagtcttgagagaaatcaaatatctcaagactcctttgtttttatgtatgcatgtgatttacacttttatttgcttataccgtgtttttcttttgaaatcttgcggatattgaattaattgtatatctttgcaacgcagaataaaaatgcagtatcaaccatctaatataacatataccatggcaacacgcaaaatcctcggcttggacttaggcaccaacagcatcggctgggcactcattgaaacagaagatagtaaccccaaatccattctggcgatgggcagtcgcattgttccgcttactaccgacgatagtacgcaatttgcaaagggacaggcaattaccaagaatgcagaccgcactcaaaagcgaaccgcccgcaaagggctcaatcgctgtcagatgcgccgtgccatgctgactgaagaattgagacgctatggtatgttgcccgaaagaacagatgagaatatcattgacctttggcgtttgcgcagtgatgcagccacagaaggcaaacaactttccttgccgcagataggtcgtgtcttgtatcatatcaaccaaaagcgtggctacaaacattccaaggcggataattctgccgataccaagcaaacgaaatatgtagaggcggttaatcaacgctatcgtgatatacaagcctgtcatcagaccatagggcaatacttttatgagcagttgttgtcaagtgcagttcaaacaccttcgggaccgtactatacgtatcgcataaaagaccaagtacttccgcgcgaagcgtacatcgcagagtttgaccggattatgcaagtgcaacgagtgttttatcccgatgtgctgactgatgagttgatagacactctgcgcaatcatatcatattctactattgctgtccggtaaacgcagcccgaagcagaagagtcacccccaaatgcccataaacaggcatattggtatgtatttttgcaaaagcgagccccctatgcaaaaagtaccagttgcggattgcttgtaggtggggctaaattttcccctttaatcactcattttagagccatttaagggctccaatgtaggcatataagtcaatatagtacaccatcacctaaagtgtcatcgtaacaacacttttaccggacagcaataatattctaccaacgtccgctgaagtcttgcaagcatctggtcagtctgtgcgagtttgaaaagcgtccgttcaagcgggaggatgggcagattgtctatagtggtccaaaatgtgcaccgcgcacttcccccttggcacaactttgcaccgtatgggaggcggtcaataatatcactctcaccaatcgccaaaacgaaacgtttgaaatcacgcaagaacaacgtgtcgcgatggcggatttcctcaatcagcacgacaaaatgggcgtgaaagacctgcaaaaaatactcggtatctcgcccaaggacggttggtgggctggcaaagccatcggcaagggattgaaaggcaacaccacattcacacaactgcgcgaggcgctgggcaatctgcctgatgccgaacacttgttggagatgaagttacacttggtggattccgccgtggataccaccacgggcgaactcatccgacaggtctcgccgcaagtggaggaagaaccgttattccgcttgtggcatctggtctattcgttacagaatgaggatgaactacgcaaggctttgcgtaagcagtttggcatcgatgatgaagagattcttgccaagttgtgtaagatagactttgtgaaacccggctatgcaaacaaatcccataagtttatccgcaaactgttgccctacctcatggaggggtatcaataccatgaggcgtgtgcgcatatcggtgtcaatcactcggatagccttactgcagagcaaaatgcggcacgcccgctattagacaaaatacctctcttggagaagaacgaattgcgccaacctgtcatcgaaaagattctcaatcagatgattaacgtggtcaatgccctcaaggcggagtatggcgacatcgatgatgtgcgcattgagttggctcgcgaactgaaatcctccaaagaagagcgcgaggcggcattcaaacgcaacaatgagaatgagcggcaaaacaaaatatatgaggacagaatacgcgagtatggcatacgaccgtcccgctcgcgcattcagaaatacaagatgtgggaggaaagcaatcacctgtgtttctattgtggtaagcctgtgaatgtcacggatttcctcgcaggcgcagaggtggaaatcgagcatattatcccgcaaagcgtgctgtttgatgatagttacagcaacaaagtctgcgcctgccgtacctgcaatcataccaaaggaaaccaaacggcgcgtgagtttatggagacgcactccaaagcagaatatgaatcctatctcctgcgtgtggacgatgctttcaacgcacaccgcatcagcaaaacaaaacgcgatcatctcttgtggcgcaaggaggacatcccgcaagatttcatcgaccgccaactccgtcaaagccaatatatcgcaaagaaagcggcagagattcttcgccaaggctatcgcaacgtgtacgctaccagtgggagtgtgacggatttcctgcggcatcaatggggatacgatgaaatcctgcatcgtcttaatttgccccgttaccaacaggttgaagggcttacagaactggttacctacgaccactgcgggcaagaacaccaacaggagcgcatcaaaggttggacgaaacgcctcgaccaccgtcatcatgccattgatgcgctgactattgcactcacgcagcaaagtgtcattcagcgactgaatacactcaacacttcccgcgaacaaatgtttgacgatttaggaaaacggactgatacgcccgaatatacagagaaacgctccttgttggagaattggatagacgctcagccgcatttctccgtacaggaagttacggacaaagtggatggcatcttggtctcattccgtgcaggtaaacgtgctgctacgcccgctaaacgtgctgtctatcagaatggtaagcggcatatcgtgcaaacaggactgcaagtgccgcggggtgcactctccgaagaaaccgtatatggcaaattgggcaataagtatgtggtgaaatatccgcttggtcatcagagtatgaaggtggatgatattgtcgatcccaccattcgtgaaatcgtccgcactcgtctcaacgccttcggtggcaaggcgaaagacgcttttgccgaaccgctctattcggatgcggcgcaccaaatgcaaatcaagacggtacgttgctacatgggactgcaagacaaggctgtagtgccggtacgtttcaatgcgaaaggtgaacctgtcggctttgtcaagatgggaaacaaccaccatattgccatatatcgtgatgccaatgggcaattccaagagtcggtggtctcgttttggcaggcggtggagcgcaagcgttatggcatacccgtggtgatagagcacccgcacgaagtctgggataaactgataaatatcgacaatatcccgcaagagtttcttgaaacgttgccccgtgacgattggcagtttgtcgtgtcgttgcagcaaaacgagatgtttatcctcggtatggatgacgctgattttgaggcggctatggagcaaaaagactatcgcacactcaacaagtacctgtatcgtgtgcaaaagatagcaacgaaaaattactatttccgctaccacacagaaacaagtgtagatgacaaatacgatggagagaaaaatgagatgtggagtaaaaatatgaagaaacttataaatatccgtagtttcgatgccttcttctcccagcacccccacaaagttcgtattaaccttttaggcgaagtctctgcattatgattaagcgcatcctttgtttcaccaaccccgcctatttgagtctccgcctcaagcagatggtcatcgaaatccccgaagtggtttatggcaagggtttgctcgactcgctccgccagcagggcgtgcgcaccgttcccatcgaggacatcggtgtggtggtgcttgacaacaagcaaatcactgtcacacaagcccttatggcggaactccttgacaacaacgtcgccatcgtcacctgcgacgaccgccgtcaccccgtcgggctcttcctccctttggacgggcacaacctccaaaacgaacgtttccgcgagcaactcaacgcctccgaacccctccgcaagcagatgtggcaacagaccgtcaccgccaaaatactcggacaagccttcgtcctccgcacgcaacatattgagaatcagaacctcctcgcatggtcgaagtccatccgttccggcgacgccgacaatctcgaagggcgtgcggcggcatactattggcgtaacgtcttcggtgacacctctttcgtccgcgggcaggagggcgacccgcccaacaacctcctcaactacggctacgccattgtccgcgctatggtggcacgcgccttggtcgccgcaggactgctacccacgctcggcatccaccaccacaaccgctacaatgcctactgtctcgccgacgacatcatggagccctaccgaccctacgtggacatgctcgtgctggaactccgccaacgttaccccgacatctcccgactcaccaccgacatcaaacgcgagctgctgggtatcagcacgatggatgtcctcatcgaaggcaaacgcagcccgatgatgatagccatccagaccacggcaaacagcgtccaacgttgtttctccggcgaatcccgcaaaatcatttaccccgattggtaaatgcagaaaccgttgcaccatcataaccatatcattatgcgccccatattatatcgtatcttcttcgggtcaattacggcaacgacacggcaacgacagccgagtatcatgagggcttgccgcgacaataacaaatgaattttatggataatgtgtgataatacggcgaagccgtccgttctacaaacagacaaaacaacttatatatcaacgtcttaaatcaataatcctatggcaaaagcagatttggaagtcccctttgcgggcattcacggcagaatcgggcacgacagtgaaatctactacacccaacgttacggcaagacggtcgtttccaactaccccaagcgtcgcaaccccaataccatttccgaccaccaaaaggcactgaataccaatttccaagcggcagtcaagcgtgctgctgccgaactctccgaccctgtacgccgtgcctattggcagaatttgttcgaccaccagcctgccctgcccaaatacaaagtcctccgcaacttcatcatcgcccaactcaccaagaaccccgaatgatattccttctggttcttctaaagagaactcgtaggagcgataatgcaaatagtaaaatggctataaatcttcaaataaatcgtacatcgtaaatttgcaaatcgtacatatttgatgagtcgttttagtgaatatagaattatgtgggtattggtgtttttcgatttgccgaccgatacgaagaaggagcgtaaggcggcagccaagttccgcaagcagttgttggaggatggtttcacgatgtttcagttctctatttacctgcgccattgcccgagtgcggagaatgccgacgtacacatacggcgtgtgaagagcaccttgcccgtatatggaaaggttggcatcatgcgcattacggacaagcagttcgccgacatgctcttgttcgactgccaacatgccgcccctttgaaccaacctgtccaacaactggaactgttttgacgcccccttcactggtgtcatgtggatacaagcatttgtggggacgtgaagcgtatggcaggtgcgcttgtgcgcactgagtgcctgcggggtccccattaagcccgtgggcttaatggggtgctttcatagcgacacgaagccctgtgggctgagtagaactccttattgtctcgcgtcgtcatgtaagtacatcgccggagatgcggatgccctcgtccgcgggtatacactcaccagactaatagaagaaaaatacggaataacatagatataaatactgaatctacatcataaaaactgggcattgatacagaaaaaagcaggtcttccgacctacttttttctttcctatacttgtgtgtaaattattgataatcatttctttcctaatactatgttgtataggaatgtatcaattgcaaaatttgaaggatatacacaactctatctgcatattgggtgtatcgcttgtaagttgtataggaatgtatcaattgcaaaatttgaaggatatacacaacaaatcagatacaaaatatccaagattcagtatttcaaagaacacaatgtcaaaaacgacaccgcaaagttactctatttcacggacttgcgcaagtcttttttctaaatcattaagaaaaatgcagattatatttgcagatgccgattatttattgtacctttgcaccgtaaatatctgaaggatatacacaataaggattattccgttgtgtaaacattcagggtgggacattgtctcgcccttttttgtgcgtgaaagtaacggatatagcgtaaggtgctacatgatggcggagcgtgctgcgcaggcgcaaaataacattttgtttgcggatgtgcgaaaaaagttgtacatttgcgggctgattgggtgggaataaaggcttgtggataatggtcgcgaaactaattaaactaacgatatgaattttattgaaatcattacgaaactgttcggcaacaaggcgcagaaagatatgcgcgccattgcgccgtatgtggagaagataaaagcagcctacacggagattgacgcgctctccaatgacgagttgcgtgcgcgcagccaagcgttgatgcagcgtatccaagaccaagtggcggacaagaaagcccgtatcaaggagttgaaagcaggcatcgagggactggagatagaccagcgcgagaaagtgtacgacgaggtggacaagttggaaaaggatatccaggaggattacaaaaataccctcaacgacatcctgcccgaagcgtttgccattgtcaagagcaccgcacaccgctttgccgagaacgagcagatagtggtgatcgctacacagatggaccgtgacctcgcggcagacccgcgcttcgacttcgtggagattgacggcgacaaagccatctaccacaaccactggacagcaggcggcaacgaaatcgtgtgggatatggtgcactatgatgtgcaactgattggtggtgtggtacttcaccaaggcaagatagccgagatggcgacgggtgagggtaagacgctggtggctacgctgcccgtgttcctcaacgcgctcacgcacgagggtgtgcacatggtgacggtgaacgactacctcgccaagcgtgactccgagtggatgggaccgctctatatgttccacggtctgacggtggattgcattgacaagtacaagcccaacagcgatgagcggcgtcgcgcgtacgcgtgcgatataacattcggtaccaacaacgagttcggtttcgactatctccgcgacaacatggcaaccaaccccgccgacctcgtgcagcgcggacacaactacgccatcgtcgatgaggtggactcggtgttgattgacgatgcccgtaccccgttgattatcagcggtccgatacccaaaggcgaggaccagatgtacgacgagtacaagcaccgcgtggagttgctggtacgcacccaacagacgctgaccaccaaactgctgacggaagccaaggctaagatgggcagcaccgatgccaaagagcgcgaagcgggcgagttagcgttgttccgctcgttcaaaggtatgcccaaaaacaaggcactcatcaagtatctgagtgagcccggcatcaaggtgcgtctgcaaaagacggaggagttctatatgcaggacaacgagcgcaatatgcacgtggcaaccgacgaactctacttcgtgattgacgagaaaaacaagactatcgaactgacagacaagggtatagacaccctgacgggcaacaccgaagacccgcagtttttcgtactgcccgatgtcggcagcgagatagccgagatagagaaaatgccaatctccgctgaggagaagcaggcgaaaaaagacgaggtgctgaccaactacagcatcaagtccgagcgcgtacatactgtacatcagttacttaaggcatacaccctcttcgaaaaggacgtggattatatcatcgacgacaaccaagtgaagattgtcgatgagcagaccggccgtgtgatggaagggcgtcgctggtcggacggcttgcaccaggcggtggaggcgaaggagaatgtgaaagtggagggtgccacgcagacctttgccactatcacgttgcagaactacttccgtatgtacaaaaagttggcgggtatgaccggtaccgccgagacggaggcaggcgagttctggaatatctacaaactggacgtggtggttatcccgaccaacaagcccatcgcgcgtatcgatatgaacgaccgtatctaccgcaccaagcgcgagaagtacaacgccgtcatcgacgagattgtagcactcgtgggcgcagggagaccggtattggtaggtactaccagcgtggaaatcagcgagttgctgagccgaatgttgaacctccgcaagataccgcacaatgtgttgaacgccaagttgcaccagcgtgaggcggagattgtggcgcaggcaggtcgctcgggcgtagtaactatcgccaccaacatggcaggtcgtggtaccgatatcaaactcacccccgaagtgaaggctgcgggcggtctggccatcataggcaccgagcgtcacgagagccgtcgtgtggaccgccagttgcgcggacgtgcaggacgtcaaggtgacccgggtagcagcgtcttctatgtcagcatggaggacgacctcatgcgtatgttcggctccgaccgtctggcgggggtcatggacaggatgggcttcaaggacggcgagatgatcgagcactccatgatttccaactccattgagcgtgcgcagaagaaggtggaggagaacaatttcggtatccgcaagcgtctgattgagtacgacgatgtgatgaaccagcagcgcaatgtcatctacgccaagcgtcatcacgccctgatgggtgagcgtatcggcgtggacatcactaatatgatttacgacaccgccgaggctatcattgccgaggctcgcgaagccatggactatgaggggctgcagttcgacgtcatgcaggtgttcgccatggaggtgcctttcgacgaggataccttcaagagcgcacgcgagagcgcgttggctgagcaactggcagaagccgctctcgacaccttcaaacgccgtatggagaccctgcagaaagtggctgaccccgttatcaagaaggtgtacgaggagcgcggtgcgatgtacgagaacatcctcatccctatcaccgacggcaagcgcgtctataacattgccgtcaacctcaaggcagcagccgaaagcgacagtcgcgaggtagtgcgcgagttcgagaagcgcatggtgctctacgtcatcgacgacgagtggaaagagcatctccgccagttggacgacctcaagcagtcggttcagaacgcctcctacgagcagaaagatccgctccttatatataaattggagtccttcaatatcttcaagcagatgcttgaccgcttcaaccgccgtgctatcgctatcttgctccgcggacagatacctacccgcgacccgcaggaggtgcgtcaggcacaggagcagcggcaggattactcccgctaccgcacccaaaaggatgccgtcagtcgggcagccgctgccagcggacaatcggcagcagcaggacgcgacacgcgcgagatgcaacgacccgaacctatccacgtggagaagaaaccgcgccccaatgacccgtgtccatgcggttcgggcaagaaatacaaacagtgtcacggtaggctggaagcatgatactcgacttcgtaacgtggaacgtggaccccatcctgattcacatcggtgatgggggcattcgttggtacggactcttgtgggcggtgggcatctacctcgcctacctcattgagcgcaaactctataagaacgaacactgtcccgacgattgggcggacaaactgttcatctggatggtggtcggcgtcatcgtcggtgcgcgattggggcattgctggttctatgagtggcacgatgtcacgcttcccggtatggcgggctactgccatgccatgggtatctctaccgaccccgtacaaatcttcggctggaccatcaagtaccgcaacccgtacatcgagcatccgctcaaactactcaaggtgtgggaaggcggactggcaagccatggcggtgccatcggactgctgttggcggcatatctcctcaacaagaaagtgttctccaaacgccccgagttccacacttcactcctgtggattatggaccgtctggtgattggcgtgtgtgtcacagccactcttatccgtctcggcaacctgatgaactccgagatttacggctgcccgaccgacctgccatggggctttgtctttgtgcggaacggagaaacggtgccctgccaccccacacaaatctatgagatgctgtattgtatcgtggcatttgtcgttacgtggctgatgtactggcgcggcaaggcgtacaagcgcgaaggactgctcctcggtgtattcttggagatagtcttcttcacacgtttcctgctcgagttcatcaagaacgaccaggaagcctttgaggctaaccacctcctcaatatggggcagtggctctctatcccgttcatcatatggggaatatacctcattatccgtgccttccgccgccccgccttgccataggacaaaccctacaggcacaagcacgaacctatcctaaaaacagaggctgtctgacaagtatagacagtctctgtttatgtattagtattctttttttacttgttagacagcctcctgtttatgcatttagtgttgggggacgacgcggctcgcgtcgtcattcataagtagcgcactgagtgcctgcggtgtccccataaatccgcggacgtaatggggtgctccaagcgaagcgaaagcctgtggcttgagcagaactcctcaccggctcgcgtcggcaaatatcattacgcattgtacataacctgcacattaattattaactattaaccattactactattaacccgatgtcccatcgggttaatagtatgagattagtatgtgattagtatgttattagtatgtgattgccgagtgaatgtcgggggtatgtcgggggaatggatggccgattcgtgatgattcagtgtaggtgtctgttcaaaaaagcccctataccggcagtcgggagcggtataggggcgagagtaatgggaaaaatcctatcagcctacttgggcaccgttcttgacaggggcggagacggtggttacaaccagttttccatcggcatccacggccgagagaatcatgccctgcgactcgatgcccatcatcttgcgcggcgggaagttggcgataaagaggacttgcttgccaaccaataccgacgggtcggggtacgattgcgcgataccggacaggatagtgcgcccgcccatgccgtcgtccaaacggaactgcaggaggcgttcgctcttcttcaccggctggcaatccagcacggtagccacgcggatgtccactttgtcgaagtcgtcaatcgtggtgtcagccttgatgtcggcggggtgccaggtgcgtagtgcttcggcttgcacagcggcttcgttctcggctttgatgcgtgccaggcggtcgagttgggctttgatggcatcgtcctcaatcttctcgaagaggagcgatacctcacccagttgctgcccctcagggagcaggttgatattgccgagttctgcccaatttgcagcattcatgcccaacatcttacgcagtttctcggacgagaacggcaggaacggctcgaaggcaatcgacagattagcagcgatttggagtgccagattaaggatagtcgccgtgcggttgaggtcggttttggcgagtttccaaggctcggtgtcggcgagatacttgttgccgatgcgggcgaggttcatcgcttccttttgcgcatcgcggaaacggaagtcgttgagcaggcgttccaactcgctcttgacgttttggaagtcggcgatggtggcttggtcgtagtcgttgagcgtacccgccgcaggcactttgccgccgaaatacttgttggtcagcacgagtgcgcggttgacgaagttgccgtatatcgccactaattcgttgttgttgcgggcttggaagtcagcccacgtgaagtcgttgtccttggtctcgggcgcattggcagtcagcacatagcgcagcacgtcctgtttgcccgggaaatccacgaggtactcgttgagccataccgcccagttgcgggaggtggagattttgtcgccttcgaggttgaggaactcattggcgggcacattgtcgggaaggatgtatgtaccctccgccttgagcattacagggaagacgatgcagtggaagacgatgttatctttgccgatgaagtgaatgaggcgcgtggaggagtccttccaccatgtctcccatttgccgtattcggggtgcgcatcgcagagttccttggtgttggagatatagccgatgggcgcatcgaaccagacatagagcactttgccttcggcaccctctacgggcacggggataccccagtcgaggtcgcgcgtcacagcacgcggacgcaaaccgccgtccaaccacgacttgcactgcccatacacattgggacgccactctttgtgctcgttgagaatccactcctcgagccacgactgatattggtcaagcggcagataccagtgggtggtggggcgtttggtcagtggattgccgttgatggcgttgtaggggttgatgagttcgtcgggcgagagggtggctccgcacttctcacactggtcgccgtaagcaccctgcgcatggcagcgcgggcactcaccgcggatattgcggtcggtgaggaactcctgcgtctcggggtcgtagaactgctcggtggtctgttggataaacttgccgttgtcgtacagtttgcggaagaagtccgacgccatcttgtggtgcgtgggacttgtggtgcgcgaatagatgtcaaacgatataccaaagccctcgaaagagtccttgataagtttgtggtagcggtccaccacctgctgggtggtgatgccctctttgcgtgcgcggatggtaacgggcacaccatgttcgtcgctaccgcctacgaacagcacgggttcgcctttcagacggagatagcggacataaatatctgcgggtacatacacgcctgcgaggtgcccgatatgcacgggaccattggcataaggtaaggctgccgttacaagagtacgttgaaatgccatagttatttgagtagtttatgttttttagttgctttgtcgtcgtattccacgcccattgcgggggcgaggtagttgtgctccaactcgttgatattcaccgtatggatgtcattgccgagtgccacggagatgcgtcctgtctcttcggagaccacgatagcgagggcatcggtcttctctgccagtccgagtgcggcacggtggcgcaatccatagtgcttgggcaggtcctgccgcttggtgacgggcaggatacacgccgccgactgcaaacggcc

SEQ ID NO: 908 - DNA, 14144 bp, synthetic construct
  source 1..14144: mol_type = other DNA
  misc_feature 1..14144: note = Synthetic
gcggcaagggggcatggctatgccaccgacgagcaaaaaaactacctatacacaaaaatatacgtttttatttttatgatgaaatatttggagatgaacataaaaagcaaaacttttcttacgaagcaatatgcgctacgcttggaaacaaatacacgaaaaattaagccaaatatattcaaatatgcaagagaacaacaacccatgtcaattatcaacaaaaccattcgcgataagtatcttatatcgaactcacgttatcataatatcgcttttttaatggccgactaattagttcctcataatcagtccctcgtaattccttgtaattaaaattagaaacaattagcaattagattgtttcagtatagttttagtagatgaaaaacttgcattttccggtaacacaaacaatacgcattctgtatgccgtttgcgcatagacactttggtttcctataacaaaaaagggcgagacaacgtcccaccctaaatgtttacacaacggaataatccttattgtgtatatcactcaaatgttcggcaaaggtagtactttattttgaataatgcaaaaatattctactttttttgcattattcgttatttttctgtatctttgcgccaaagtgatttctattaaactatgcaaacacgtaaaattctcggattggacttaggtgtcggttctgttggttgggcactcatagaaacagaggatgaccaaccaaagtcaattttggcgatgggtagtcgtattgtgccactgagttcagatgacagcacgaaatttcaaaaaggacaggcaatcacaaagaatgcagagcgtacgcagaagcgcactatgcgcaaagggcttaatcggtatcagatacgtcgtgctttattgacagatttattacgtcgcaatggtatgttgcccgaatatatgaatgagaatgtaatagatttgtggcagttgcgtagcgatgctgccacagagggtaagcaactttctcttccacaaataggacgggtactctatcatatcaatcaaaagcgaggctacaaacattctaaagccgatatttctgcagatgcgaaacaaaccaaatatgtggaggctgttaatcaacgttatcgtaatatacaagccttgcatcaaacaatagggcagtatttttgtcagcagttaaaagagactgctgtgcagaccgagaaaggtgtgtactatacgtttcgtattaaggaaaaggtgttgcctcgtgcttcgtatgttgctgaatttgaccagattatgaaggtgcagcagtcgtattatcctaatgtgctgaccgatgaactgattgatactttgcgtaatcacattatcttttatcagcgtcctctcaagtcatgcaaacatttagtggggttgtgcgaatttgagatgcgtccttacaaacgcaacgacgggcaaattgtttatgggggaccgaaatgtgcgccgcgcacttcgcctttggcacaactctgtgctgtgtgggaggctgtgaataatatcacactgactaatcgaagtaatgaaactttggaaattaccccaaaacaacgtaaggcaatggctgattttctctatgagcatgagaaaatgggtgtcaaagacttgcaaaagatactcggtatctcgccaaaagatggttggtgggcagggaaggctattggtaagggaataaaagggaataccacttatactcaattgcgtgatgctctgggaccaatctctaatgccgctgatttattgagtatgaagatagaactgacagattctatggtggacaccactacggcggaactgattcggcaagtctcccccaatgtagaggagcagccgttgtatcgtctgtggcatatagtttattcagcacaaaacgaagacgacttgcgaaaggcactacataaacaatttgacattgaagatgaaaaggtggtggcgaacttgggtaaaatagactttgtgaaacccggttacgcaaataagtcaaataagtttatgcgcaaacttctgccataccttatgcaggggtataaatataacgaggcgtgtgcgcatatcggcgttaatcattccaatagtcttactgcggaacaaaataccgtgcgtccgctattagacaagatacctcttctggagaaaaatgcactgcgtcagccggttatagagaaaattctcaatcagatgattaatgtagtgaatgcgcttaaagcagaatttggcgatatcgatgacgtgcgtattgagttggcacgtgaactcaaagaatcgaaagacgagcgggaaagtgccttcaaacgaaataatgaaaatgagcgcaagaacaaagagtacgaagcgcgtattcgtgagtatggtatccgcccttcccgttctcgtattcaaaaatataagatgtgggaggaaagtcagaaaaagtgtttctattgtggtaaaacaatcgatgtcgttgagtttttgaatggcgtagatgctgaaattgaacatatcattccgcaaagtgttcttttcgatgatagttttagcaacaaagtttgttcttgtcgagattgtaatcatacaaaaggcaatctgacagcacgtgagtttatggaacaacattctgctgctgactatgaggcatatttgagacgtgtggatgaagcatttgacgagcatcgtattagcaagaccaaacgcgatcatcttttgtggcgcaaagaggatataccacaggattttattgaccgccaactgcgccaaagccaatatattgctaaaaaagccgctgagattttgcgtcaaggggtgcgtaatgtgtatgctaccagtggtagtgtaacagattttttgcgccaccaatggggctatgataatatattacattacctcaatctgcctcgttatcagcaagttgatgggctgacagagtcggttacgtatgatcattgcgggcaaaaacatcaggaggaacgcattaaagattggacaaaacgtcttgaccatcgtcatcatgctattgatgcacttaccattgctcttacgcagcaaagtgtcattcagcgacttaatacgctcaacgcctcgcgcgaagagatgaaaaacgatttagggcaacgaattgacacgccggaatataccgagaaacgctctttgcttgaaaaatgggttgatatccaaccgcatttctctgtgcaggaagtaacggacaaagtggatggtatattgatttcgttccgtgcaggaaaacgcgtcgccacacctgccaagcgggcaatttatcagcagagaaaacgctgtattgtgcaaactggactgcaagtgccacgtggtgctttgtccgaagaaacggtctatggcaagttgggaaataaatatgtggtgaaatatgcgcttactcacccaagtatgaaagtggacgacattgttgacccaactattcgcgagatagttcgtaatcgtctgaatgcctttggcggtaatgtaaaagatgcttttgcagagtctctctactctgatgtagcacacaagatgcaaatcaaatcggttcgttgctacaccaatttgcaagataaagccgtttcggcagtacgtttcaatgcacaaggtgaacctgtcggatttgtcaaaatgggcaataatcaccacatcgccatctattgtgataaaaaagggcagtatcaagaatcggttgtttcgttttggcatgcagtggaacgtaaacgctacggcatacctgtcgtgatagaaaaaccgcaagaggtttgggacaaactgatagacatagacgcaatcccgcaagatttcttggaaaatttacccaaggatgattggcagtttgtagtatcgttgcagcaaaatgagatgtttattcttggtatggatgaggctgattatgaagcggctatggaacaaaaagactatcggactctcaataagtacctctatcgagtgcagaaaatttcttcaaaagaatattacttccgctatcatacagagacatctgttgatgataaatatgaaggcaaaaataatcccaatatcagtattgaattacaaaaactaaagcggattaaaagtttcggtgctttattctctcagcaccctcataaagttcgcataaaccttttaggcgaaatctcagcactatgattaagcgtattctctgtttcaccaaccccgcccatttgagtctgcacctcaaacaactcgttgtggagcaaacgcaggcggataaaacagagaccatcaagcacaccattcccattgaggatattggcgtagtgataatggagagtccgcaaattactatcacacaggcacttatggcggctttgcttgataataattgtgctgtcatcacgtgcgattcgcatcatcttcccgccggattgttgctcccgttggacaatcataatctgcaaagtgagcgatttagggagcaaatcaatgcttccgaaccgcttcgcaaacagatgtggcaacagactattgtctccaaaatcaatagtcaagcctacgtcttacgccggcagaatatcgaatgtcgaaatatggagatgtgggcaaaatctgtccgttccggcgattccgacaaccttgaggggagggcggctgcctactattggcgcaatgtctttggcgattccgatttcgtgcgcgggcagttcggcgatatgcccaatggactgctcaattatgggtattccatcgtgcgtgcgatgatggcacgtgctttggtggctgcgggattgttgcccacgctgggcatacaccaccatagtcgctacgatgcctattgtctggcagatgatattatggaaccctatcgcgcctttgtagatttacaggtgctggatatgtggaaacgctatggcgatgtggaagaactatcgcccgcgttgaaaaaagaattgctttcgttagccaccatagatgtacaaatagaggcacatcgcagtccgatgatgattgccatgcaaaccactgccaatagtgtacaacgctgtttttcaggtgtttcccgcaaaattatttatcccgactggtagtgcgtttgcagtagggtggggatatggtgcgaaacaagaggaaaaatggtggaaatctctgcatacgggaaatagaatacgtttgttggggaaagatgtctcgatttagcgaatatagaatcatgtgggtacttgtcctttttgacctgccaaccgacaccaagaaggcacggaaagagtatgctcaatttcgaaaacaactcttgcaagacgggtttacgatgtttcagttctcaatctatttgcgtcattgccccagtgcggaaaatgccgatgtgcatatccaacgtgtgaaacgatttctacccccatcggggaaaataggggtcttgagaatcaccgacaagcaatttggtgatatggagattttcgattgtcggaaagaaaccatactctcccaaccggttcaacaattagaacttttttaataacgtcagtccgatataagatatttccatcgaatagtttttttgataattgatttttgttttttgtcctcttgcatattttagttgttgtttcctttatatatctgtctatatttagtttaatttttcgtgtatttgtttccaaaacgcagcgcacattgcgcatgaacaagagacaatgttctattttgccatattccacatagccatttttacttctttatgccttacttctccatacctcacttttccatgctttatttgccccaaacaaccaatagcacgataacataataaaatcaggcttaaaatcattgcttaaacactgcctgataccggtatcgaatgaaacagcactatacaaatatattatcaaaatagaaatactatcaaatagaagatgtgtcaataaaacatactacaattaaaaagcacctgaaaaaacaactaaaaaagcacctgacatacataaaaatgcgactcgcctgagccgcatttttattttctaaaacaatgtgtaagttgttgattttctttgcattccaaagaatatgttgttttagattgcaaagttataaaatttgagtgatatacacaacaactacgtttgactttacccctaactcgggttgttttagattgcaaagttataaaatttgagtgatatacacaacaccgcactcaaagagcgcacgctcaacagcgttgttttagattgcaaagttataaaatttgagtgatatacacaaccggcttgtctgccgtgtgtgcgactacatagttgttttagattgcaaagttataaaatttgagtgatatacacaacgataagacaaacctcgtctttccaagttatgttgttttagattgcaaagttataaaatttgagtgatatacacaacagcaatacggctatatgtttatgaaaccaagttgttttagattgcaaagttataaaatttgagtgatatacacaacctcttgccgatgggtttaactctgttcttgttgttttagattgcaaagttataaaatttgagtgatatacacaactctatatcgacccatgattctagagttaagttgttttagattgcaaagttataaaatttgagtgatatacacaacaaaaggtgcgttctgctcaattccgttctgttgttttagattgcaaagttacaaaatttgagtgatatatgtaatgctacaagaatgattattagaaaaatgcagtaaagttatattttgtcggtagaaaaattgcataacacacaaaatatgagtaattttgcatattgataaataattcttaagacttgtgtatagataccgatatatgtgcttgttcagtgtattatatatatgtatggccctatctgcaaatacccatatagtttatacaacttctattgaaaaaacaaaagaggtgataatatcttgccctttctattccacttcaattctactttctgattctccacaaggtataacatctgtttccgatatggatgcaaatggaattactcgtcgtccacggcgcattgccggtggagacaaggatagttttggagaaggagaggatggggaaaaactgccggaggtaactaatcaagaacagaataagaatagcccaataggagatattcctacaggttttatggttctgctgtgtactttatatattggttatctttctgtaaaaaaacggtggcacaaaaaagagactgcctaatcagttaggacagactcttttttatgggtacgcagattagaaattatctacatgcaattcgaaataagattgcggatgagcgcaagtaggacaaacttccggtgcctttgtgccaaccacaatatgaccgcagttgcgacattcccataccttcacttcacttttctcaaaaacggtagcggtttcaatgttcttcaataacgcacgataacgctcctcatgatgtttttcgatagcggccaccagacggaatttgtgtgctaagtcggtaaatccctcttcctcggctgtttttgcaaagccatcatacatatctgtccattcatagttttcactctcggctgcgtcttttaggttttctgccgttgagccgatgccatcgtggagttctttgtaccacaacttagcatgctctttctcgttgtctgccgtcttgagaaataactctgctatttgctcaaaaccatcttttttggcctttgatgcaaaataggtgtatttattacgtgcttgactttcacctgcaaatgctgcttccaaatttttctcggtttgggtaccggtgtacttgtttgccatagttttattatattagatttgttaaataagtcctgcaaaagtactacatattttttgtatttgcaaataggggacgaaaaaaggttgcataggtcgaattgagaatgatggaaagaggaaacctaaaaaacggaataggtaagttctatgtgggttatttgcagggcattgtccttttgtctttgtaaatgtaatgatcgtgtaatggggcattttttctttaggaacgctaatcagcgtgtaattggacgttaattttttgaacatataatttgccatataattggaccattaatgcaacacgtcaaggaaacaaatacacgaaaaattaaatcaaatatagagaaatatggaacaaatatatttgaataatttttggttgtatttggagagacaacatcaatcggcgacataactatgcgctataaatattttatagaacagacattaaaataaatttgcatgcctgcaaatttattcgtatctttgcggcgtaaaactccccggacggagtgaatacttgtctgcgtgccggtggacaatcaaaactattggcacaatgcaaaacccacgcggtggcttcctattttactattactttaatacaaggttgtaaaaacaactatcatcccgaatagtgtaacgagtattgaagatgctactttccatgattgttcggggcttacttctgttactatcccaaatagtgtaacaaggattggggtgggtgctttctttggttgcaagggtcttacatctatcactattcccgacagcgtaatgcgcattggctataatgctttttccgattgcacgggactaacctctataacatcacttgccactacaccgccgactataaataccgacgcattttcggacgtttctgttgatattcctgtgcatatcccttgtgggacaaaggaagcctattcggcggcaaagggatggaatttgtttaccaactacaaggagcaactaaccgccatcgtaaccatcacaagtcaagatgagagcaaaggcacgattacgataaccaaacaggcgacctcttgcgaggataacgaatgtacatttgtagcaacgcccaaagcggattattgttttgtacaatggagcgatgggaatactgataacccgcgtaccatcatggttacggaggatatgactctgaccgccaagtttgaggcgacatccgtagaggcaattgaagaagtagcagataatcaacctgcgacaacgcagaagattgtacatgacgggcaagtttacattctccgcgatggcaagacttacactgttgtcggacaacgtgctattgacaagtaacaatgtatgcaagagatatataggctgctcggaccgggcagcctatatgttgtttgtgggttatccactcggtatggactcggtatgaggtcggatttctgttgttagagggaagaaataagaaaaagcgcgctcgctgacgctcacaaagcagtgctttgcgcttttccttttttttgggggtaacctatgcggcttatttgttagtgatgtttacatccatgtgcgggaatgcaaagttgaaaccgcgttgcgggagttcggtatagaaacggagattcaggtcgtagaatacatcccagtagtcctctttgtgcacccaggcacggacaacaaacgagatgtcgttctcgttgagcgaagcgagtgccacaaacgggtccggaatcggcagtccgtcggtattcaccgccgagcgtgagtttgtcttcgggcgttggtccgccgaggtgagaatacgcttgtcggagcgcacaatctccagaatcgcctccatacatttctctgcgtcggacccatattccacacttaccgtccaatttacacgtcgcaatggttgcgcggacacgttctcgatattgctgctaaacaatgctccgttgggcagcacaacgacacgattgtcgggcgtcagtaccttggtagagacgatagtaacctccatcaccgtccccgaaacaccggaggctgtaacgaaatcgcccgctttgaacggtctgaatatcagcaacataataccgccggcgaagttctgcaccgtccctgacaacgccatacctattgccatacctccggcagtgagcagggcggcaaacgaggtggtatctacgccgagcgtgccgatggtggcaagcacaagaagcaccgtgagcgtgatactgacaagggacgagataaacgtcgccaaggtccgctccgtgtgtctgcgctcaaagacgcgcaccaacagtatcttcacgcgcttgatgagccatgcgcctatcaggtagatgacaaacgcgacaagcactttcaagccaaaatgaattgcactatccaagaccccatgccaaaacgactcggggtcggtggttgcctgcttgatgatattctccgttaccgcacggatagagtcggaaggcgggatagcgggtgtgggtacctctatatcaagaaaaagcatggttctgattaggaattaggaattaagaattaggaattaggagacaacctttcaaaagccgcttaacctatgctgtcgttgccgtctcgttgccgtaaatggtattatgaattatgagattgtgttcatcattcatcatctcaggcggtcggcagcgcggacaagtgcctcgtctttgagtatgcggcgagtagccatcagcgacagaaccacattgataagcggtatgcctgcccatacattcagataccaatcggcaccttccaacaacgccccttggattggttcgttgcctttcacgatataagcgatgtagagcgcgagcagggcatagtagccaagacacaacaccacgttcaccacattgattcgcgcctgcaacagtcggcgtttgaataggaaaatgtttaccaacgcgatgaccggcacggctattgtaagcaccgccaacggccatttctggaaggtggtcagtgcgatatattccgtacccgtcggggtcagaaactgtaccggcgcaaagaaacaaagcagtgtgccaagcactaccaccaatagcaaatagatagtttgaatacgttgtatcataattatatttatctgattatcagtcgtgtaggagcatttaagaatatcgtatatccgcacttttctccattaaagaccatataaaagaattattaaacaggctacgttgattggcgttggtcctacattgatgacccttctgccggttggacgacaccgtctttcaagcggtatctctcgcctgtggcgggacaggtggcgagaccctgttcgtcaaaagtgagtctctcgccattacggctcacccacccgatacggcgggcgggattgcccaccatcagagcgtaagcggggacatctttcgttaccaccgaccccgcgccaatcaggcagtactcgccgagtgtgtgtccgcagacgatggttgcgttggcacccacactggcaccgcgtcgcaaaatcgtctctttgtattccgccttgcgactcaccgccgcccgcgggttgatgacattggtgaacaccatactcggaccgaggaacacatcgtcctcgcagcgcacgcccgtataaaccgacacattattctgaatcttacaattgcgccccaacaccacatcgggcgagataaccacattctgtccgatattacaatcctcgcctatcctgcaccccgacatgatgtgcgagaagtgccaaatcttcgttccgcgacctatattgcacccctcgtccacataggacgattcatgcacgaaataactacgagactccgactccccctcattccccctcagagagggggatgtacagagcgggttatgtgtattttctatgctcattgcttgttcgattttggttgtttacgggtagcctataaggagttctactcagcccaccgggcttcgtttcgctccgacgctcagtgcacatagtgcacccgtcagtcgcttcacccttgcttatcccttgctgactgcttgctcttttccccgactctttttcgcgggtctgtcgcgggtcgattagaagaacgctttgaagatatcgtttccgttggcgaatatcagcaacgccagcagcaaccaaaatcctatcgtgttcgcaatctccaaaaatttgtcgctcggtttgcggcgcgtgatgatttcccagagcaggaacaagatatatccgccatcaagtgcgggtatgggcaggaagttcataaacgccagaatcagactcaagaaagcggtcatataccagaacgactgccagtcccaaatgctcgggaacatgtttccgatagcaccgaaaccgcccaacgactgcgccccctctttggtgaataccaatcggaactgcttgacgtagttgcccaacaggtcccagccgtagcagatacccgccggtatcgcctcccagaatgtgtagtcggtatgctcaatcttgaagaacgcgtattttgatttctgatagacgcccaatcgacactggtcgccgataaacaggtgcgccgtcatcggttcgcccgcacgatagaagtccaccgtgatactgtcgcaggggtgtttttgcaactcctcggttaccaacaccgcacaaggcgttgccacgccgtccactgccaccacgctgtcgcccgccttcatacccgcgaggtcggcagcattgttcggcatgacggaatctaccacaaacggcacaaactccgtgatgaggatgtacgggcgtttctgatacaattcgtcgttgcgctgtttctgtcgttcctgcctgtcatgttcgttttgcatagcgaggtagcgtgtgccgaggtctttcgacatctccaatgctaccgtgtccgtaccgcgaagcaccaccacattctgcttgccctccacgataagccattccactacatcgctcaagttttgcggctctacaccgttgattgtcagtatcttatcctgctgacggaagccctcttgttgcagcagttccgagtagtagagtcccgtgtccacgttgtgcaaaggcatggtgtcggtgccccaagagaacagaatcagtccgaacatcaccaacgcagcgatgaaattgaccaatataccgcccaagatgatgaacaagcgttgccaagccggcttcgagcggaactcccacggttggggttctgtcggcaggtcggtggtcgatttcgtctcgtccaccatgcccgcgatggagcaatatccgccgaaaggcagccaaccgataccccattcggtgttgtcggggtcgcgacgccagtcatcggcgggcagagtcgcacgctcctcgtccgtcatcgggcgatagattttattccctttcgcgtctaatttcggctcgtgtgtaatctcgtcttccacctctaccaacgcaggttccacgttcttcgcaaagaagcggaaacgccaccgcccgcctattttctttgcacgaaacagcgagatacgcggattgaaaaacatatagaatttctccacgcgcaccttaaatatacgcgcgaaggtgaagtgccccaattcgtgaatgacaaccaaaaaactaagagcaatgatgagttgtaaccaacgcatttttttctaattataaatgatgagttatgaatgatgtattaaatcggcggctatctgtcgcgccatcttatcggtttttacatagtcctcgtaggtcggttctttcagataatcagcgcgttgcattgtctccgctattatatccgacatctgcaaaaaaccacaacgcccctcacggaacatcaggttcgccacctcgttggcagcgttcagcacacacgggatattgcccccgcgacttatggcgtggtatgccaagccgaggttggggaaacgctccaagtcaggcttctcgaaagtcaagtcgcgggtttggaacaagtccaagcgcggaaaatcgctcttcacacgttccgggaacgtcagcgcatactgtatcggcaggcgcatatcgggcgcaccgagttgggctttcaccgccccgtcgcggaactgaaccgcgctgtggactatcgactgcgggtgaaccagcacctctattttctctgcctccacgccaaacaaccatttcgcctcaatcacttcgaaccctttgttcatcatactcgccgagtcgatggttatcttcgcgcccatgttccagttcgggtgtttcagcgcgtcggctgccgttacgcggaacatttgttcgcgactgaaagtgcggaacggaccaccgctggcggtgagcagaatcttctctatctcgttgtcctgttcacccgtaagtgactgaaagatagccgaatgttcgctatctacaggcagtatcggcgtgtggtattgccgtgccaaac

SEQ ID NO: 909 - DNA, 11096 bp, synthetic construct
  misc_feature 1..11096: note = Synthetic
  source 1..11096: mol_type = other DNA
tagctcagttggttcagagcgtctgccttacaagcagagggtcgggggttcgactccctctgctcccactagaaaggatggctattcagtcatccttttttcgtatccggctaactcatgaaaaaccgcaaaagtttatgcgtgccaacggacagttccgttcacacacctacgcaaacccagagcgaaatacagacgacattgaaaacaacggatcatatggaatttgacaacagcgtttccctgacgacggacagggtactgaatatcaactcggagctcggacccgaggaatttgcagccaaagttctggcggcaatcccgtctgatgtcaagtccggcaacctcggctgcggccgtatcctcgctgactactcgataatgatccagacaaggtacgtcctctgcgacatctacgaagaaggtccggaaaacctcgaagatagcgaccggccaattggcaaaaacgcagaaagtgcagcaatcacggataaagtcaatgctgccgtgccgaaaacagaaaacggcactcctgccggaccgacccgacagaaataccgtatagaactcaaatatggcaagatgaacagccgcatcgcagacatcctctactgcggaatgttcctggcctcattctggttcgcaggaaacatgaccatcttcacaggcgtactggcagcactgctggttatcgcagccggctaccttctcatctcttccgcaagatacaagttcggcaaaaaacaatgtgaagtaatcgccgaaagcatcgaaaaaacccttgaagcaggaagcacaccggaatccggtcgcgcctaacccagcaagccctccgggattttcattgtaagcacctgatgttcttcgtcaatgtcaatgacaagttcatcatggagcggaatcatagtctgttctccggaagccatatctacgtaaaggcatggattgccagggatatcttcaaaatcagaaatctctccgcattccacaccatgctcgtcacaaagcttccatcccaccaacattgaaaaatccccttctccttcttccatcacatccccgtaacaggcagcattgacataaacaggctgtcccacaatctcttccgcatcctcgaaagagcggatatcgttcagtcggaccaatgccttgtcgttgcctctctggacgagattttcgataaaaaaaggaaccggcagtccatcggaatagatgaacaccggttcgtgaatgtcaatgtcagcgggcaggatatcgcggaaactcataagaatttccccatcagtgccgttcgattttacaatcctggcggcctgaatcagatcaacgccctccaacatggaattaagcctcctgtgcaggtgcttctgcagctgcttcctcagcagcctttgcggcagcagcctcttcagcagcttttctagcagcctcttcagcctcagccttcttctttgcaagagcctcagctctagcctcgttaacctttacctcagcagcctcagcagcctttgccttgtcagcggcagccttgtcaagaccaagtttcttagcctcgatcttagcgtctctctgagctttccagtcagcgaatttcttgtcagcctgctcctgtgtaagagcgcccttagctacaccgcctgcgagatgcttcttgaggagaacaccttcgtaagagagaatacgacgggctacgagtgttggttctgcaccaacgttaagccatgccaatgctctctcgccatcgaggacgatagttgcagggtttgtgttagggttgtaagagccgatctgctcaatgtaacgaccatcgcgtggtgagcgtgcgtctgccactacaatgtggaagaatgcgaaattcttcttaccgtggcgctgaagacgaattttaacagccattgtaagtctgttttaataatttaacaaaaaaaaacctaatgtatccatctcgtggataacggacgcaaatttaggcattttcggcgatattataaaggttattgaaaaaatttatgaaaattttcgcaaaaagttttgcaaatctaaaaactatgcctatctttgcaatcccaaagtgaaagagacatcattcacgacatgcggatgtggtgaaatggtagacacgctactttgagggggtagtgggcgttggcctgtgtgagttcgagtctcaccatccgcactgaaaagcatctggattagtccggatgcttttttcgtatatacccgcgacaccagctcaacgtaaaatcgggctcaacgaaaaatcccggttgatttgcatttcatagtgcgtctgaggcacaaagcaagcggagcagcccttgggctgatctgcgcagtttgctttgagcagccggccggcgtatttgccggctgcggtgccgtgtgtcaggcaaagatcttggcaagcctgaagataaagaatggaatatcccttacgcctctgaactgagccctgaaagcttttactttggcattaaaggactctgcagatgcattggtggaacggttgtcgaagtagttcaggatagtctggtagttattcataaacgtctgtaataccgtgttgaagcacttcagtttcatcttgtagaccctgtcataccacttggccaacttggtcataagggttggcctgtggtctatcttaaggttgtatatctgaacaagttcaagatatctgtcatagcactccttgatgtccggatatagtctgaaaagcacatccgcacgcttccgctgcacttcagtccatttgctgttatgcatcagcagcaagtgcttggacctggcaagcagctggcgtcttgtctccccgttctcgtatgtcttggggacatactgtctcttctggcttttctctaattttatcctttcgttctccgcatcaattgcttcccagcgatgcttgatgcgtatctcctccaatgcttcgccaagcaacttctgaacatggaaacggtcgctgacctgtatggaacacggaaacacacgctttactatcagttgcattgacggcgacaagtcaagtgtaacctccttgacaagagagcgtttgcctgccgatatctttctcaggacatctatcacaacctcagctttggtacccttgatcatagccaccagagagcctttcctgcccttgaacgccttgttcgtcacaatcgtatagagttcatcatgggacaggcaggtctcgtcaatgcttagatgagtaccaatgttctccgggaaaagcacatactcctccgcggtgtcacgcatctcccattcctcgaaaccgctgatgtattgcttgtattgacgtgcaagaagatctccatcaacacaatacatctctccgattgtcttaatgctcaagactgtggactcgatgcgcttcttttaaaaaagacacaaactccttcgtgagctgtgttccctcaaatgctattgaataggtctttgtcaagatctcattggtctcagtatcaagccacttgcgcctgcggacatggagatatacagcattgcctctgattgggtaatcctgtatcttcttagatgatgtgaatccattgaatacaacacgacgggaagaaaattctacagggatactcttcttctcgtccaaatgtatatgtatctcctcttcctttggataatgctgtatcgatacgatgtcaaagttctcaacgatgacgctaggaaagagtgtctctaataatgtctttgttaccataacacaaaggtaacaagactaattttatcaacctactttttacgttgacccgtttttactatatttgtatctgctaagaatttcttgcttctgacgcaaaaaatgacgaggaattgcttccccgccttgaatgttttcacaacggaataatccttattgtgatttgcttcagatagtgcaaaattaaaacaatttatagaaaaacaaaaataattgtcatacttatgaaaaagattctgggtttggatttgggtgtcggctctgtaggctggagtgttatatcatgcgatgatgagcacagaccactggagatattgggcatgggtagcagaattgttccgcttacacctgaagaatcaaatgagttttcatcaggaaatgctgcttcgaaaaatcagagcaggacgcagaaacgtactgcaaggaaagggtatgaccgttatcagtcaagacgtaaggcattgactgataaactcagagaactggatatgttgccggatgaaacattgataaaacttcctgtactggacttgtggacacttcgggcacgtgctgcaactccaggagacaaactgtcattgccggaaataggtcgagtattatatcatcttaaccagaaacgtggatacagatattctaaggaggatgattctgctgacaagacgcaacgtgactatgttcaggctgtgaataaacgctttcaggaaatcaagaatgaaggtcttacgataggtcagcattttgccgtaaaactgaaggcgagcgaggtgatcacagataagggtgcgttctataattatcgcataaaagagcaggtctttcctcgtgctgcctatgtggaggagtttgacaggataatccaatgtcagagggaattctatcctgaagtgtttacagaggcaattgtcaatgaaatcagaaatgagataatttactaccagcgaccactgaaatcgtgcaagcatcttgtgtctgtatgtgaatttatgcaacgcgagctatttgatgctgagcataatcctataagaaacgggaagggggaaatagttgttgcaggacctaaatgcgctccgaaatcttctcctctggcccaggtatgcaagatttgggaagagataaacaatatcaggattaccaataaggaaaacgatgagtatttcatcagcattgataataaacatgagatatttgattttctgaacactcatgaaaaaatgaaggccgatgatttgttcaagattcttggccttgcaaaaaatagcggatggtcagccgatagggccatgagtaagggtatggtcggaaataccacgagagttgcattgatgaaggccttgaagggaagacgcgacatcgatgaaattttgcggtttgatctcagggaggtggaatccaatcaggtcaatgctgatacaggagaggtcttgatggagataagtgccgaatgtgagagagaaccgctctatcggctttggcatataatatattcaatatcagataagaacgagcagaagtctgccttgaaaaatcaatttggaatttcggatgagtcaatgttggaatcgctttgcaagattgactttgtcaaacaaggatattccagtcgttcattcaagtttatgagaaagattcttccttctctgatggatggtgccaaatatagcgaggcttgtgatgtcataggaatcaatcattcggacagcatcaccaaggcggagaatcagatcaggaaactgttgacgaaattgcctcagttgcagaagaatgagctccgtcagccggtggtcgaaaagattctgaatcagatgatcaatgtcgtcaatgctgtcattgacaagtatggcgctattgatgagattagggttgaaatggctcgggaactgaaattgagcaaggctgggcgagagtctgctgcaaataatatccgtacgagggaaaaggccaatgaggagattgctaaaagaattgaggaattgggtctggttccatccaagaacaagattcttaagtacagattgtgggaagagtcaggtaagcgttgcttctattgtggccagcctgtgagtgcgactgaatttctcaacggtttggatgttgagattgaacatgttgtccctaaatctctcctgtttgatgattctttctcgaataaagtctgcgcttgccgtaaatgtaatgcggaaaagggtaatgccactgcatttgatttcatgaaaggacgtggggagaatgcgtttgaagactatttgaagcgtgtcgagacggcttttaaagagaataaaatcagccagacaaagagaaataggctccttactcctgccgacaagattccgaaggacttcatttccagacaattggtccagactcaatatatttcgagaaaagcgatggagattctgaatcaggtttgccggaatgtctatggctcaagtggagatgtgactgcatatctgcgtcgtatatgggggtatgatgagatactccattctttggatttgccgagatatcgtgatggtaatcttaccgaggatgttacttatgtccacagagggcagactcatactgaagaaaggataaaagactggtcaaaacgtttggaccacaggcatcacgccatagatgctcttacaatcgcctgcacgagacagagtattattcagaggctgaatactttgaatgcaaagactgccattggtgaagaacaaatgtcattggacaaatggacattggcacaggctcatttcagtgtggctgatgttgctgaccatgtggcagatattcttgtttcattcaagtccggcaagaaggttaccacacctggaaagaggtatgtttacaaggctgggaggcgtagggttgcgcaggaaaatatccttgtgcctaggggcgctctgagtgaggaaagtgtttatggcagaatcaagagcatagaagagaaggttcctgtcaagaaattgttcgaacgtgtggatgacattgtcaagccgaggataaggcatctgattcgtgagcgtttggaggcgtgtggtggagattgttcgaaagcggtgtcgtcgctcaagaaatcaccgttgtatctggatgaggaaaatacgattatgcttgagtatggcagctgcttcaagccggagtatgtcataaagtattctctgaattctatcaagaccaaagatgctgcttcgattgttgataaacatgtccgggaggttgtgactgagcgtcttgccgctttcggagacgatcctaagaaggcatttgctgagcctttatatgcagatgaggtcggtaaaattcagatcaagactgtaagatgttataccggtttgtctcaggtcgtgccagtcaagaaagatgctgacggaaatgatattggttttgtgaagcctggtaataatcaccatattgccatctataaggatgcggatggaaagtatcaggagtgtattgttacattccgcgatgccgttgagcgcaaaaagtatggaatcccggtggttgtaaggaatcctgttgaggcccttgacactatcattgacaagaatgttcctgaggatctggccggagggctgccttctcctgaatggacatttgttatgagtatgcagcagaatgagatgtttgtgcttggaatgggggaagatgaattcaatgatgcaatggccggaatggattataagtctttgggtgagcatttgtatagggtacagaagctggcgtcgtctgattatttctttaggagtcaatatgagacgaaattggatgatactaaaaatgctcttttaatgaaaaagtattacagaacgcggagtttcaaagcattatttgccctcaatcctcataaagtttccatcagcctgcttggcgaaatttcattgaaagatgattaagcgttctctatacttcggaaatccggcatatctgtcattgaaactcaggcaacttgtcataaagaagcctgaggtgaagggtgatatgcctgattttgacgatgcggggacgtatagggaagtcgtcaagactattccgatagaggatatcggccttattgttctggactgtccgcaaattactgtcactgagggacttttggaagcattgctggaaaataattgcgctgtggttacctgtgacaaatctcatcttcctgtagggttgctgctgcctttgtatggaaataagattcaggcggaaagatatcaggaacaaatcaatgcatctttgcctctgaagaagcaggtttggcaacagacggttcaatgcaagatccggaatcaggcggccatgttgaagtacgttaccggacaagaggccaaaaatatgttgatttgggcggattctgtgaagagtggagacgctgacaatctcgaaggtcgtgcggcggcgttttattggaaatcggttttcattgacaacccgaaatttacgcgaagcgatgatgatattgtcaatgcaatgctgaattatggttatgcgattgtacgcgcaatcgttgctcgtgctctggtgggggcagggcttattcctacggtcggtgtgcatcatcataatcgctatgatgcatattgtctggctgatgatataatggagccttacagaccttacgtggacaggctcgtgattgacattgtcaatgccggtattcctgaggaactagatgtcaatgttaagcgtgtcttgctggaacttcctgtcaaagaggtgattatagacggcattcgtaggccgttgatgctggctgtgagccagacggtcaattctctgcagaagtgtttttcaggcagttcccgtaaagtcatatatccttctatgtgatggacaggttcagcgagtatagaattatgtgggttctggttttctttgatcttcctactgataccaagaaagagaggaagaatgcagccctcttcagaaagcgtctgatggaggacggctttgtcatgttccagttctccatctatatgcgccactgtccgtcatctgagaatgcccagactcatattgcccgtgtaaagtcctttttgcctgattatggtcaggtgggcatattgtgcatcacagacaagcagttcggtaacatggagttgttttctgagcacaagccgaaagagtcggaggatatttatatccagcttgaactcttttagtttacttgaatggccttgcactgtcagttgaaaagccccgctctagagagcagggcgtagataaaaagtgtcaaaatggagcattaccatcttctcgcatgccactgacatagaaatgaaaggcttctacaatatttcttttaaagtctttgttgttgcaacgcatgcgatatttacatctgcaggggcgtctattccgcgtggcgatatccctgaatcttattccatttgccgcgggtgaagtcgggcacgaggacaggtttgctgccattttcgatggaagcggcggacaggtcaccgatgcaggaccactcggcggcatcgtaaacatccatgtcgagcggctttccgtttctgaggcaccataccagacggtaatccatgatgaaatccattcctccatgtccgcctactgatttggctttctcttcgatgtccttgacaatagggctctgatacttctccagaagttccatatatacatctccggaaacgaaagtatgtgcagagaggttctcgaaatccacatcgccgttaatctgctcaggttcgaacgcgaatcccggacgaggatacttttccgcatatcctttcgttccgacgacctggtacatcctgtcataaggacgcggagtatagacattgtgctgaagaaggatggtcttgcctttggcggtatgaatcattgtggaagtctggtcgccattcgcgaatgtctcagctcccatgttcttcttggctatttctagaccgacaaccgaaatggtggccattgaaactagatagtccatcctgtcaccgcggtgtatgtcaagtacctgacagtcaggtcccaaaccatgggtggcataaacatcgcctgcatgtgcctggtcaaatgccagacgccagttgtcgtgatatttgtcccaaaaatccgaaagattatgaatgtaagagccttccgtatggagtacctcgccgaacagtccctgctgaaccatattgagtgtggtaagttcatagaaatcatacacgcagttttccagcatcatgcaatgcttgcgtgtctgctcggacacatcgaccagctgccagcattcagccacagatgttgccgcaggcacctccacggcgacgtgttttccatgctgcatcgcgtacactgacatttccacgtggctgtcccatggggtgcagatatacacgagattgatgtcgtcacgttcgcagagcctcttccaactttcttctccgaaatattcggcagcagcaggctttccggcgcttttcagaatatcctgtgacttctttacgcggtcttcctccaggtcgcaaagcgctactgtacgggttccgtctatatgggtgaaacgagacacggcactcggtcctctcatacccagtccgatgaaaccgattcttacagtgtcaatcggatccgccgcaaactgtagcatatcttgctgaccagcagccggctcaggctcattgaaaacaatgacgccatccttaatcttataatttttcccatccttaccgcagtctccgtagcacccggacaatattgctgccgccagaactgtcaatgccaaaagtttgtgtttcataattatctgattgtttgattattcttctatattcattagtgtttggttaaaaatcatacatgtctttgaaaatattggaaattaggtagttacaaaggcgtttttgtgcgtgacgatttgagtcattcttttgtaccctcctctttaccttctttgcgccctgctacacgtccctctttgtgcccttctttagcccttcctcacgcccgctctcatgtgcgtactcaacctgattgtaagtgccacgttccgtattcatggcattaatgtcattgattctgtcttcgtcgtcaagctgggcgaatttcaggatgatgtgaactaattgctatgcattgctcagttctttcttcagcttggatacctcttcttctgagagccctgtggcctgagtgataatctcgcaagaggccccgagtcgaataagatttatcgcgatcttcgattgtccctctttgagcccttcttctttgccttccttgcgaccctcttctcgtccttcttctcgtccactctcatgcgcgtattcgatctgattgtatgtgtcccgttccgtattcatggccttaatgtaattgattctgtcctcgtcgtcaagctgggcgaatttcaggatgatgtgaactaattgctatgcattgc

SEQ ID NO: 910 - DNA, 7979 bp, synthetic construct
  misc_feature 1..7979: note = Synthetic
  source 1..7979: mol_type = other DNA
acaaatttgccaatgggatcgaagttaatggaaagatgcagggaagccggatcggctttccattcgatcagaagggcgagcagcgtctcaagaaattccttgcttttgcaggagttgacgaagttgatctctacggcttccagttgaatatccttcaacaatattttgaggtcagccaccgtaacctgctgacaactcttgaatacgaatcccagagaagtgactcctttgttcaagacatccaaagccttcaggttggcctctgccaaatctccaacgacgatatcctgtctgaccaaccagggattgcccgacctgcttttcccgcgcacaaaagggacctcacccggactactttccggaaaatcaagtccttcgatgctttcggcgcggtaatagggacgcacgctaaaaccctcgtttgtcttccaaaccaggctcttttcgtattcctttcccttcaggtcgatgttgatttgctcctcccaggtagcggtagttacgggaggaaattctgagagcagctttatatctttctcattcatagcacactaactatttacaaaaatcagagtgcaaagttaattctttcgggtagaaaacggggacaattcgtgctattttaacgttaaattagcagtacttgcactttcaaactgctcgtttggcaccgcatcataatgttaacaaacacgacttatgctgtctgcatttattgctatcgctttatattcagtagctttaaaaaacggaactgacccgcacatcctgagagatgtctatttttctatctgaaataatattttgataaccagaatagacttttcaaacaatttgtttaattttatgtggtttgcagcatataattcagcatcaacaccaaacaaacaggatgagtctagccgacctttctctaaaccaaaaatactggaggcctttctaaaaacaaaaaagcgacttgcgccgctttagatgttttcacaacggaataatccttattgtgatttgcttcaaattgtaccactaaagtagtaagaaatactgaaatacaaaattatatgaaaaaaattttaggacttgatctgggtgtagcatcaatcgggtgggcactgatcaacactgagaatgatatacctaccgaaattttgggaatcgggagcaggatcgtgccattaagtacaaatgacgcaaatgaattttcaactggtaatgcaatttcaaagaatcagaatcgtaccattaccagaacccaaaggaaaggctatgatcgatatcaattgcgcagaaaaaatttaactgattttcttcgcaaattcaatatgacaccaacagaggaattaattaaactagatgtacttggcttatgggggcttcgcgcaaaggcagctaataaggatgaaaaaatttcattaatcgaactggggcgtgtattataccatcttaatcaaaaaagaggatacaaatcggctaaatctgatgatgccgaagacaaaaagcagaaagattacgtcgcagacgttaacaataggtacaaaatcattaaagaactaaaacagacaattgggcaatattttcacagtcaactaaaaagagatgttcattacagaaccaaagaacaagtattccccagggctgcctatcttgatgaatttgaaataatttggaatactcaggccagatattatccagaaatattaacagaagagaacaaagccatcgtaagagatgaaattatctactatcaacgaagcctaaaatcctgcaaacatctggtttctttgtgcgaatttgaaatgaaagcctataagaataaagaagggaaaactgtttatgatggacccaaggtcgctccacgttcctcccctctctttcaggtatgtaagaattgggagagtttgaataacctgaaactaaagaataggaaaggactagaatttgattttacacttgaacataaaaaagcacttttcaaccacttggataacaacgacaaattaacgaccaatgatctctataaaattcttggaatcaataagtctgaaggttggtggggaggcaaagctattggaaaagggctgcaaggaaataccacaaaaaatcaaatatcgaaagttctagggaataatatagaatatcagaaaaatcttgtattcaatctaaaaactgttgatactaaattagtagataccgaaacaggggagataattcagcaaataagccctgattttgaaaaggaacctctatatcgattatggcattccatttattcgattcacgatcaaagggaattagcaaatgtacttcaactaaatttcgggattacagatactcaggttgtaaatgacttatgcaaaattgatttcgtaaaatcaggttttgggaataagtctgcaaaggctatccgcagaatattgccctatttgcaggatggattgatgtatagcgaagcatgcctggcggctggcttcaggcattccgaaagtctgactgttgcagaaaacgaagcccgcgaactactattaaaacttccacaaataaagaaaaatgatcttaaacaaccagtagttgaaaagatattaaaccaaatggttaatctcgttaatgcagtgatcgaccaatacggaacaattgatgagatacgggttgaattggctcgcaaacttaagcagagcaaggatgaaagaaatgcaaccgacaaaaatatgcgacttcgcgaaaaaattaatgacacatatgcaaaaagaatttttcaggaatatgggttgactgcttcccgtacgcgaattcagaaatttaggatgtgggaagaggctaaacaaaaatgtttttactgtggtcaaacggtaaatgtaagtgagtttttaaaagggtttgatgtagaggttgaacatatcatcccaaaatcactttttttcgatgacagtttcagcaataaagtctgtgcttgcagaaaatgtaactcagataaaaaaaatctaacagcatttgattacatgaaatcgaaaggggagcatgaatttgaaagctatctggttcgcattgaggaattttataaaaacggtgatataagtaaaactaaaaaagaaaggctccttacgccaaaagagaaaatccccacagatttcattgacagacaacttcgcgagactcaatacatcgccagaaaggccaaatccatattatcacaagtagctagaaatgtttgggcatccagtggaagcgtaactgattttgtacggcatacctggggatgggataagattcttaacgaccttcaagtggataaatataggttaaatggacaaacggaattggtggaatttgttcacaaaaaccaaaaacacgtcgaagaaagaataattggctggagtaaacggcttgatcaccggcatcatgcgattgatgcgctaaccgttgcatgtaccagacagagtttcattcagaggctaaacaacctaaacaccgaacgggatgcaatctggcaggaactcaaacatcaaaatgaagaacataaggagaaattttccctgttggaaaaatggctcgatgaacaaccccatttttcgaaggaatacgttcaaaacaaagtagccggtattctggtgtccttcaaagctggtaaaaaagcagcctcaacggggaagaggataaaatacataaaaggaaagaagattgtcctccaagatggaattacagtgccacgtggagcattacatgaagagagtgtgtatggaaaaattaagatcctggaagaaaaaaaatcacctaaatttctgtttgagcatcctaacttaatattcaagcccgatataaaagaccgagttgaaaaacgaattgaagaatttgagggtgatacaaaaaaagcaattgcctccttgttaaaaaatcctgttgtgctgaaaaatggagaaatacttgagtatgggacttgcttcaaggaagagtacatcattaaatatcccttgcaatcgataaaagcaaaagatgttcattcaatcgtagacaaacacttacgtgaaatcgtgaaagaacgattagtcaaatttaacaacaatgaaaaagaggcattcaaagatttaaaaaattaccctctttggctggatgacaacaaatcaattcaggtaaaaacattaagatgttttaccggtttaactgctgtagaaccaataaaaagaaatgaaaatggtgaagcagtaggttttgtaaaaccaggaaacaatcatcatattgcaatctacatcaacaaattggggaagaagcaagaacatgcagttaccttttggagcgctgttgaacgcaaaaaatatggtttgccgatcgtaattacaaatccaatagaagtatgggataacattctggataaagaatttcctgaaaatttcctgaattgtttaccttctccagatttgacatttgatgtaagtcttcagcaaaatgagatgtttattcttggaatgcctgaggaggaatatcaagttgcaatagaaaataaagattactctttaatgagtgattatctatatagagttcaaagtatttcgccaagcgacaattggtttagaaagcacataggaacgcttaatgataaaagtcaagaggctcgcgatttaaaaatatattataggtgcaatagcgttaaagcatttgaagaattacttccgcataaagtacgtattaataatttaggcaaattaatatttccgaattctcatccatgaaggttaagtccaattaaatgagaacacaatttgatttattgtattgattattgacaatccacaccttataaagacttagttgcttgttaggatggtaagaaaaccaaacagtgccataattctatttaaagtgcatccgaaagatccaatcagttgcgttaatagatttcgggaagtccgacaacaataaacaactctgcaagaaagcctcggatgaatccgactgactttgtaaaagaatacgattttatgattatggatagttcccttattattcacattaaaatttaattcgtatgattactgctattgatctgtcgaagcttcgcaatgcggagtttctgcaatttggttccctgttttccggcctggtggttgcaaacgatccggccgcgctgaatatcgccgctcaacacgaggcattcaaatccaggctggatgaaacatccgcgctcttcaagcttgaaagaattagtccgattacgcaggaactggtacagctcgacgatcgccgcgataaggcgatcaatggattgacggctgtcatcaatggttactgcaaccattttgatgtggccatttgccaggcggcaagtctgctaaacggtaatttatttctgtatggcgtgggggttgcccgattaaatacccaggctgaaacatctaccatcaatggaattgtcagtgattgggaatgtaaacctgaacttgtaactgctttgacatctttgggtctcactggttggcttaccgaactaaaaactgccaaccagctgttccagcaaaaatacatccaacgaacccaggagtacggcgccgccaatcccgatacgctgaaggcaaaacgggaagagaccctggcggcctattatgagctaaggaaatttatagaagccaattctgtcgttcatccaagtgccacctatgaaaaattgatcaatgagctgaatgcactgatcgatcagtacaatgggctgatcaagtcccggcctgcggattcgccaccggaacctgcccctgcccccgcacctatttgacctatttagcaggaagcctgcaaaagggaacagcgggcttcctgctattacaaaatatttttaaggctaaaccatgctaaaatgaccccgctaactccggataccagctaccatattttcaaccacgccaatggttttgagaacattttcaggacagagggtaatttcaaatacttcctggaaaaatacaggttgtatattttcccaattgcagaaacatatgcctattgcctgatgccaaaccattttcatctcgtaataaggatacgaaaacgcgaagtgatagaaatgctgattctaaacaacaactgcaacaacttttccaaagtttcgaactttggaaaagttgttagcgataaagaaattgaaaaatatctttcaaaacaatttgcgaacctgttcagcagctatacgcaatcattcaataaagtataccacaggaagggatcactgtttgttaaaaattttaaacgggagcaactatcggacaagacacattttctgaatgcaatcgtctatacgcatagaaatccaatacatcatggattttgtgacgcatacgatagttgggagtttagttcgtatgatgatactgtaaatgggaatggagatctgaccgtgattgaaaagttaatgaaaattacagaaggcattgaaaacttcaaaatgcttcatcaacattccctggatcgctttagaacaaccaactaccttgaaacatagtcccatgatcaaacgaaccctctactttggtaatccgtcctaccttcggtttaaagatgaacaactggtgatcagcctgcctgaggcctccatgttacccgaaaaagatcgaactatcaccatcccaattgaagatattggtgtggtagtgattgaccactcgcaaatcaccctgacacacttactcatcaatgcactcctaaacaacaatgtagccctgattacctgtgatgaaagacacatgccttccggattactgttgcccctggaaggaaataccacgcaaagtgagcggttcaagcaccagatcaatgcctcggaacccttgagaaaacagttgtggcagcaaaccatccgacaaaagattttaaatcaagccgctttgctcaaagaagttaagcgaaagactgagaatatgaaatactgggccgaccaggttaaaagcggtgataccgaaaatcacgaagcacgggccgctgcctattactggggtgagttgtttgattcctcactcgatttcaggagggaccccgaaggtgaggcgcccaacagccagctaaattatggttatgccatcctccgggccgtggtggcgagggcgctggtttcctccggactgctgcccacctttggtatccaccaccacaaccgttacaatgcctactgcctggcagatgatatcatggagccctaccgaccctacgttgacaaggtggtcctggagatcatgcatacaggagaaatttccgaagaactgacaaaagcgcaaaagaccaaattgctccagattccggttctggatgttacgatcaatggccgaagaagtccgctgatgcttgcggtacagcaaaccacggcatcactgaccaaatgctttcgcggggaactgcgaaggatcgactatccggaattaaattaacaggccttggaacgattgagtgaatataggattatgtgggtaatggtactctttgatctcccaactgaaacaaaaaaggaacgaaagatctatgccttgttccgaaaaaagttgttgaaagatggttttaccatgtttcaattcagcatttacctgcgtcattgccctagcaaggagaatgcagacattcatgtcaaaagggtcaaaatagaattgccggagaatggccatgtgggaatcttatgcatcaccgacaaacaattcggggagatggaacttttcttcggcaagaagccaacagagaagaaaggacaggtacaacagctcgaattattttgagccaaccaaatagaatagaaaaaccggatgaaggtccggtttttctattctgataacatccattttataaaatcctaattattcgactaacaaacactatatcaaaccaatgcatgggggtaaggtgtttatcagtaagtcaaagatacaatttgaaagcaaatcacaacaaatcaacagaggagccaacattgtcattgggtgtttatcagtaagtcaaagatacaatttgaaagcaaatca

SEQ ID NO: 911 - DNA, 7328 bp, synthetic construct
  source 1..7328: mol_type = other DNA
  misc_feature 1..7328: note = Synthetic
ctaaccgtagcacttgcacgtgttgtgagtgctctctcttctcgtgtcatgaatattacaacaagatataaataactgaatactaacatataaacaaactatattatttcgtatgaaaagagcactgctgcctaaacatgaaagattgcttcgtgaactgggtgaaaacatgcgtttagcccgtctaaggcgcaatttatcctctgaacaggtatctgaaagagccggaattgccagaaatactctcattaaaatcgaaaatggcgatgagggggttgctatcggctattatttacgtgtgctaatagtgttaggcttggaagaagatttgcatacagttgctcaagatgatgtactcggtaggaaactacaagatgcaggtctgacggtatccaaacgcgcatcaagaattaaataagtcatgcaaacgatctatgtatattttgacgatttccgcgtagaaatgcccattttgattgggaaattgtttgcacaaccttctcgtggtaaggagattttttcgtttgagtttgcttccgagtggttgcaaacaccttattgccgtttattggaccctgatttacagctgttctgcggcaggcaatatatagaagaaagtaagattaactttggtgtctttaccgattcagctcctgaccgttgggggcgagtattgctggaacgtagagagtcaattcgcgctaaagaggaacaacaaagccgaagaagacttacagaaagtgattttctcttgggagtgaatgatgttagtcgaatgggggcgttgcgattaaaagctactcaagatggtcctttccttgatgatgacacctcatatagtaccccgcccatggcttccatacgcgaattagaacaggcgagttggcatctggagaatgacgatgattcgaatatccgcaaatggctgcaaatcctcttagcccccggctcttctttaggaggagcacgccctaaagccaacgtgcgggatgaaagtggttcgttatggatagccaagtttccaagccggaatgacagattagatattggagcttgggaggctgttgcaatgcaattggctaaggcatgcggaataacggttgcggactttgacatagctcgctacggtcgatatgccacatttgttacgcgtcgattcgaccgcacaaatgaaaagaaacgcatacattttacgtctgctatgaccatgctcggatatacggatggtcatacggaggggtgttcttatttggaattggcagactggatttcccgaaatagttgtcaggcaaatgaagatttgaaagaactatggagacgattagtattcaatatcgccatttcaaactgtgatgatcatttgcgaaatcatggttttttgctttcagagaaaggatggagactcgcacctgcatatgacctgaatccaatgtattacggcacaggattaagtttgaatattgatgaaatgtctaatgaattggactttgaactggcactcagcgttgctcggtatttcggaacagatagcagtagtgcgaccttagcaatcaccgctatcaagcaaaaagtctcacaatggaaggaatgggctaaatactatcacattccacgggaagaacaagaaataatggctccggcattcagtaggatttattagagcgtagagcgaaatgtagcataattggtcggatctgctgtttgcacgcgttttttttgcttttgccacctctttcaacttcattccaaacgcgaggccaaagatgtatccatgatgatgtgtcctgcaaggctatcctgaaagcgttgacagaaggcaatatataaccatgggtatcttcaatactaaaatctgcatccgaagtgcagatttttttttgcgtgtcaaaaaaaaatacatcttcctcttgtgtatgtcaaaaaaatgtagtacctttgcagtgcaaaggtgtaaaaaaaacgatgacatataataccatgaaaaagaaaattctcggtttggatttaggcgttggatcgattggctgggcattgattgaagcggaagaagaccaacccaaacaaatattgggcatggggagtcgcatagtaccgcttagcaaggacgacagcgaccaattctccaaagggcaagctattacaaagaatgccgaccgtacaactcgccgaacggctcgcaaaggatatgacagataccagttgcgccgtgctttattgacacaggttttgcgacaaaacaagatgttgcccgaacgaatggacgagcatgtgttggatttatggaaactacgcagcgatgctgccacccaaggacatcaattgactttaccacaaataggtcgagtgctctatcatatcaatcaaaaacgcggttacaaacacagcaaagcagataataacgaagatagcaaacagactaaatatgtcgaagatgtcaaccaacgttacaaagagattctggaagcgaaacaaactatcgggcaacatttttatctagagttgctacgcagtaaaattgagcgtgctaatggtccctattatacctatcgcatcaaagatcaggtcttcccacgtgctgcgtatatcgctgagtttgaccaaattatgcatgtgcaaaaggctttctatccagatgtattgacggatgagttgatagataccttgcgcaatcgaattatcttctatcagcgtccgctgaaatcctgcaaacatttggtgagcttatgtgagttcgaggcacgtccgtataagactaaagacggtaaaatcgtgtacggaggtcctaaatgtgcacctcgtacttctcctttagcgcaactttgcgccatgtgggaaaccgtcaataatatcacgctcaccaaccgcaataacgaacaattcttgatatcccttgaccagcggaagcagattgttgaatttctttgctcacacgaagtattgaaactaaccgacctgtataagatattgggaattagcaagaaagatggttggtatggaggaaaggcgattggtaagggcatcaaaggcaatgcaacactcaaccaactgcgtgcagcactcaacggcagacatgcagaatggctggagataccgatagagatagaggacaaagtggatgaaacgacaggcgaggtggtaaagatagtaaaatcatccgtggagcaaacccctcttttccaattatggcatgttgtttattccctgcagaattcagatgaattagccaagacactccgtgaaaaattcggaataacggaacaggagattattgattcgctcagtaagatagattttgtcaaaccaggctatgccaataagtcgcataagttcatccgtcgtatcttaccttatttgatggatggctatatgtatagcgaggcgtgcgagaaagtgggtattcgtcattccaacagcatgacagttgccgaacgcaatacacgtccgttgagtgcccggatagagttattgaccaagaacagccttcgccagccggtagtggagaagattcttaatcagatgatcaatctggtcaatcgtttacagcaagaatatggcccgattgatgaagcacgcgtggaattagcgcgcgaactgaagcagagccgtgatgagcgcgaaagtgcatataaagccatcaatcagaacgagcgtcgcaacaaagagatttcggctaagataacagagtttggaatacgtccatcgcgctcacgtattcaaaaataccgtatgtgggaagaaagccaacatcgctgtttctattgcggtgaagtgatggatttgacgcagttcctcaatggtgcagatgtcgagatagagcatatcattccacgtagtattctctttgacgatagttatagcaacaaagtttgcgcgtgtcgccgttgcaaccaagagaaaggtaatatgaccgcaatggagtatatggagacgaaacctgcggcggtatttgaagcctacaaacaacgcgcggacgatgcgtttaacaaagaccatcgcatcagcaaaaccaaacgtgaccacctcttatggcgcagagcagatatcccgcaagatttcatagatcgtcaactgcggcaaagtcaatatattgctaagaaagccgtagagatattgcaagatggtattcgtgaagtatggacaagtggcggaagtgtaaccgatttcttgcgtcatcaatggggatatgatgagattttgcatactcttaatttgccacgttatcaacaggtggaagggcttaccgaaactgttcaatacgaacatgcaggacagacacatgaggaagagcgaatcaagaactggacgaagcgtattgaccatcgtcaccatgctatagatgctttgaccgttgctttgacgcaacaggcctatatccaaagactcaatactctggaggcttctcatgaccatatgcaaaaggttgtgaatgaggctggtactcaatataacgagaagaaatcgcttttggagaaatggctagccgaacaaccgcatctctcagtagcagacgtgacggataaggtagatggtatcttagtttctttccgtgctggcaaacgcgtaacaactcctgcccgcagagctatctaccaaggtggcaaacgaaccatcgtacaaacaggcatccaagtgccacgcggagcattgacggaagaaacagtatatggcaaattaggcgataagtttatcgtcaagtatccgctatatcatccgtcaatgaagcctgaaaatattgttgatcctactatccgtacgttagtgcaaaaacatgtggcagaaaaaggcaaagaagccttcaaagaaccgctttattcggcagaaggaatggagataagaagcgtgcgctgcttcacttcgctttcggaaaatggagttgttcctgttaaacataatgaggctggcgaaccaatcgggtatgccaagaaaggtaataaccaccacattgctatctatcaagacaggaataacgaatatcatgagatggtagttagtttctgggatgccgtggagcgtaaacgttacggagtgcctgttgtaatcactaatccgcatgagttatgggatagcctgttaaataaagaactgccacaagaattcctatccaaacttccgcttgacgattggcagctgaaactctctatgcaagaaaatgagatgtttgtactgggcatggaagaggatgagttcaatgatgctattgagcgacaagattacaatgcgctcaataagcatctgtatcgagtgcagaaggttagttctcggttctattgtttccgttaccatacagaaacaacagtagatgataagtatgaaggtgtcaaaaatgaacagtggagttttgcaatggggaaagctttccgcgcaagtagttttgatggcttatttagagtattccctcataaagttaaaatagatataatgggtcgtattaccaaagcatgattaaacgtgtactctgttttgaaaatccagcgcgattgagtctaagcctttcgcagatggtggtggagcgtgaggatggcaaacgcactgtgcccattgaggatgtcggagtcgtgattctcgatcataagcaaatcaccattacgcacgctttgattgatgcactattggctaacaactgcgcgattgtaacgagcaacgacaaacatttgccggttggattgatgcttcctttggacgggcataatttacagagtgagcgttttcgtgcgcagatagatgcttcagaaccgctcaagaaacagatgtggcaacaaacagtaacggcaaagattcttggacaggcacacgtattgggtatgcagcatattgagcacggtaatatgttcaaatgggcaaagacggttcgttccggtgatatagataatacggaggcgcgagcagcggcttactattggcggaatatgttcgagcaggacaattttatccgtgatccgcaaggattgctgcctaataatctgcttaattacggctatagtattgtacgcgcaatgatggcacgtgcgttagtgggcgctggattgttaccgacattaggtattcatcaccatagccgttatgacgcctattgtttagcagatgatataatggagccttaccgcccgtttgtagatataaaagtgttggaaatgtgggaaaatggtggggtgacaagtgatattaattccgagcagaaacgcgaacttttaggaataacaacgatggatgtatctatcaatggtcatcgcagcccgatgatgttagccatccaaacaactgctcaaagcgtacagaaatgttactcaggcgaagcaagaaaaatcatatatcccgattggtaaaagcatgaaaacaagtagcaaacagttatccaaacgctcgaatgccattagtggcaagaaggcgcacaacgagaaccgattcatcaagattggccgtgttcgtttgcatagttggatcaacgagaaattgcctgcagcagacattctcatctcggagcgtgagattgtgcatgttgctaacaagcatagccaagagttagcatcgctgggtatggaggcatttaactacgtgacgatgattatcaatcagtctgacgaagttcgcaaagacaatagagacgcttttttctttatcgttagtggagctcgaaagacagatagcgatttggaacaatgtgcggttgtggaactgaaaatagagtggatggggcgcaagagagtctatgtaataaaatcagcccgcccgatgaattggggcaggctgcgtaaaattgagttggtgtgtgttaaaccccgctcttaacataagacttccgttcagtcttacctctgtaccgctgaattgcaacaagtaaaaacggaatgcaaccagacgcaggtagtgagccacacgcgctcaatatgctattgcgattgcaaaagtacaatatttttttgaaacatgcaaattttggggagaaaaaatacatattttaactaaaatgctcaaaaaagtaaacataaaggtctaaaacaatttgaccggtgaaaacatcaagagtaacttcgttgtgtatgtcattcaaaaaagtaaaacataaaggtctaaaacaattgctccaatgattgcagagacggcggggctgttgtgtatgtcattcaaaaaagtaaacataaaggtctaaaacaatccaaactcctcattgtttgtagcgaattcgttgtgtatgtcattcaaaaaagtaaacataaaggtctaaaacaatatcataatgtggctcatcctgcaaagaggggttgtgtatgtcattcaaaaaagtaaacataaaggtctaaaacaatacacggccaaataatacagatagc

SEQ ID NO: 912 - DNA, 4860 bp, synthetic construct
  source 1..4860: mol_type = other DNA
  misc_feature 1..4860: note = Synthetic
agcaaacctttctgaaaggtttggcagactacattaggtattacaacaatgaccggataaaactccggctgtcaatgagtcctgtccaataccggcaacaatacacagacaatatacaaacaacatgtcaatgaacatgcatacaactaacaatatttaataaccttgtccaacttttgggggacacctcactgactaccgcatccgtttttatgaatgtcggaatgtcattccgacatcggttctgccgaaacttccctattttcctcaccacaccaccaaaaatcaaataaaaacacataaacttttgtttatttataaaaaaagtagtacctttgctcacaatataataataaattattcgctattgtgttcagtcacctgcgtaaatatttatatgaaaaagacaattctcggattagatttaggcaccaatagtattggatgggcattgatagaaatggaagatgaccaacccaaacatattttaggtatgggtagtcgtattgtgcctctcagcaaagacgacaatgatcaattcagtaagggacaggccatcacaaaaaattcagatcgcacagctcgccgtaccactcgcaagggttacgaccgctatcaactacgccgtgcacagttgacacaattgctacgcgacaatggaatgttgccggaacaaatggacgaacatctcattgacctttggaaacttcgtagcgatgctgccactgaaggacatcaacttaccttgccgcagataggtcgagtgctctatcatatcaatcagaaacgcggatataagcacgccaaatcggatgataacggagatagtaagcaaaccaaatatgtagaggccgtaaaccagcgatatgcggatattcaaacgaagcatcagaccatcggtcagcatttctatcaggagttactgagcagcagggtaaaagggggtaaggattattactatacttaccgtatcaaagaccaagttttcccacgggctgcttatattgccgagtttgaccagataatgcgtattcaaaaagagttttatcccgatgtccttaccgacgaattgattgactcactgcgtaatcggattattttctaccagcgcccgctgaagtcatgcaaacatttggtgagcctttgcgagtttgagatgcgtccctataaaactaaggaaggcaagattgtttatagtggtcctaaatgtgcgccgcgtacctcacctttggcgcaatactgcgctatgtgggaagtcgcaaataatattacgctaacaaatcgcaataacgaacggtatgagttcacacttgagcagcgtaggcagattgtagattttctctgcaagaacaaagaattgaaagtcacacatctgcaaaaaatattaggtatcagtaaaaaagaaggctggtatggcggaaaagctataggcaagggtatcaagggcaatgctacactcaaccaattgcgcgaagcattagacggcaagtatgaccaatggctggagatgcccatacagatagatgataaagtgaatgttgaaacaggtgaagtagtgaaaatggttagcgaagaagtagagcaaacgcctctgttcagactatggcatgctgtttattcactgcaaaatgctgacgagttatccaagactctgcaggacaaattcggcattacagacaaggcggttattgatgcactctgcaagattgattttgtcaagccggggtatgccaataaatcacataaattcatccgccgcattctgccatatctgatggacggatatatgtatagcgaagcatgtgagcaagtacagattaagcattccaacagtatgacacgtgaggaacgtgatgctcgacaactaagcgaacatattgagctactgccaaagaatgcattgcgccagcctgtgatagagaaaatcctcaaccagatgattaacctcgtcaatcgcttacagcaagagtatggtcagatagatgaggcgcgtgtggaattggcacgcgaactgaagcaaagccgcgaagaacgagatagtgcctataaggcaatcaaccaaaacgaacggagaaacaaagagataaccgcaaagatagaagaaattggtattcgtccttcgcgttcacgcatacataaatacagaatgtgggaagaaagtcggtatcagtgtttctattgtggaaaaaccatcgacttggctcagttcctcaatggagccgatgtggaaatagaacatatcattccgcgtagtatcttgtttgacgatagctatagcaataaggtatgtgcatgtcgtcactgcaatcaagaaaaaggcaatctgacggcgatggagtacatggaatcaaaacctgccgttgaatttgaggcatataagcaacgtgtggcagaagcatttgaagacaagcgcatcagcaaaaccaagcgcgaccaccttctctggcgcagagcggacataccgcaagattttattgaccgtcagttgagacaaagccaatatattgcagtcaaggctgttgagattctgcaagacggcattcgaaaagtatggacaagcggcggtagtgtgacagatttcctgcgccatcaatggggatatgacgagatattacatactctcaacctgccacgatacaagcaagtagaagatttaaccgagatagtgcattatgaacatgcagggcaagaacataatgaggagcgaattaaaaattggacgaagcgaattgaccatcgacaccatgctatagatgctttgactgttgcattgacacggcagagttatatccaacggcttaatactttggaggcatcgcacgatgcaatggaaaaacaagtcaaagaagccggtacgcaatataatgagaagaaatccttattggaaaagtgggttgctgaacaaccgcatttcaaggtagccgaagtgaccgaaaaggtagatgctatcttggtgtctttccgagccggcaaacgtgttacgacacctgcaaaacgagctgtctataagggtggcaagcgaactgtcgtacaaacaggtctgcaagtgccacgtggcgcgttgaccgaagaaacagtgtatggacgattaggtgataagtttattgttaagtatccacttgaccatcaatccatgaaaccggagaatatcgttgaccccactattcgtgcaatagtaaagcaacgcatagcagaaaaaggtaaagatgcttttaaggaacctctctattctgcagaaggaatggagattaagagtgtgcgttgctatacaagcctctcagagaatagtgttgtacctgttaaatacaatactgaagaacaacctattggttatgccaaaaaaggtaacaaccatcatatcgctatctatcaggataaacaaggaaactaccaagagatggtagttagtttctgggatgctgtagaacgcagacattatggcattcctgcagtcattatgaatcctaaagatttatgggataaattgttaaatactgaactaccacaaacctttttggcaaaactgcccaaagacgattggcaatttgttctctcaatgcaagaaaatgagatgtttgtacttggtatggaggaagatgaattcaattatgcaatagaggcaaaagactataacctgctgaacaaacatctgtatagagtgcaaaaactaagttcaaaattctattgtttccgttatcatactgagactacagtggatgataaatatggagaggtgaagaacgaacaatggagttttaagattggtaaggcattccgcgcaagtagtttcgaagctttatttagagtattccctcacaaagttaaaatcgacataatgggtcgtattacaaaagcatgattaagcgagtactttgttttgaaaatcctgcacggttgagcctcaaattagagcaaatcgtcgtggagttgcaagatgctaaacgcaccgtgcccattgaagatgtgggtgtagtcatcttagaccataagcagataactatcacacacgcactaattgatgctctcttggcaaataactgcgctatcgtcacttccaacgacaaacaccttccggtcggactgatgcttccgttagacggacacaacctgcaaagcgaacgtttccacgaacagataaacgcatcagaaccgttaaagaaacagctttggcaacagacaatagtaagtaagattctcggacaagcttacgtgttgaacacacaaggtatagaacggcgtaacatgctcaaatgggctaagagtgtcaggtccggcgatgtggataatttggagggcagagcagctgcctactattggcagaatttgtttggtgatttggattttgtccgtggccaggaaggtccacctcctaataatatgctcaattatggttatagtattgtgcgcgctatgatggctcgtgctttagtaggtgccggcttgttgcctacgcttggtatttatcatcatagccgatatgatgcctactgcttggctgatgatatcatggagccatatcggccctatgtggatatgatggtcattgatatatggcaaaaaggagaagcagcagaggaactttcatcggatatcaaacgtaagttgttgggcataacgaccatggatgttattatagcgggtcatcgcagtccaatgatgctcgctatacaagcaactgctcaaagtgtgcagaaatgcttctccggtactgcacgcaaaataatatatcctgattggtagtttatctatcattcaagatttgtaactttgcaatataaaacagcatgaggagttatcgcaggcaatcctttcttgttgtgtatatcattcaaaatttgtaactttgcaccataaaacagc

SEQ ID NO: 913 - DNA, 12558 bp, synthetic construct
  misc_feature 1..12558: note = Synthetic
  source 1..12558: mol_type = other DNA
gggacgaaatattctcaatgtatttggggtaatacaaaatttttatcgtacagcagtgataaaaaatatgctaattcccaaaatgcttaagaatcggttttacaatcaaaagcttttatcaagtaggataagttgctgtctcaaaagtttgctttatcctttaaatgttgaaaacctaaaatcgaagacttttgagacagcaacttagtttttcggattacctgaaaatgtttttgaaatcttccttgcactttgcagtatcacggttttgcacacactgtgcatcgagcacagctaccagcaccatgttaatgatttcctgcacactgcttccaaagtgcaatacatgtactgatttattcaaaccattcagtattgggccaatcacatcaaattttccaacttcccgtaacagtttgtaggcaatatttcctgcagtgaggtacgggaaaatcagtgtatttgccggaccgcctgttaatttggagaaggggaaattttcttcgagcatttcctgatttagtgccacatcagcctgaatttcgccatctacaataagtttaggatagtcgcggtgcaaaattttaaccgcttcgctcaccatttcgggaatacgtccgcgattgctgccaaaattagaataggtaaccatcgcaacacgtggtgttacattgaattgtttaacagcaaatgctgtttgcagggctatttcaaccatttgttcaaccgaaggttccttgttcaccgtgcagtcggcaaagaacagtggaccttctttggtgttgatgatgtacattcccgaaacaagagaggcatttgtttttttccctatgacttctatggccggacggatagcatcgggataattgtttgtcagcccggagaccatggcatcggcaaaaccagtttcaaccagcatcggagcaaaataattgcggtggtgaaggcggtcgaaagcagtggaaagagttatccctttacgattgcgcttttcgaaaagtaacccggaaaaatattttttcctttcatcttcgattggtgaacgcgggtcaatgatttcaggatttgggatatcgagctcatgcatggtaatgagttcttttattttagcttcatcaccaagcagaaccgggaaagcagccttctggttgagcacatattctgctgcttttagcattttatagttttcggcatcagcaaacaccacacgttttggagtctcttttgctctatggcggatttgacgggaaattggatttgtaattcccatttttttcgtcaagaactcgttgtatgcatcccagtcggtaattggctttcgtgcaactccagattccatagctgctctggcaacagcaggagcaagcctggttatcagtcgcggatcaaagggtttgggaatgatatagtctctaccaaaagaaaagttggtagcatgataggccacatttacctcatcgggaactggttcggtagccagttctgccagtgcataggatgcagccagcttcatctcatcattaatgcaggtagcccgcacgtccatagctccacggaagataaacgggaaaccaagcacattgttaatctgattaggataatctgaacgcccggtggccatgattaaatcatcacgaacagaaacggcttcatcgtacatgatctccggcaccggattagcaagtgcaaatacgataggattgggtgccatttttttcaggtagtccttcttcagcacacctgccgttgaaagtccgagaaacatgtcagctccgtcaatagcttcttcaagagtgtgaatatcaagatcggtaacaaactgttttttgatattgttgaggtcggtacgatcgcggcgcagcacacctttgctgtcgagcatgataatattttcgggttttgctcccagctttctgtataatttagtgcaggagacagctgcagctcctgctccattgaccacgattttaagctcttcaattttttttccggtcagtttcacagcattgagcagtcctgccgaagtgataatcgctgttccatgctgatcatcgtgcatgatgggaatatcaacggcagcctggattttttcttcaatttcgaaacactccggagctttgatatcctcgaggttaatacctccgaaagtgggtgcgatggctacaacggtatccacgaatttttgcgggtctttcaggtcgatttcgatatcgaatacatcaatatcagcaaaaatcttaaacagaagccctttaccttccattacaggtttcccggccaggactccgatatcaccaagaccaagcactgcggtacaattggagatcactgctaccagattgcctttcatggtatatttatacacatcctccggcacgtccttgattttcagacaagggtcggctacccccggagtataggccagcgacagatcacgctttgttgaatagggttttgtagggatcacttccagttttcccggacgtccttctgcgtgataagtaagggcatctttcctgaataaattgtccagcataatttgaataactttggtttgtgttaaaattattaccttacaaaactaatcaatagtttgcagctttgcatgcttattcatttattttcaaaaagataatttctctgctgtttactgaatattctgatattcaataataaaacgactaattagaacgaatataaatttcaggaagatttgaacccggggaaacaggttattttcctttggccagctcaagaatttcttccacataccgacgttcgttggccagacggggtaccttgttttgtccgccaagtttatcgcggcttttcatccacctgtaaaaagttcccggaggaactgttctgatgattggttcatggagcagcaggcttttatagcgtttggcctcgtaatccgaattaagcgatttaagcgctgtatcaagggtttcggcaaagaagccgggatttgcaggtggcgtatcaaactcaattacccattcatgggcagctgattttttatcctgagaaaaataaactggtgcagccgtgtaatccgaaaccacagcctgacacttttcgcaggctatagccagtgctttctcagcattgtcgatgataagctcttcaccgaatgcgttaataaaatttttagtccgtccggtaatctttattttataaggattaactgaggtaaacatgatggtatcgccgatcatataccgccaaaggcctgcattggtcgaaatgagcatggcatagttaactcccggatgtacttcatcaagccagagtattctgggattatccttatccagctcttccaccggaataaattcatagaaaatgccataatcaagcatcaatagcatgtctttgtcctgaggttgattctgaatgccgaaaaacccttctgaggcattgtaagtttccatgtaacacatctcttccgaatcgatgagttgtcggtattgctttcggtaaggatcaaaactgacaccgccatggaaaaaaacctcaagattgggccagacttccagcatgtttgttttgccggtcttttcaagaatacgccgaaacagcaccagtgtccaggaaggtactccggatatacttgtaacatcatgtgtaatggttatggtagccattttttcaattttgctctcccagtcttccattaaggcaaccgaagtattgggagtacttttcagctgagcccagaatggaagattttgaatcagaatagccgaaaggtcgccggtgtaatagctttcgttgtttacttcggtaatattgcgactgcctcccataaccaggcctttgcccgagaatatccttgaatccggatgattatttacataaatggaaagcatgtcacgtccacccttaaaatgacattcctccaatgcttcgctgctgaccggtataaatttgcttttgtcacttgtagttcctgatgatttggcaaaccatttaatctctgaaggccacagcaggttttgatcacctttgcgaagccggtcaataaaaggtttcagtgtattgtaatcatttacgggtacacgattcttataatcctcaatggtattaatggaagcataatcatacttttttccccattcggtgtttttggctgtggaaacaagctttctgaaccattcctcctgaacatcaatagggtatttgataaaaagctcaatctgatgaatccgctttttgataagccaggtaaaaagtgaattaagtatcggcatgaattgaaattgttttaagtagtcgggtcaaatttagctcaattttggtcagaactgtatcgaaatgcactccaaagtatttatttttgcctgattaaatcttacttctatgctctcatttcctaatgcaaaaatcaatctcggactccagatcatcgaaaaacgttcagacggttatcacaaccttcaaacgatcttttatcctgttccgtattgtgatgctctcgaaatagtgcaggcagttgacaaaaagtttgagtttgttcaaacaggcattccaattccgggaaacgcaaacgaaaacctctgtgtgaaaacatgggagctcttgtcaaaacactacaacctgcctcccgtaaaaatacatttgcacaaggtcatacctgcaggggcaggacttggcggcgggtcgtccgatgcagcattccttataaaaatgattgcagacatgtttattcccgatttaagtcttgatgaacaggagaactatgcccggcaattgggcagcgactgcgcttttttcattaaaaacaaacctgttctggcatttggaaaaggagatcagtttcgccctgtcaacattgacctgaccggatactttgccgtaatcgtcaaacctgccattcacagcagcacgactgatgcctatgcttccatcaaaccccggatacctgatttttcaactgaagaactggcaaaaatagctttgaaagactggcataaatacctgaccaatgatttcgaaaaacctgttttcagcaagtatccgcttatacgggaaataaaagaacaactttacgccagtggggcattgtttgcaatgatgagcgggagcggttcggccgtatttggcatttttaacaaaaaaaccgacctgaaaaaaaccttcagtaactgcacttattggagcgactggctgtaaacctcctgtgaaaagattttacctgagcccttcccattcactataaaactgatcaagaaaagcttccatgtacatatgccggtcgaaggcaaggcgctttccggtggacgtattcattttgtcttttagcaacagcaacttttcataaaaatgattgatggtgggcgcatcactcttcttgtaatcatcttttgtaaggttggtttttggcttgatttccgggtcgaacaaaggtctgtttttaaacccgccataattaaaagctcttgcaatccctatggcaccaatagcatccagcctgtcggcatcctgtactactgccatttctttcgaatagaatttcacttcacccaggctgtttttgaacgacatgttcctgatgaccgcctccacatgactaatgattatttcatccactttctgctgccggagaaaatttgaagccatcacaggccctttttcttcatctccattgtgaaacttcggatcggcaatgtcgtgcaacaacgctgccagctccactaccagcatgtcagcgcgttcttcaatggcaatttgccgggcaatcctcaacacgcggtaaacatgccaccagtcgtgaccaccttcagctccgtgcaactgattgcggacaaactcagttgtacgggaaataagttcagtgttcggtttattttctgtcgtaagtcagctattttattaatcggaaatccgtactcacaacacacttttctgcaaaaaaaagaagagtttaaatcataaatgattaaaaatttctaattttatggacttcaaattatgcatccctgccgctgcaagtgcaatgtaaacgtaataaaaataaaacatttgagtaaactgaacaaaaaaaagcgactcctttcggaaccgctttacatgttttcacaacggaataatccttattgtgaattgcttcaatttgacatgcaaagatagaaaaaaaataaaaaacaaatgaaatgaaaaaaattttaggactggatttaggtactaattccattggatggtcaatcattgaacacgatgccgagctccaccagggaaaaattttaggattaggctcacgcattattcctatgactcaagacgtaataaacgaatttggtaaagggaacagcgtttcaaaaactgcggaaagaacgaagtacagaagcgttagaagattaagagaacgctatttgttacgcagggagcgattgattaaagttttgaagaaattaaactggattgatgataattttgatccaaaaatcagtaaaatttcttacaaattaaatgaagtaaccggtaggtatgaatttcagtttgaagaaagctatcaggaaatgctgagctatttcaaatctgtttatcaatcagaaatgaaaattcccagggactggacaatctattatttgagaaaaaaggcactatctcaaatgatttcacctactgaactttcgtgggttatcatgcagtttaaccaaaaacgaggatactatgaactgcgctcagaaaaggaggaacaacctgaagataacaaagagtttattaaagccgctgttgtcaaaatttcaaaaacaggagataaacgaggccggaatataatactggagttaactcttgacaatggaatgactgggacactgtcaagtaatagtgtgcctgattggataggacaggaaaaagaactgatcgccacaaaaaaagagctgaaagacggcacagtaaacatcactttttcctttcctgatgaaaacgactggactttaagaaagaaaaaaactgaaagcctcattgattcgaaaaagaaaacggtaggagaatatattctggaggtattggtaaataatccggatgcaaaaatacgcggaaaagaggtacacacaattgaaaggaaatattatgttaacgaacttcaacaaatacttaaaaaacaaagtgaataccacactcagttaagagataaagatttattccttgagtgcatcaatcttttgtatccaaataacgaagagcatcgcaatatgcttaaacttcaggattttgtctggttatttgttaaggacattctattttatcagcgtcccctccgaagtaaaaaatacatgatcgacggatgcaaatttgaacgaaggtaccacataaaagacgatgagttaattgaaacccgggtaaaagttattccaaaaagccatcctctttatcaggaattcagaatatggcaacttctacataatttaaaagtgcttaaaatacaggaaacagatgccagtggaaagatattttatgatgttgatgaaaccggaatctatctgactgatgataaaaaagaaaaactttttcatattttcaatgaatcagctgaagtaagtccggccagaattttaaaaacacttgatttagataacaatacattcaaaatcaattatgaagcagatacaaaactaccaggaaatagcactgtagccggattcatttcaggttttaaaaaggctgatgcacttgaagaaggaaaaaacttcctgagcaatcagcaaaataccgagaaactatggcacataatctactcgcttgaaaagaaagattttgtaaccaaggcattgggtaatcctgaattaagatttccaaaacaagctatcagcatatttgcagctatgcctgcttttaaaaaagattatggcgcttattctgcaaaagctgtaaaacgtttgctcccgttaatgaaatgtggaaagctttggtcccaaaaacctattgaagatatcatcccaaaattcctggaatggaaaaatacagctgaatacaaaatgctttcaccgaagattaaagggcaattggacaagctcgaagctattgaggaatttcagggactttctttaacattggctgaatatgtagcataccagagccattccgaggaaagggaaaaattaatttataacaacccggaggatattaaacggttaaaacaacatgcgttacgaaacccgattgttgagcaggtgataaacgaaaccctcatggtagtcagagatatttggaataaatacggaaaacctgatgaaattcatcttgaaatgggccgcgatatgaaaaaccctgcaaacaaaagaaagaaaatgaatgaacggcgcagtgaaaatgaaaaaataaacctacgtgccaaggctatgctctttgaactacaaaaagataacaaatctattaatcccttttcagtaggtcaattggagcttttcaaattatacgaagaaggagctttgggatcatcggggatagtggatgatgaaattttcaaaataaccagaaaagccgacccaacacagtccgaaattacaaaatacaaattatggcttgaccaaaaataccgctctccatacacaggtaaacccattcctcttgccagtgtttttacttctaaatatgaaattgaacacatttttccgcaagcgcgctatttcgacgactcgttcaataataaagtaatcagcgaaagtgaagtaaaccgtgaaaaagggaaaaagactgcatttgaattcatttcgagcgatggaggtaaaaatataaaactgagctccggtgaaattgtgaccatactcaataaagatgaatacattgatcttgtaaaaaaaacattcggtcacaacaaaggaaaacttaaaaatctgctgagttacgacatacctgaatcatttattcaacgacagctcaacgatacacgttacatatcaagggaactcaaaaaatatctttcaccgttagtcagaaaagaaaatgaaactgaacctacacctgttggattgattcctatggtaggaagtatcaccgacagaataaaagaagactgggggatcaagcaagtgtggaaagaaattcttattccacgtttcaggcgattgaacgaaattacaaactccaccgattactacactgaaaacattgacaacaacgggaacagaacttttttgctaacagggcataaagaaagtgtcaagcgacttgatcaccggcaccatgccatggatgcgcttgttattgctgctattacacgtgatcatattcactacctgaacgccttggaatcggaacacgaaaactattcacttattaaaaaacttaaaggatataatcagcacaaccaacccaataaaaacttcttgaaaccatggaaaacattcaccacagatgccaaagaaacacttgaaagaacagtagttagtttcaaaaacactaaccgcgtcttaaaccagggcagaaaccgaaatcagaaatgggaaatgcaagacaataccctgaaaaaagtacctgtaacccaatcgccagataatttatgggcaatacggcaaccacttcacaaagaaacagttttcggtaaaatttgtctgcgtcaatacaaaaaagtctcccttgtttcagcactttccgatcacaataaaattgctgatccttttgtcaggaaaactataaataaactttttatccaatttaataatgatttaaacagggtaaaatcctttctaaaaaccaatccactgataattaatggtgaagagctaaaaactgttgagatttactattatgactatttttcttcagttcgcaaaacactggatgcttcgttcaatgaaaaaatgatcgaaaaagtttccaatcagcgcattgcaaaaattctaaaatcccatcttgaaaagtatgacggaaattctgaaaatgcattttcacccgaaggcattgaggagatgaacaaccagttgcacattccgataaaaaaagtaagagtctttgaatccatgggtaaaaaattccaacttggtacaagagacaataaatcttcaaaatttgtggaagcagcaaaaggaaccaacctcttttttgtggtttacgaaaacattgagaccggagaacgctttttcgacgaaaattcaagtctgccgctgaaagatgtcattgaactaaaaaagaacggacttcccattgccgcagaaaaacctggttaccgttggtttatcctttctccaggcgaccttgtttatgtccctgattgtgatgaaaatggaaaaataattgaaaacataagattaattgactgggaccatccaacatcagagatagtatcaaaaatattcaaagttgtgagcttcacgggaagtcaggcattttttattcagaactctacagcaactgtaattgctaataaattagaatacggatcacttaataaaatagaaacaatcaacaatattaccattaagaagatttgtatcaaattacaatcagaaagactgggaagtattaaacccgaatactaccctgatgaaatacataattattcaagttctacttctgaatcagatcatactaatgaacctcctacaaattacattggagcagaagttaagatcttttcatcatttcacgatgaaaacgaagccacctttaaatatatggcagaacgcacacccgaagaaaacctgagggctgccaatatgattatcactgccttgtatcgtaatgaactgaaaaacaatgaaaaaacctatactaacataacttttctgaacaatggactttctgattaaagaacacaaagaaatgctgttacagctcactgcgaataaagtggattttatgctgatcggcggatattcagtaatttattacggctacagcagaggtacggaagatatggacatctggctgaaacctgataaccggaacaaagaaaagcttatcactacattaagcaaactgggcattaaccgtgaagacctggataaactcggtaaacttgattttaccatccctcaggtattttttatcggcaaaaaaccgcttaaaattgattttctcacgcatgttgaaggagtaacatgggatgaagctgttggtgaaacacgccggtttcccctggagaatgaacagatacctgttgttgcctatcatcacctgattacaatgaaaatggtttcatcaagagcaagggacaaaaacgatgtggaacaactgcagaacatcaacaaataccgcaataagaagtgattaaaagaacactttactttggaaacggatgttatctgcacaaaaaaaacgaccagcttgttatagagcctgatgacaaatccattgaacagcgaaacattccaatcgaagatattggaatagtggtcctggatcattatcaggtaaaaattacaaatgccttgcttcaggcacttaccgaaaacaacacggctgtgattatctgcgatcagaaacatctgcctgcttctttacttcttcctttttcatcgcatcatgcttttaccgaaaaactttaccatcagttggagtcatctcttccgctacgaaaaaacttatggcaacaaaccatttcggcaaagataaaaaatcaggctgcggttcttggttggtcgggtatcgcaaatcaaaacatgcttttatgggcaaagcaggtacgtagtggagaccctgacaattttgaagcccgcgctgcagcatattactgggaaaatttcgtggcagggttccgccgtaaccggtttggtgagccaccaaacaatctgttgaattatggttatgccatacttcgggctgttgtagccagagctttggtttcaagcggtatgctgcctgcagtgggcattcatcatcgcaataaatacaatcctttttgtctggccgacgatgtcatggaacctttcagaccttatgtagataaattggtgttgaacatttcagaacaagaggacaatactgatgagcttaacccttcaattaaagcccgattgctcgctgtgcccgtaatagacataaaaattgacggggaaaaaagccctttgatggtgggcattcagcgaacaacagcatcgctgatgaaatgctttgaaggtaaaaccaaaaaactactctatccaataatgtaaaaggatgggagaatatgaaagtatatcccgattaaaccaataccgcattatgtgggtttttgttttttatgacctgcctaccgaaacgaaaaaagaccgcaggaacttttcgttgtttcgaaaagaattacaaaaagacggctttaccatgctgcaatactccatttatgtgcgccattgcaacagtcgtgaaaatgccgaagtacatacccgcagagtgaaaagatttcttcctcccaaaggagaagtcatcatttttaacctaaccgacaaacaatttgccatgatggagtttttcaggggatgttccgtcgccaggcgaccatccactccacaacaactggaacttttctgattgttcaggaataaaaaaaaccgctccgggataaaattccggagcggcttgccacagtttttttatgttgtagaatagccataaagaccataatttcaa

SEQ ID NO: 914 - DNA, 6752 bp, synthetic construct
  misc_feature 1..6752: note = Synthetic
  source 1..6752: mol_type = other DNA
tgttttgcaagaggcatagcacataaagtgctgaaaaatagtgtgtagtattgatttgaaatgttttggccggcaaacagtaacagcccttctttttgtcggagatttatagaagtcacttttgaaagaatttgaggcaatctacagaggctgaaagccttttgtcaggcttttcataatagcttccatgcaataaaaaaggccttactatgctttctgcctgtagatctgttttgcaagaggcatagcacataaagtgctgaaaaatagtgtgtagtattgatttgaaatgttttggccggcaaacagtaacagccctttttttttatcggagatttatagaagtcacttttgaaagaatttgaggcaagctacagaggctgaaaagccttttgtctggctttgagattgatttgcccctaagaaaaccagctctcttataaagttttgtatggctttgcagtatccccctcagggatcacgccgagcgaagcgaggcgtaatcccatctctttaccagaattagcccgggggttattccgagcgaagcgaggcgtaatcccctttctttgcccaacacaacacaatcacccgattattcctgaccccagcgccacggccagcatcagcagcataataccgataataatctgtatctgtctcatggtaaccttcttcaccattctggcacctataaaagagcccaggaaagccgccagggtagcggtaataagtagccccgtcatcctgtcatctgcgaagaggctggtgcctgagcctataaaggcaaccccgtatatcgatatgcgggacacatctaccattatggccgacataacagaagtacctataaactggtctcttgtaagacccgccttagccagaaaagcagcccttaaagccccctggtgccccgatatccctccgaagaatcctgacattacaccacccaggggcagccatctgaccgatatctttctcttttcaaaatagggcaacagttcaacaagtgcaaaaaccaccatcagaagagctatggtgaagttaaccggctcaacactgaatatttttgatcccgccgaccagctgaaccactccggcataccggtaagcgcggtaagcagcagtgcccccgggaaggctgctattaaagccggaatagcaaactttatcagtactgctatcttagcccctctgcctacaagaaaagctttaaacacattattcgccagatgcactaccgctgtagcggccaccgctatttctacagggaagaatatagccattacaggcagcagcagtgttcccagcccgaagccggaaaaaagggtaagtgctgccacagctgttgcggccagcgatactattatatattcaatcatagagagagaaatgttttagccatcttgttcgtcaaagcatacaatcgctttcaccgatagcgaaaatagaccatttttttcgtcaatcaaccactcagctaagttttagggaatgatatcttgcacctgcccctcctgcttgcaatagcggcttatggagtcagcgttgggggttttatctgtaaatggttataattcaggtaaagtcatgatggcaaacctttactcacacacatttatgctcgaaacatagtcaggcttctctctgttaatggttttaagatatggtttcgcgtgtgttcaataatagttggttgctatgagtatttgaaggtgaataccatatttctttcttgactaagataattttattaaattgctcttgttttaggtccctgtaacgattagtcaggtcaggtttcagttgcaggagattcaatttaaacagcaactgctcccggagtatgatctcgaagagaaattggaaacgataccaaaaaaaatgcccccgagttgtaggacgagggcgacctgaatgttttcacaacggaataatccttattgtgaattgcttcaaattgtagagcaaatatatgaataaaaccttataagaccaactattatgaaaaaaattctcggacttgatctcggtaccaactcaataggatgggcacttgttaatttagagactgcaactcaaaggggcgaagtgattaaagcaggttcaaggataataccgatgagccaggatattattaacgattttggtagagggaacaaggtgtccaaaaccgctgatagaacgcattacagatcagctcgtcggctcttcgagcgaagaaagctcagaagggagaggttgatcaagattttcagggagttgaattggctcgagactgactttagtgtcttgaatgacagagttgcatatgacagcaataatgactttctctttattgatagttacaacgaaatgcttgacgatttcagaaaagagcgggggtcagatatcaatgtgcctcatgattggacaatttactacttgcgaaagaaggcgttgagtcataagatcggcaggcgtgagcttgtttggattataatgcagtttaataagaagagggggtattatgagttgcggtctgaagaggaagagtcaaaaggtactgcagagaataaagaatttgtctctgagaaggtagtaaatgttgttgatacagaagagaagcgcaagggaaataaaatatttgaaatcactttggaaaatggtgtttccggacaaatacagagtaagacctatcctgattgggagggcagcaaaatggattttattgttaccacgagaacacttaaagatggtagccagacatgtagtctttcggtgcccgaccctgaagactggacgctaagaaagaagagaaccgagaaaagaatagatcaccgtaaagagacagtaggggagtatatatacagtcttctattaaaagatccgtatataaagataagagggaaggaggtgcatactatagagcgtgcctactataaagaggagctgaaaaggataattgaagcacagaaggcatatcacagtgagcttaattccggcgagttttaccaagcttgtattgagcttatttaccccaataacgaagcacatcgtagaatgctactgaagagaaatgattttacatggctttttgtaaacgatgttattttttatcagaggcctctgaaaagcaagaagtccttaatcgcgggctgtaagtatgaaacggcttcatttctcagggaagagagagagatgacggttgaactgaagtgtgctgccagaaccaatccatggtttcaggagtacaggctatggtcttttattcataatataagaattataaagagggaggaatatgacgatgatggcttgctgcggcaggatgttgataaaaccaactcttttttggatgaagatgccaaagagaagctgtttgacgagcttaacaacaggaaagaggtgaacccctcaacaatactacgccttcttaagctctctcctgacctgtatcggatgaattattcggatgagactaaaatcaaaggtaacgaaacacgggcgctctttattagcggttttaaaaaatccggttgtctggaaaagggtatgcaattcattcagaacaggtctaatgaatatcgcctgtggcatgttatatattctttggacactcaaagtgaactggtgagtgccttggggaacccaagttttggtttcccggttgaagcgatagagacattctctttattaccaaaattcaaaaaggactatggatcattatcagagaaggcgctgaaaaagatagtgcctcttatgcgctgtggcagatactggcgggtagatgagatagattctgggacagaggtccggataaatagaatgattgatggagaaatggatgaggcgattcctgataaggtcagggagaggtttatagaatacagaagtattgataagttcagagctttacgcgagtatgagtcttcctatgtggtctatggccggcattcagagagtaaagagcgtcttgtgtttgaaaaaccggaagatattcgtcttctcacacagcactccctgagaaaccctgtagtagagcaggtaaccaatgaaaccctgatgcttgtaaaggatatttgggaggagtatggtcgcccggatgccatacatatagagatggcccgggatcttaaattaccggcagaaaagagaaaggcggtaagcaggaagatggcggataatgaacgagctaatttaagagcccgtactatgcttgccgaaatgaaaaaggagatcccttctatcaatcctttctcaataggacagacagacctcttccggatatatgaagagggtgcccttaataattcacaggatgttgatgaagagatcaaatctatcctttattcatcgagccccaagccatcagatcttattaggtataagctatggcttgatcaaaggtatctctcaccatatactggtagtccgatatcgctttcagatctcttttctacacgctgtgagatagaacacataatacccagagccagatactttgataatagttttaataacaaaataatttgcgaggcagaagtaaacagagagaaaggtaaaatgacagcctatgagtttatttgtgaaagaggtgggttggttgtcaagctctctgacgggcgaaaagttacggtgcttgacaaagataactacgagcacctgatggccagactttacagaaaggggagtccgaaatacaagaatctcatgagttatgatatcccggagtcattcattgagcgtcaactgaatgatactcgctacatatcaaaaaccatcagaacccttttgtcaccagttgtcagaaaagaaaatgaggaggcggacattcctgccggaatagtaacaatgccaggtcaggtaacagctactctgaagagagactgggggcttgaccatgtgtggaaagagattgtctcacctcgttttttaaggttgaatgaggtaacagagagcacagattattatgaaaaaacagatgacggcagatcgtttatactgaaaaggcatagtgggttaaaaaggatagatcatcggcatcacgctttggatgcccttgttgtggcttgtactacaagaagccatatagcctatctcaatacattaagtaatgagaaggctaattactcactcagaacaaagcttctcagaaatggtaaagggagtaagttcaaagagccatggcagggcttcgtaagagatgccgctgaagcactttcggttgcaattgtgacctacaagagtacaaacagggtgctaacaagggggaacaactacacctggaagtggattacggaaaacggagtaaagcgaaaagttcatgtcaggcaggataatgctgatctttgggctgttaggcaacctttacataaagagactgttaatgggagaatagtgttaaggcgttatcgcgaacagtcgttgagtaatgcaataaaaaatcccacgataatagccgatagtgataccagaaggcatatcaagagcctgtataagcagtacaacggagacctgaagaggattaggaagcatcttgctctcaatccgattacacaacaggggaaagtggtggagagagtaaaagttataacctatgagaccttctccgctgccagaaagccgattgacaaaacattcaccacaaagattattgaagagaaggtggcggatagccgaatacgcagcatcctgcttaatcatcttagcaaacatgacaataaccctgaagttgccttttcacctgagggcttggaggcgatgaacgccaccctcaggattcccgttcgcagggtgagggtatttgaaagtatgggtaagaaatttagtcttggaagtaccgctaataaggcatcgaaatatgttgaagcggccaaagggacaaatatgttgtttgttatttatgaggattgtgagggctccagaattattgacgataattcaagcctgccacttatggaggtcattgagaagaagaaacttcgcttgcctcctgccgatcatattgaaggataccgttggtttacgctatctcccggttcggttgtttatatgcctgagccggatgagaatacggaaaatattgactggtcgggtttcacttctgaacagatgagtaagctatatagatgtgtaagctttagcggttcaatttgctattttcttcccctgaccctggccgatgttattgagatgaagaaggagtacgggtctcaaaataaaactgagagagacaattatggtcagatgataaagaggcactgtattaagcttgaagttaccagactgggtgacttttatccggccatttatgattctgacaaatgggctgctaaggtatgataaagaagacgctctatttcggtaatgcctgtaatttaaggaagaacaacgaccagcttgtggtaaagtatcctgatagtgatcaggtgaggagtgttccgatagaagatattggcatagtagtagtagacaacaatcgaataactatcagcagcggtctgctggagagtctgatggagaacagtactgctgtaataacatgcaaccgctcgcatctgccttatggtttgctgttacctatgtatggtcaccacgcatataccgaaaagcttcgcacccagatagaggcatcattaccgttgaaaaagaatctatggcagcagacagttgttgctaaaattatcaatcaggccggcgtattacaagttctggaacttccccatgataacatgctatactgggcaaagaatgtgcgtagcggagatcct

SEQ ID NO: 915 - DNA, 23351 bp, synthetic construct
  misc_feature 1..23351: note = Synthetic
  variation 14656..15990: note = n is a, c, g, or t
  source 1..23351: mol_type = other DNA
aagtcgtgtatcattttatagtctaaattcaaattaaactactaagttttgttttcataatataagcaaagtttaaaagcaataaacacttcaaaatgtttattgcctttttactcatgccactttatgagaatcatcagtagaactctctgtatcgatagctactccaagtttagctgatattatagtatttaacttattaattgaacttgataagctaacaatttgtttctctaagcgtattagcaaatatgcagatacagccacaggaaaaccattatttactataagattaattaaatctgttacttccatgatcacatcacctcctacaaaggatatatgaaataaaatatattagttcatgttagagaacaaataattatctgaaattaaaataaattactgagtgccaccttcatttacaatatggttatgataataatctatagcaatatcaactatggtactgacacatacaataatatctgggtatatgctttttaattcatttatttttcttatggtagaacttctaagggtgtagcttcttttaatatttggagtttcaccatcaatggcaggagtggcaccattaggtatcaaacagttccttagcagagcttaaagtattttttatttctatggagttagttatattattttgaaaattgctgttaatagttgaagctgtattagtttgagtattgtttttaggatcttcttgaatagcagcattattattagatttactatcagagctagtttgaataatattaatatcagaatcatcatcaaaagagaaagaagatatgcagtcaccagctataggagattcactagtaaatccgtatacttcaccttcatcatattcaaaatcatttttaggaacctttgatgtttttcttctagccataagttatataccctccttggcagtatttttatgtatcttcataaaagatatatggttatttatcagagattctcaaattctaaagaatttgagaatataaattttttagaattaaggaattttagaatgtaagattttaagaatatatattctttagaatttaagaacttaagaatttgcttataaaatgcgggttaagagattagacatgtaaatttaattatgattttaatgttacgttgcagtataaaacatatatcaataatatcagaagattaagtcttaatatttaggagtgtgcagcagttaactctcactataagaaatgagagtctagctatcggataaattttcttaagctgtaaataaattattggagtgtgttgtaaaaatgattagagatgaaattaaacttaatccagaagaagtagagtgctttgataaaaagcagattgctttagcaattagaaattcgacttttaatgatgaacttcaatgttctttaattactgaaggaatacttaataaatgtgaaggatgttctcttaagtatatttgtgatagcattgatcaagtagctcaaaactatattgataagactacagatgttattaataattttaattttgaataagtggatatagattaatatagttatataaaaataaaaactcctaggttagccttggagtttttacgctttgatgctttcataataatgagatatattgtttagtattttctttagaatagtgttcttttttaggatagcagtagagtagcacatatttttaaaataagcatattcttttacagtgtaatttttatagaatacataatctatgagttcaagttcatcttcatttaaatcttcataatcacacatttcacataatgaagtttcagttgagatttcttctgaaggaagattactttcaaaattatcatatagacttaatgcatcattaccttcagtagatcttctagttttaattcttttgattaaatcactcatattatttttaatggcattagtagcataggcaacgaatctatgcttttctatattgtacatgtaaacagatttaaaaagtgattggtaacattcctgcataatatcatgtgcgttatatccatcaatgaaagttcttttagaaatattataaattaaagtcctaaattattcagctaatttttcttttgcttcttcatcattattcttgcacttggtaactaaaacttcaatataactaaaatccatataagcctccttcctcaactaagagttataaatcaaataatttacatatattgtgtttgatgttaaatttacctctacatatagtatatatggttaaaattcatataacgtatatgagtaattaaaaaaattaagaattatagggagagatgtaaaatgagcaattttataatagcagtaggtcatactgctagtggtaatgttggatgcggagttattgataggcttgatgagagtaagtgcactagagagattggagctttagttacgcagtatttacaggagaaaggccacggtgttaatttacttaggattgatgaaggcaataaatataactgtgaagattgctatattagatcagttcaagctaatcaaatagcacaaactatagaagttaacctttatgtagaaattcatattaatgcaggaggaggtagtggtcctgaagtattagtatttggaaaatcagaagtagctaatcaatatgctacgaaagtctgcaatgaattatcaagtactctaaatttacctaatagaggagtaaaaataagaaacttaattgttcttaataaaactgttatgcctgcaattttagttgaatgtttatttgctgatagtgatgacgcagacaaatatgatccagatattattgcaagagttatcgttaatggattagttggagatgaggtttatggtaatgaagagtggaagaatgggtggaatcataatgatgttggttggtgatattgtacggatatagagaataaatactattacacttctcaaaatggctggcaggttattgaaggggagtggtatatttttgatgataggggatatgctttgcagaattgctggtatcatgatgaaaacaataatgtttggtattacttagatgaaaattgcatgatggttaggggaaataaagaaaagccgctttggaagtgtattaatgggaaattttatgcttttgatgaacatggaagatggataaaatgatatattgattttagaaagagataaacaggttgatttttaggtttagtatctcttgtttaagataatcattaaaatacactaataataaattttttaaatatcatctatagaaaatttattattattaaagaatgctcatgccgatataatctgtcgataattctctggatcctagagctagtagatttgaagattgatgtaatttatagcctcttaggaggccttattttatatggttttaagatttattcaattcattttatcatgtaatatcataaaaaattaactgttttttgttgcatgagtgccattaaaagtaaaatttatttaattgattatataataagttggaaattagtaagtgattaaacatttggaaatttgtacatattatatatagaattagaaaataaatatttaaatttatgtcccaaatattgaatttatgtcccaagatgtagtataataaattaggaggtgactgatatgaagaaaaaaaatgtattaaatttaataaaatattatgctgaaaaaaatgatgctggatttagagatcaagcgtatgaaatagcaagatattttgatgggattggaaattatcagttagctgaatatataatggcattaatgtcgaataccaatacttttgttcctcaaataagtgatagtaattctagtttctttcgaaaagtagagtatggtactgattcgttacctttaccagaagttattaaagatgatgttattggaatagtaaatgcaattggtcataatgctggtattaataaatttttatttgaaggcgcgccaggcactggaaaaactgaaactgcaaagcagattgcacgaatattagaaagagatttatttatcgtggattttgattctataattgatagtaaacttggtcagacatctaaaaacattgcttctctttttgaagagattcgtaatttttcacatcctgaaaaattaatcattttattcgatgaaattgatgcaatagctattgatagaattaattcaaatgatttacgtgaaatgggcagggctacatcatcagtattaaaaggaatggattcactaaatgaaaatatagttttaattgcaacaacaaatttatttgatgcatttgataaagctttgactagaagatttgattcggttattgattttaatagatataagagagaagatctaattgaaattggagaagcaatattgaatgaattgttagctaagttcaaatttgctggaagaaatatgaggttgtttaaaaagataattagtcttatggaaacaataccttaccctggggaacttaaaaatcttttaaaaacagttattgcttttagtaatccgagtaatgaatatgattatttaaaaagattatataatagcgttaataaaaagaatttagaaatggatttaaaagaacttcaaaatgaaggatttaccactagagaaatagagatattgacaggaatttctaaaagtcaagtttctagagaattaaaggagtgattatatgaatgaccttttacaattaaagggcacgtttgaacaaaaatcaaataattcaaggcctggatcacctgaattgccatctgaagcaactgtaaaagttgaacacttggaaaagctaaaaaatgatttagaggctttaaaagaattttggagtgaagatacaattcttaatggagctctagtaagtgttttttatatagacgttattgctaaaagtagaagaatatcaggaaccttaacaaagggctctatcactgcaaatagttctatagttggtgccaaattttcaaaatcagatagaatgaaacatataattactcactatgtgagtttggaaatgttaaatgagtccatagaaagatacaaaaaaagtataactgttttgaagaaacagtttaatggtgttattaattgcgaggatgttaagaaattaaatcagaaaaagatatcgtatgacaatagtttaatagcaaagacaaattttttaaaaataattgttgatgctcattatgttgaaaaattttctattgttatgcaagaagaggaattgagagaaaactcaattattacaatttataagactgatacagatacaattgagcttatggataaaatagggattaatcttctttctgcaagattgattgatgatactacaatgttattaacaccagaccaattagcaattttaaagcaaaaagcgccatatttgatatctatggctataagtgatatttcaaaattaacaaaaacagattttgagaatatcgatagagaaactattaatattccaagtcctaaaaatgaaccaactattggtgttatagatacaatgtttgatgaaaatgtatatttttctgaatgggttgattttaagaatatggttagcagtgatatagaattatcacaagatgattattttcatggaactgctgtttcatcaattattgtagatgggccatcaattaatcccgatttagatgatggttgcggaaggtttaaagttaggcattttggtgtagcggctggaagatactttagttcgttttctattctgagagctattaatgaaattattagttctaataaagatataaaagtatggaatttatcattaggagcacctgtagaagttaatcctaattttatatcaccagaagcagctatcttagacaaaatccaatatgaaaatgatattatttttatcattgcaggaacaaataaaaattcaatgaataaaacagtagaggctataggagcaccagctgattctataaactcactagtcgttaattctgtagactttgaaaataaacctgctaaatattcaagaaaaggtccagtattatctttttttactaagccagatgttagttattatggaggagatggaaataaaaaaataagagtatgtacatctatgggagaggcctttgtagcaggaacttcatttgcagctccgtggatttcaagaaaaatgtcttatttaattgatgttttaggattaagtagagaggtggcaaaagcattaataataaattcagctactggatggcatcctcaaaaaatatcttcttcattaattggacatggtgttgttcctcaaaaaattgatgacatattaaaatcacctaatgatgaaattcgttttatattatcaggagtatcggaaaagtatgatacatataattataatttgcctgttccaattgataaagagaaacacccttttattgcaaaagcaactatgtgttattttccttactgttcaaggaatcaaggcgtagattatactaatacagaacttgatatatattttgggagaattaatggaaaagaaataaagtctataaataataatcaacaatgcacagatggtaatcatctatatgaaggaaatgcacggaaattttatagaaagtgggataatgtgaaacatattatagagtttgccaaaaataataaacctaaaaaggtgtatgataaaggtatctggggaattagtataaaaacaaaagaacgccttgaagagaaatttggggatggaattaagtttggtattgttgttacgttgaaagaaataaatggcgttaatagaatagaagacttcattagaaattgttcattaagaggatggttagtgaatagagtcgatattgataatagaattgatatttataacatagctgaagaaaatattgattttgatgatgtgttttaattaatgttttagtttagtagacaagcaggtatttggaaaaaatttaaaatcttatgaagaagaaaaatagaattatataaaatgggaatatgtgacgaagctaattaaaaatcaacgacttaggatagttatcatatgaaggattgtcaaaaaaatatgaaaaagatgtgaaagaaaaaatgataaatatttaagatttactaaagttttaagaacaaataaattttaggaagatgataagatcccaaagcaaaaaagtctttgggattttattgatttattcaatataataaatttaatttgtggtatagaatataagtatttttattttataggtgtataattcggtaataatacatatacaatggtgggggaataatgatgaattatttaagaaatttattattaacattaacaacagtaggagcggtattaagtttttatataaaagtatgtagagatttttttatagaaaccatcaaattaaattataagaatgttccaggtaagcagtcaatttttgaaataattacaatatggattatgtatagtagcataattatatatatagtttgggttatagtatttatattaactaaaggaagtatgatgaatataaagtctacagatataataactcaagatagagtagcatatttaattgctgcaacaatacttattctatttttgaattcattttcatgtttggtagttagtttttatatgctaagaaaatattttatttataaattagagagaaaatgtataaaacgagtaagcaataagatgcgattatggattagggggagcaaaataacatcatcattgttatgcttgattggtatgtttgtaataatatattatccaatgcttcaaatgtcgttattaaaagaagatagaaattttatatttataaacacacttagcgtagaagaaatatctacatttgctacatatggaattatagcgtttataagcttaacattttttataatattaaatagtatggaggaaattgcaaaaactttaaatgaaaacttcacttacataattttgacggacacagaagagatagcatgcaatatttatttagaatataatgagtattatttagtatttaggaatggagtacagagatatataagtaaaagtaaagttaaagaaataaataaaagtacttactattatgcagacaagattttaatttaaaaatatagcagaatttatgtataagaatataaatattttttgttattgtaataacttactctttgatataaaataggtaaaaaaacaagatgaattttaaaggagtgattttgtgagtgggataatgtatttgtacgtatctgataaaaatggagcacataaaatacctaaaccaaagcgttccacttatacatatagtacaacttataaagcagttcctagtttagcaaatgaagaagtattacttgtaatattatgctatgaaacagtaaatcgtaaacctcgtgaattagaccttgtatcatttcatagggccagattggatggaaaaggatgttatatacaggataaagaagaggttaataattctttgattaattttgttaattatgcttttgcaacttctgatgagttagctttaagagatacaatccctataccagttgcgcctaaaaacatacctacagaaaacgaaaaaaatgcactttattcatatgttaaagaaaattatccgagcttatggactaactgctcatatttagtagaacagaatgttaaaagtatggaaaagcatcataatgaattaaaagaacttgttaaagaagcatataagaagaaaataatataaaatattaaataaacaactaaggaataaatttattaaggagcattaagtgctctttgtgtctgcgtcactacataattcttttgttatttttctatgtaagtaattatcactatattcatataaatataattaactgtaaatatttattcttatatatgctagttgctactatatacatgttttctaaaggataagttaatttattgaataattatattggcgcttaaccaatcaccccaaaaagtactggtcatatagcatatgtctctaagcgtataggagttttccggcagctctaacctaacatatactaagagatattatatattagactagtcttttgtttggcacccgatgagttcagaaggttagtacacttcgggaaacgttatttagctgaaatgtatatgccttcttttctgtattagggtttcgtgatgtagatcatgaataatatgttactatatttttaagtgaataattttaattttgagtaaatagaaaacatatattaaagaaacataagcctttattgatattgttacaaaagtgattggtagcattcctgaataatatcatatgagttatatccatcaatgagagttctttttaaaatattataaattaatggaccgaattcttcagctaatttttcttttgctcattatttttccatctggtaactaaagtttcaatataatcaaaatccatatgaacctccattatcaataagagtcataaatttaatgaaatatcttgcatatattgtgtttaatgctaaattaacttctacatatagtatatattgctaggttacatatatcggagtataaaaataattagatttatgttgttacttaggtttagatattgaagttcttggttgcagcatcatatatctgctctttttaaaggtgtacaacttagatgtaaatataaaaaactaaagattgtagaggagataggtaaaatttaggagaggatggaaagatgtattgtgattgtattacacctcatggatgggaggttgatgtgagcggagcttggattaagtaataacgatctcatagtttaattaaaagttaattagagatttttagaaaatatagtgtaaattattgacataacaataaaagtcaatataatataaagtataggaactaagtaatttatagcatatcgagagtttactagttactataacaaggcataaagccgtaaggtatcccctaagttcgtttgagcttaggggtatcctttttttataagaaaaataaaaaaaggttcgatataaatgtatataatttaatattatgtaaagtattaaaggtaggaggagttatgatgaaggaagatgtaaattatagattagggttagatatagggattacttccgtaggttggtcagtaataaatttggataagaaacgaatagaagatttgggagtaagaatttttaatgcagcagaaaattctaaagatggagcttctttagcattgccaagaaggttagcaagaggcagaagaagattatttagaagaaaatcctatagggttgatagggtaaaaaaattacttatggaagcaaatattttaatcacagataaaaatattttaatcagagaagaacgtgaaaaattttttgctgaattttttaagaaatgcaaaactaaaagtggattagatgtttgggaagcaagagtaaaagcattagatgaaaaagttacaaatgaagaatgggctaaaatattaattaatttatgcaaaaaaagaggatttaaatctaacagaaaaaatgaagctaatgataaggaaacaggacaagttctttcaagtataaagagcaatgaagaaaaaatgaagagtttacaagcgagatcagtaggtgaatatatttataaggaagtaaatttatcgaatgatagttataaaggttttcgtaataaagtaggacagtataatatgtgtgtgtccagagcaatgttaatggatgaaattataacattatttgctaggcaaagggaattaggcgcagattttgcgtctgaagaaattgaaaagaagtatctggagatttttaattctcaaagaccatattcaagatttgaagatttagaaaaaatgataggcttttgtacctttgaaaagaaaaataaaattaaaagagcttctaagaatagtatttcagctgaagaatttgttttatatgaaaatttgaacaagctatcaatagtaaataaaggtgataaaagaaaacttacgagtgaagaaagaaacttagctatctgtgaagcttacaaaaagaatgagattaaatatacaggattaagaaagttattaaatttaaatgatgaagaaagattttctactttatcctacagtaataaggttgagattgcaaaaactgaaaatactaaatttgtatcattaaaaggatatcatgaggttagaaaagcgattgaaacaaatttaggtaaggatagatggttagagattaaggatgataggaatatgcttaatgatatagtatatgtattatctatagctaaaactgatgaggaaatagagaaacaattaaatttgagagaaatttcagaagatataattaaatcagtatcagatttatcatttagtaaatttattaatctttctataacagcaattgagaaaataatgccttatttgaaagaagggtatcaatataatgaagcatgtgataaagctggatatgattttaaagcagtgtatgaaggaacaaaattaatcaaattacccaaaataggtattgatgaaatagttaatcctgttgtaaatagggcattagctcaaacaagaaaagtaataaatgcagttatagatgaatatggttctccaattggaattaatgttgaactggctagggaacttgctaagaattttaaggatagaaagacaatagaaaaagaacaaaaagaaaatagagataatagagaaaaattaagaaatcaacttaaagacttaatggggaaggaaccaactggagctgaaattttaaaatatagattgtggagtcagcagaaggaagaatgtgcatatacacaagaaagaatatctatagaaaaattatttgaaccaggtgaatatgaaattgatcatataattccatttagtagaagttttgacgatagtatgaataataaaggtttggttaaaggtactgaaaatcaaagaaaaggtaatagacttccatatgagtattttggtgaagatgaagaaagatggcataattttgagatatgggttgaagatagtaatcttcatccaaagaaaaaatataatttgcttaaaaagaagttttctaaagaagaacagcgagaatttaaagaaaggaacttgaatgatacaaaatatatttgtagttatatatctaattttattgcaaatagattaatttttaaggaaagtgaatccaaaaagaaagttattactattaatggtagagcaacagcttatttgagagcaaaatggggactaactaaagtaagagaagatggggataaacatcacgctttggatgcgactgtagttgcagttgcaactcaaggcatggttcaagaaatatcaaaatatagtaaggctaaagagttaaattatataagacaaggtgatgattttgttgatattgatacaggagaaattgttgttttagaggattacaggtatttattgaaagacagacttcctaggccatggctaggctttagtgaagaattgataactaggctaagtgatgatcctgcagaggaattaaaaaaatcacctattaaaacttatgatgaagattttataaaaaatacagtaaggcctatctttgtttcaagagttccatataggaaaattggaggaaagctatttaaagaaacaatatactctcccaaagcatttcaaggaaagacatttgtaacaaagagaaatttaacagaactaacacctaaagatattgataacatttataattatcaaacagataaaaaactttatgatgctattaaatgtaaattaattgagcataatggaaatgcgaaaaaagcatttgaagaagaatttagaaagccaactaaagacggaaaattaggtccggtggtaagaagtattaaaattaacgctacagtgccatttaaagatggaatagatttaaatggtggaaaagtggctaaggaaggaattgtaagggttgatatatacgaaaaatgtggaaagtattattcagtgccagtctatagaaatgaaatagctaaagggatcattcccaagaaggcagccttagcagctagtgatgaaagtaattggacagttatggatgaaagttataattttaaattctcagtatataaaaatgatttagttgaaatcatatatgaaaagaaaagggggtactttggatattttgatggttttgatagatctacagcatcatttaccatagaaagtaatgatagttcggaaaggtatagaggtattggaataaaaacaggagtaaaagagattaacaaatatcaagtcgatgtgcttggtagatactataaagtaaaaaaggaggataaaaattaattgagttttaggagtgttgtaatttcaaattcagcaaacttaggattaagtaataatagtttagtaataactaatgaagatgaatataaaataccaatagaggatatatcaactttggttatagaaggtataggtgtaaaattgacaaatagattattgagtaaactagcagaaaataatgttgcaactattatttgcaatgaaaagcatctgccttcttcaatagtattacctttaaacattcatcatagatcatataaggtgattaaggagcaaatgaatcaaagtgctgcttttaataaaagaatatggcaaaatataataaaacaaaagttgtataaccaaggacaatgcttagagatattatcattaaaaggatctcaatatcttaaaaagatatctacagatgtagagagtggagacaaaggtaatagggaagctataggtgctaaatattattttaaatcattatttggggaaaattttaaaagaaataatgataatggaattaatgcagcgttaaactatggatatacaataataaggagtgtaatagcaagaactttagttgcatatggatttaatacagtattaggggtaaaccattgtaatgaacttaattcatataatttagctgatgattttattgaaccatttagaccaatggtagacttatgggtatattcaaacataaaaagtgaagatgaacttacaaaatcaaatagaatgtcacttattgatcttgtaaactatgaatgcataatggataggcaaaatcattcaatcttaaatgcaattgataaaatgatatcttcttatacaacggcttgcgataaaaaagattttagattgctaaaagtgcctacaattaaaagtatggaataccatttttatgagtagaagatttatgagattattagttttgtttgatttaccagttgtaaaaagagaagataggaaagaatatcagcaatttaggagatttttattaaatgatggttatactatgatacaattttcggtttattctagaatatgtaatggaattgatggtgttaacaagcatattatcagattaaaaaagagtttgccacataaaggttcagtaagatttcttcaagtaacagaaaagcaatattcagaaatgaaatttcttgtaggaaagccaaaaatgcaagagaaacgcgtgaatgcaaggcaattaagtattttttagaaagctaaaatcccttgaaacttagtgttttcaagggatttgttaactcgtattatagcatatcgagaatttactaggaactataactnnnnnnnnnnnnnnnnnnnnnnnnnnnnnnnnnnnnnnnnnnnnnnnnnnnnnnnnnnnnnnnnnnnnnnnnnnnnnnnnnnnnnnnnnnnnnnnnnnnnnnnnnnnnnnnnnnnnnnnnnnnnnnnnnnnnnnnnnnnnnnnnnnnnnnnnnnnnnnnnnnnnnnnnnnnnnnnnnnnnnnnnnnnnnnnnnnnnnnnnnnnnnnnnnnnnnnnnnnnnnnnnnnnnnnnnnnnnnnnnnnnnnnnnnnnnnnnnnnnnnnnnnnnnnnnnnnnnnnnnnnnnnnnnnnnnnnnnnnnnnnnnnnnnnnnnnnnnnnnnnnnnnnnnnnnnnnnnnnnnnnnnnnnnnnnnnnnnnnnnnnnnnnnnnnnnnnnnnnnnnnnnnnnnnnnnnnnnnnnnnnnnnnnnnnnnnnnnnnnnnnnnnnnnnnnnnnnnnnnnnnnnnnnnnnnnnnnnnnnnnnnnnnnnnnnnnnnnnnnnnnnnnnnnnnnnnnnnnnnnnnnnnnnnnnnnnnnnnnnnnnnnnnnnnnnnnnnnnnnnnnnnnnnnnnnnnnnnnnnnnnnnnnnnnnnnnnnnnnnnnnnnnnnnnnnnnnnnnnnnnnnnnnnnnnnnnnnnnnnnnnnnnnnnnnnnnnnnnnnnnnnnnnnnnnnnnnnnnnnnnnnnnnnnnnnnnnnnnnnnnnnnnnnnnnnnnnnnnnnnnnnnnnnnnnnnnnnnnnnnnnnnnnnnnnnnnnnnnnnnnnnnnnnnnnnnnnnnnnnnnnnnnnnnnnnnnnnnnnnnnnnnnnnnnnnnnnnnnnnnnnnnnnnnnnnnnnnnnnnnnnnnnnnnnnnnnnnnnnnnnnnnnnnnnnnnnnnnnnnnnnnnnnnnnnnnnnnnnnnnnnnnnnnnnnnnnnnnnnnnnnnnnnnnnnnnnnnnnnnnnnnnnnnnnnnnnnnnnnnnnnnnnnnnnnnnnnnnnnnnnnnnnnnnnnnnnnnnnnnnnnnnnnnnnnnnnnnnnnnnnnnnnnnnnnnnnnnnnnnnnnnnnnnnnnnnnnnnnnnnnnnnnnnnnnnnnnnnnnnnnnnnnnnnnnnnnnnnnnnnnnnnnnnnnnnnnnnnnnnnnnnnnnnnnnnnnnnnnnnnnnnnnnnnnnnnnnnnnnnnnnnnnnnnnnnnnnnnnnnnnnnnnnnnnnnnnnnnnnnnnnnnnnnnnnnnnnnnnnnnnnnnnnnnnnnnnnnnnnnnnnnnnnnnnnnnnnnnnnnnnnnnnnnnnnnnnnnnnnnnnnnnnnnnnnnnnnnnnnnnnnnnnnnnnnnnnnnnnnnnnnnnnnnnnnnnnnnnnnnnnnnnnnnnnnnnnnnaactcaattatagcatattgagaatttactaggaagtataactgactttgagtacgtgaatgatccgtctacattatagtatgtcaaaagtttactaggaactataaagtttagtagtagttagtgcctgttttataattatagcatatcgagaattcactaagaactataacctggtaccttcacccataaattacgctttaattatagcatatcaagaatttactaagaactataacattatatccatattcacacctcttaaaattgttatagcatatcgagaattcactagatgctaatatcactaaattacgatttataatttagttgaatataataataataatttttatttctttataaagatattatttttattcatatgcatcgcgagtacttgattttactttaagtaaaggaaatgtgagcggtaaattttaaaatgccaacatttcgcttatcatcagtaagatatgattaagtattataaaatacaatatgcaaagatatgatatttttaatctaaggttttaagtattttcaattatgaatagacataatagaatacactaagttaaggcttggtagaatgcttcaacacgcgcttcatgctgaaacagttgttaagctaattaagcaataaagcgaaagaagaaaaaagggcgttgaatgtaaatgaaataaatagctttaatgctattagaggagaaataaaatccattgacgaaactttaaagatggaagaagaacaaagaaaacatattgaatgggtactggggaaaaaagagggctatgccacagaagaaaaggaattaagagtatttaaagaaggcaaaaagatcgatattgaagctagaggtaaagacgttaatttaagcattgataaattagtcagagcaatgataagaaacaattacaagtatataaggacggtattaattaatttaaagtaatattcttttatgcgtaaaattgtctattttacacaaaataaataaaaacataataaggtgtgattacgttgaaaaaacttatactattattaatttttgtgttgagtttaacaagcgtattttataaagataactcctttgctatagagacaaaacaatattcaaaagaagaaatctctaaactgcctgaagattcgaaagagaaaagatatcaagatgtaattatttgcttatttattccgtatatgcaaaaggaagtaaataactattatcaagaatatctaactgaaatgccaatagttttcccggatagcgttgatatagtaaatattaaaagagaaagtggatttggatatttaattcaatcagaacttatagttcatccatttgttgggccttacaacactgttggagatgacagaataataattgaaacaggagcctatggatcagttaagattattaaatttgaacatcttaaaagttatgaattgccttggaattggaaacatataataaaaaaagcatattaattcttatatgaaagtaaatttgctatgaatctattgctttgataaagattatattcaattcgtaattcatttctttctctagtaaatttattgcctatataagttattataacaccagtgctagttttactagaatcgagcacatatttaatatttttaccatcataggttatcattctaatttgaggttcaccttcaatggtaaatactataacattaatatgatctggcttgcctagtaagacattattaaaaaaaattaatacaggttcttcataatcaattataccaaatgaatttataattgaacttattgtgtatttaaacataggttctaacataataacctcttttaattttaatcatgattcaatatatattattaatacttttaatgtgcataatccaataaagattattttaatccccacatatttaggtgtatttttttattggggaggttgacactcacagccgctatgtaaacacacaattttccctaaatgaatttttaagaataaattacttataaaatataacatatgtaatatattaaagacactttattgttaagatattataaataggggttaaaatgaaatccaaatagctttaccgtcttcattataaattttttcttttgaataaattatctttccattggttacatcaatatcaacatgtgcaaaattaccttttggtgatattccaaatgcttcgattactaaaaattccttatcgggtatttcataataagaaacataatcaaggttaaaatgatatcctattgcccaatctttattgggaattccaggctttaaatttttgtgctcttttgcaatttttagtacatcagttgaatcaatttttatatcagaatcgttaattccctttttaggggctctatttttatcttccattatcttagctttaccatgtactacaaatatattatattcagcattggatttagtgtctgtaaaagctacattccatacagcacacattctatcagatcctgattcttctgatggcttgactattgcgtcagtactaatgatttttattagctttgcgtctggagataattcatttacttttgcatatgctatagaaattgatttcttcaatgtggttttttcattttgtggtagtgttttagaaattaaatttatactaattattatagatatgactaaaatacatatgaagatcaggggacatatattttttctagctttaaatttaaacaaaatatctcatccaataattcaatatttaataattgttatatatatgtaatctgttgagttttatatgattttttatgcaaaaaattcaagaagggatggaggagcatttggcaagactaagtaaaagtgtggcggttatgagtaagaattgaaattttattttacaggttttttgtatataattgagggtgcagtggtgttgttatactttaggaaatataacaacaaatatttgggattaaaatatgtattataatgaaaattatgtgaccgatcaatttgtccacttgaaagtatcgatataactaatgttaggactatataacaaggtcacaactaattatgtagttttaattgataattactgattttttagaccatcttaatttatataatgtaataaatatttatatgtggtggcaaagcattatcatgtcaataatttgccaccagtttacaagttgtataaaaatatagtttgatttgttataatataaaatagtgtttagtttccctaaaggtagccatttcaaagtgttaatacgatataataagttttagaataatgcactttgataatggtgttattaacacgccttacgctgagactaatagtcaacatgaggagcgcgttgtaatactttggaaattatttgtatttgtataatttataagagttttaatatttaaatattgcggagtagatttagttcggatctaaatgaaatttccctcaactttcccttaagggaaaaacacaataaaatacagtaaattatgatttagtacaagctggcgctaatacagaagaaacttaggtataataatgagatttgatgaaataaaatatgattattatccacctacatttgtatttcatgcagatgtaggtgcagattgagcatcggaattgtcttcggtatataatttttaaaaagatttaagtagtatgggaaaaatgcctttaggggtgtataagatatctgagaaacaattttcagaattatttaatggaaaagtatatcaaggttctgtaaaaaatatcagaaagaatggtgtcaatatttattagatgattttattgatttagacaattcagaagaaaaaaagaaacaatatttagattggtatggaaaagtgtttgttgattgctagtatctaataaagaatatgatttctaaataaatacatctatttgataacaaaatcttagaagaagtgttaaattaataataaaagtatttatttaaaattagcatttagatttataataattgtttacaatacattagagtatacccaatattaaatccaaggtcaaaaaatgccttgaattttttagatggttgtatttgcacaataacaagaaatattattaaggattttctttagaaggtttttcttttttacaatagcagtagagtagcacatatttttcaaataagcataatctcgaactgtgtaatttctaaagaatacaaaatttataagttctagttcttctgtatttaaatccttaagatccaacgttaaatcttcataatcacacatttcacataacgatgtttcagtggagaattcaagtgaaaaatagtatttttcaacatcatcatgtaagcttagaacatcattaccttcagtagatcttttggttttaactctcttgattagatcattcatattatttttagtagcataggcaacgaatctgtgcttctctaaattatacgtagaagcagatttaaaaagtgattggtaatattcttggctaatatcataagcggtatacccatcaatgaaagttcttttaaaaatattataaattaatagtataaattccatagctaatccagcattgtcaactaaagtttcaatataattaaaatccatataaacctccctcttcaactaagagttatgaattaaataattaatttgcatatattgtgtttattattaagtttaccactacatatagtatatatggctagattacatataacttatataggagtataaaaataattatataagttaagattttaggagtaaattgtcaaaaggagcttcagaagtttatgaataatctcaatgtaaaaatgctttatattgtattaatttttgcattatattctaaaatttgatactttatatcaaatacaataaactgtattatatttcaaatttgcagatcttttgtttcaggaatataaacattatgtttttgtaatgcaagcatatatgtaaatgaaatgatttatgatgtataaatgtactttctttgcctgtccataaaactatactagcaccataggtcgacttctctacaataggtattttcatatttttaaataattttttaaatatatctataagaaatttttataaatatgtatttttcaagttatactttaaaaaaaataaagggagaatgaagaatatgatttatggtaaagaattttataagtatatgaataaaatgattaagtggaaatttggaatattatatagagtaattcgaaataagtatgtttttaataatcatttaaatatatttgaaaaattaggtgagtatagagataaggctagaaaagaaaatgaaatgttagaattacattttaataaactaaattttaattatgggactatgtgtatggctgaaggtgtagaggggggtgacgaaataatactttgcactgattattatgatgatacagaatatgaagtgattacaatacttcttaaggataataaaacatataaaattaaaaaatgcaatataaaaggttactttttagaactaattgaaaaataatatttatttatggagtaatagattgttaaataactaatttttacaaataatttttcaagaaaatactcttaggaattatagattaaaaggatattttcctgattttattatgtgctttagagttaaaggaaagctacctgaatgagatcatgacttcatattcaagttaccaaagaagtggactacgattagataaagtaaagttattaaagatgatttcgagaaagaagaaattcagtgaaaattttagtaagttatttgtaaaagaagaagtattgaaagataatttatgattatttttcaatacttctttaagttatttttttatataggtcactaacagatatagaaagtgcattacagatactcaaaatttcataatcatataatattctagtttgattttcgatttttgaaatcattgttctatcaaatttaagtccattagttgacaatctagcagccaagaagtcttgggaaatacctagcttacatctataaaaccgtatagatggacctaaaatattttttgtttctataataatcctcctttagctatttttttagtactatgtattaattttagtaaataggaaataataaagtgtgctcattcagcacactttgcaatattataaaattaatttggaggtcatatatgaatgtttttattccaaaagtaaaagaggcatcaatatttaaagaaattgcacataatattattaatccgttagaaataataagagaggctataagtaattcatttgacgcagaagcactgaatatacacataaatatttgtagaaataataatggagattttttaataataattaaagatgatggaaaaggcatggatattgatgcgattcataaattctttaatttaggagattcaaataagaataacttaggaataggtgaaaaggggttgggaacaaaaacatattataagagtgatttaataacagtgtttactaggataaagaacaaaaaggtttataaagcagaaatggcaaatccgtggcaaaagctaaatgattgtataatacctcaatacactattgaggaatataatgaaaaatttgaatttaaaagtggaactatggtcataatgaaaaattataagatagataatcccgaaaagtattttaattgtgaaacaattaaagattacattcaatggtttacagcagctggaagttttaaaaatatattcgctagtatcccaagtctttataaaaatattaaaaatatgcaaatagctcccaaagtatttataaatgattgtatcttaaatcaaaatgaagaaataataggcgtacatatatttgctcaaccacaagaattacctgatgaagacataaatcaaaaaatatataggagaacagtaaattattgtaggcattttggaccatttcatttagaaaccaatataaatggggaatatgtatcagttgaggtatatggggaaatagcaggtataaatcgtagaaaggaaatttctaaattaaaaaaaggtgaaacttataaaggaagatttggattatatttagcgaaagattttataccatttttaagaagagttgatttgctaaatgatgaacaatattatcattatcatattttggttaattcacaatgttttgaattaactgcagacagaaataatttagcaaatgaaaatgatccaaaagttaaatgggtattggaaaaaacaaaggagattataaatacaaaaataaaacctatagcacaagaatattattttaatttaagaaagaaagaggaagaagaatatgca

SEQ ID NO: 916 - DNA, 23213 bp, synthetic construct
  source 1..23213: mol_type = other DNA
  misc_feature 1..23213: note = Synthetic
ttattataaattgtgctataataattactgtaaaagtggaccatggaggtgatgaaacttatggaatataaatccactattaagtccagaccttatttatataaagaaactaaaaaggctgcaaatcttataatacaaggcttagaggtaggagatataaaaagtaaatctttagaagaaaatatcttccaacttgaaagtgaagctagaaaaaaagaaattgcatcaattattgttgcaagacttaaagatttagatgagtttataataaataggatatcaagaggaaatgtagagacctcaaaaatacttgttttatatgcaattataaaaactgacagattattttttgagtttatgaatgaagtttataaagaaaagttattattaagagatttgtttttaaaggataaagacttcaatacattttttcaaagtaaaagagagcaaagtggaaaagtagcctcttggacagaatatacatttaaaaaattaaaacaagtttatataagaattctttttgaatgtggacttattgaaaatcaaaaaggtgatagaaaaataaagattcctattttagaaagtgacgttaaagatcatctatataaaataggagataaaatatatataaatgctataataggagataaggagtagtgtatagtggggagtatttttctgataaatcaaaaaaagttttgctgtaggcaaaacatcatttactaatcactatccactaaaaataggaggatgtatgaaggatatatatcaaagaattgatgaaatattacctaagataatagatcctagctttaggcaaaacagggggctaggtaatgaaattggcttctatgtttttgattatgagccagagtatgaacttttagttagagatagagttagatttataaaagaaaaggttaaaagtgcatataatttaaacatcgtagaatttgacctttatgagattatattagagattttagattcaaagggataccttgaaaaaaattttcaaattgaagaaaaaaaaggcagtgaatacgtactaaatgcaactaaaaaaactttaagattaacattagataatgatttaatagttaagtatatagaggatagattagaaggatgcgatatagtatttttaactggggtaggaaaagcatggcccataattagatcccatactattctaaataatttacacagaattgtagaaaaccaaccattagttatgttctttccaggaaattatgatggtggaacacttatgttatttaacattttaaaggatgataattactatagagcatttccattagtagatagatactaattagtggatagtaaatatttaaaattatagggggaaggtcatatggaatttaagttgaaagaaatgtttcaaaaggaaatagatagagatataaaaggtgttataaaagtagggcaggcagatgatgaaaatataaagcaagagttagatgaatacgttgtaaccagtgaattaaataaacatatagatactttttttaaagcatataaaacaagtattataggaaatacagataaaaatggagtttggatttcgggtttctttggtagtggtaaatctcactttttaaagatactatcttatcttttagaaaatagagaaatagaaggaaaaaaagctatcaattattttgatgataaggatttagatagtgttactttagataatatgaaacaggcaggagaagtatcaacagatgttattctttttaatatagattcaaagtcagactctgattctaaatctaataaggatgccatagttaatgtgtttaataaggtatttaatgaaatgcaggatttctgtggttccatgccatggatagcagatttagaaagacaaatggttaaagatggagtatatgaaaactttaaagaagtttttaaagaaatatcaggtaattcatgggtggaggcaagggaagatttttactatgaagaagattcaattatagaagccttatcaaaaaccactaagatgagtgaggaagcagcaagaaattggtacactagatgcgaagaaaattactcattaagtatagataaatttacagaaaaggttaaagaatatagtgattttaaaggaaaaaaccatcatgtggtatttttagtagatgaaataggtcagtacataggagataatacacaacttatgttaaatcttcaaacagttgtagaagatttaggaactaaatgtggtggtaaatgttttgttatagttacttcacaagaaggcttagatgaatttacaaaagttaaaggaaatgatttctcaaaaatacaaggtagatttaacaccagattatccctatcctctgccaatgttgatgaagtaattaagaaacgtatacttagaaaaaatgataatgcaacaagtcacttaaaagcattatatgaacaaaaggaatctataataaagaaccttttaactttcacatcagatactgctgaaatgaaactatataaaaatggagaagaatttgcagaagtttacccatttataccttaccaatttaacttacttcaagcagcttttaatggagttagagagcatggagcctctggtaagagcttgtctaagggtgaaagaagtttactaggtgcatatcaacaagtagctatagactatatgcatgagaacactaatatattaataccattttcagctttttataaaactattgaaactttcttagattcatctataagaacagttattattcatgcagaaaagaattgtaatttaaatgagtttgacgttgaagttttaaagctattattcttagttaaatatgtaaaagaaataaaagctaatatagaaaatatttcaacattactaataaataaaatagatgcagataaattagaagtaaagaaaaatgttcaagaatctttaaatagattaataagggaaacattagttcaaaagaatggtgatgagtacgtatttctaactaatgatgagcaagatgtaaataaagagattaagaatatttcaatagatcctggagaaattacattaaaggtttctgaaataatatttgatgatatatatgaggacactaaattttcatattcaagaaagtatcaatttacatttaacaaaattgtagatgatagaacaagaggacctcaaaccaatgaaataggagttaagataataactgcaaactttgacttggtaggtggttcaagcgaaagcgaactaaaattattatccaccagggaagataatgtaattatagatatatcaaaggatattaactatttagaagaaatagaaaatgtactaaaaatagatgcttacctaagggttaagggtggagcaaaatctagtcctgctatagaagatattaaagtaaagaaaagtagagaaagagaagatagattaaagagagcaaaatttttaatagaagaggctttaagaactgggacagtttatgtaaatggtagccttttagatataaaagaaaaagatggagtaaataaaataaatgaagggctaaaagtcttaatagattctaaatataataaaataaactatgtaaaagagtttaaggaaaatgtaaaagagctttatgacataatggatgctaaatccaaacagatggaattagttgataaaaatccaaatagactggcaataaacgaagttaacacccatatacaaactagttcgtcaagaaatcttcaagttacagttaaaagcatagtaattaaattttctaatgctccttatggatggaaggatattgatatacaagctataatagtatctctatttaaaaagcaagaaattaaggttatattaaatggggaagtgttaagtcctaataatagagaaattgtaaactatgtaactaaaagagagtatcttgaaagagttatattaaagactagggaaaaagtaaatcaaaaatatatagatgtagttaaagacttaaatcaggatttatttggtttttcatcattaccaatagatgaagatggaataatgggtatatttaaagaagaatgtaaaaaggaactttcaaaaataaatgaaatacttgttaactttacatttaaaatatcttatccaggggaaactattttaaaacatggaaagaaattatttacacagatcatagaaattgtagatacaatggatttctttaaagaagtatatgatttagaagatgattttttagattatgcagataatattgatgaaataaaggcatttttctataaaaaagagaacggaagaatagatttttcatctaaaggtgagcaaagagttatatttgataatgcaatagataccacacaaaactatgaagaaaacaaagagtatataataaatgatgatataaagaaaattatagaagaaataaaagaaataataagaatgcctaaaccttattctaagatacccaaaatacctctattaattgaaaaatacaataataaaattactgatttattagaagaagaaagtattcctgtaaaaggctttatagaaatgtgtagaaatgaagtttttgaaactttaggtagttttgactttaaggataaatttgaaaataagataattgaagaatttaataatctttataatagagtagagggtgcaagtagttttgctgtactttcatccatgtcagatcttgcagaaaaagttaagctaaagtggatcaaagaaatagtaacagaaagtgaaactcaaaaaagaataaagacgagagaaatagaaaatgtaaatagagttgcaaaaagtgaaactaaaattgctacatcacaaaacaaagcagaaccatcaccagaagtagttattaaaactaaaactttaagtatgagagaattagttaaaggacaaaaaactataaagaataatgatgatatagatgaagttatagaagcacttcgattaaaattaaaagaagaactagaaaaagatacaataataaatttagtttagtgaatagtgaggagttaataaatggaggataaaggttatgaatgaattaaaggctagtaaaaaatttaaatcttttatctatttaaataaagatttaagtgatgaggaattagttgcctatataaaccaatataaagaaaatataatgaaatatgacttcaaattctacgagttattttcatcaaacaatatagagggaaataaaatgactattgcggagactaaagttgttttagaaaaaggaactgtagaggcacgggttaaagatgtagtagaagcgttaaatttagaaaaagcaatgaagaaatataaaagattagaaaaactttcactagaagttattttagacattcataaaattattactaacttagttgttgaagaagaaaactggtctgggaacttacgtgatggcaatgtatcaataactaattcactgcatcaaccacctaagtttgaagaagttcagatacttttggaaaatgctattaaaaaatttaatgattctgataaaacaataaaggatatatatagattcaaattagaatttgtagagattcatcctttttatgatggtaatggaagaacctcaagaataattcaaaatacattattagaaagcatagatatgccacgattaattataagaccacaagataaacaatactattataaagccttagaagatgcaactgtgtatggggatagaaaaggatggataaggttttcattaaactatacattatttatgtgtataaatggactagaatttataaaggaaattagatagttgtataatacttttaaatatataacatcaaaaggagcttagatatggataagaataaaataaaagtttttgctgtatgggctagaagaaaacttataagtgcagttagtgaaagagcaaatagaattggtgttactgaaaataaaatacaggatgcaatagctgttcaaggtggatttaagttagaaggtaatgatgaaatatttaaactttctaaaaatgatagagaggctttggtaagccaaataagagaaaaaggctttgaacaagttatggaagaagtagcctatacttggttcaatagatttatggcacttagatatatggaagtaaatgagtatcttcctagtggtataagagttctttcatcagaagttgaaggaaaagtagagccagatgtattaactagagtatcagaggtaatagatgaattatacttaaattcagaatatatatataatcttttagacagcggaaaaacagaggatagagaagaagcgtataagaatattttagtaagacaatgtaatgaattaggtaaaataatacctgaaatgtttgaaaaaataagcgactatacagagttgctactaccagataacctcttagaggaaggttctgtaataagaaaaatggtagaggatatagaagaagaggactggaaggaagaagtagaaataataggatggatgtatcaatactatatatcagaaaagaaggatgaagtatttgcagccttaaagaagaatgtaaaaataacaaaagaaaatataccagcggcaactcaattatttactccaaagtggatagtcaaatatatggtagaaaactcactaggtagactatggcttgaaggacatcccaatgaaaaacttcaaaaacagtggaaatactacttagaagaagcagagcaagagccagaagtagaagaagaattaaagaaaataagagaagaacacagtaaactaaaaccagaagatataaaagtattagatccatgcatgggatcagggcatattttagtttacgcctttgatgttttatacgaaatctacaaaacagcagggtattcagaaagagaaataccaagacttatattacaaaacaacctatatggtttagatatagatgatagagcagcacaactagcatcctttgctttaataatgaaagcaaaacattataatagaagattgtttagggagatagaaagagagcatttagagttgaatttatgttcaatacaagaaagcaatggaatacctaaagatgcaattgattattttgtaggtgaaaatgaagaattaagaagtgatgttgagtatttagttgaaacttttactgatgctaaagaatatggttctatactggaagttgaagaagtagattttgatggaataaaaacaagattaattgaaatacttgatttaaatgataatatatcagtagataataatggaattccagtacaaattgatactttttcttatcaatataaaaatataatattagataaacttcctataataataaaacaggctgagataatgagtaggaagtatgaggtttgtgtgactaatccaccttatatgggacttagaggaatgaataaaaaattagcagattttttagtttgtaattttccagtatcaaaatatgatcttttttcagtttatatggaagtatgttttaaatataataaacaattggggtttatgtctttaattaatcagcattcttggatgtttttgtctagttttatggaaataagggtaaatttacttagcaaattaacatttataaatatgatacatttaggagcaagagcatttgaagaaaatgttgggactatagttcaaaatgtagcatttataaatagaaaaaaatgtgattatttatataaaactaaagttataaaccttacaaaagaaaatagtagtgattataaaaatattagattaaaggagatatcagaagatgtttcaagtaactcaaaagaaatatatataagagtattaaaagagttgtttataattcctggaaaaccttttgcctattgggttaatgataatatactaaatatattttcatcatttcagtatttgaacaaattagcgaaacctagacaaggtatggcaacttcggataataatagatttttaagagaatggtttgaggtgaagattgacaaagttaaatttaatgcatccaattatgaagaggtgataaacgaagaaaagaagtgggttccatataacaaaggtgggggatatagaaagtggtatggcaataatgaatttgtaattaattgggaagataatgggaaagaagtaaaacaatatgctgctaaattatataaatcatacagtagaacgataaaaaatgaagaattttattttaagaaaggattaacatatacatttatatcagaagatatgggggcaaggtattttggaaatggatttatattcgatgttgcaggatcctcaatatttttagaaaacaaagaagaaattaatatagtattatcattattatgtagtaaaatatgtaaaatgtttttagatataatgaatcctacgtataatattcaagttggagatataaaaaatattccaataagtaataaagtgtttgatgatttggtaaattcaaaaataaaatctttaactaatagaaatatagaaattagtagagaagactgggactcttttgaaacatcatgggattttaaaattcacccacttttgttagtggacagtggaaattatatggtggattataatggagataaaaatactacccactatccgatacctattgtccactctatatccgatacctttgatgcctggaaagcatttactgataaacaatttaatgagctaaaggctaatgaagaagagttaaatagaattttcattgatatttatggtctacaagatgagttaactccagaggttgaggataaggacattacaattagaaaagcagatagagaaagagatataaaatcatttatttcttatgctgttggttgtatgttaggaagatattctatagatgcagaaggtcttatttatgctggtggagactttaaggataagtgggatttagaagataagaaggttaggaagatagagaaagatgatgatggtaatgttatatcagattcatgggttgatgctactttcatacctgattctgataatattattcccataacagaagacgaatattttgaagacgatatagtttcacgatttattgaatttgtgagaactgtttatggtgaagaaactttagaggagaacttggatttcattgcagattctattagtagaaaagcatcagaaacttctagacaggccattagaagatactttattaaagatttttataaagatcatttaaaagtatatcaaaagagacctatctactggatgtttgattcaggtaaaaataatggatttaaggctttaatttatatgcatagatacaatgaacaaactgttgcaaaggttagaacggattatcttcacactcttcaaagaaagtatgaagcagagatacaaaggcaacaattaatagtagattcagaggagtattctgcaaaagatagaacagcagctaaaaagaaaatagcaaaaatagcaaagcagatagaagagtgtagagaatatgaccaagtagtggctcacttagccaatgaaaaaatatctattgacttagatgatggagttaaggttaactatgctaaattccaaggagttaaggtaattaactctaaagagaaggaagttaagatggatttactagcaaagatatagtagaagatagtaaatctatagtgttttaggttacttaaaggaatattatttaaaaggtgaaattttgaactattaatttagaaattttggcagaatgtattaaaatttgcaaccataattgtaaaaaataaataataaaataacatattgacatatactgactatttagttataattagattaggaactaggtaaatatttatagcatatggagagtttaactagttactataacaaggcgtaaagccgtaaagtatcccctatgttcatatgagcataggggtatctttttatatcctaatattgcacaagtttgtatttaacataatttattttataaatatatttcacaaggtgggggtttttatgaaaaatgaaattaactatgccttaggacttgatattggtattacatctgttggatggtctgttattaatttagatgtaaatagaattgaggatttaggagttagaatttttaatgctgctgaaaatcccaaagatggagcatcattagcattgccaagaagaatggctagaggaagaagacgtttacttagaagaaaagcatatagagtaaatcgtgtaagaaatcttatattagaaagaggaattttaagtaaggatgagttgaacaatctttttacaaataaagatattataagtgtatgggaagcaagaataaaaggtttagatcaaaaattatcaggagaagagtggtcaaaaatattaattaacctatgtaaaagaaggggttttaagtctaacagaaaaaatgaaacaaaggagaaagaagcaggtcaaattataactagtattaataataatcttgaaaaaatgaaagaggtaaaggcaaggactgttggagaatttatttataatgaggttataaattctgaggatcaatataaagccttgcgtaataaagctggagaatatagtagatgtgtttctagagatatgattagagaagaaattcatatactatttgaaaagcaaagggagcttggaaatgaatttgctacaaatgaaacagaagatgagtatttaaatatatttaattctcagagaccttatgcaatttttgaggatttagaaaaattggtaggattttgtacctttgaaaagaaaaaatataaaagagctcctaagaactgcatttcagcagaggaatttgtattatatgaaggcttaaataaactttcaattattaatagtggagataaaagaaaattaacccaagaagaaagaaatttaattatagaggaagcttttaaaaagaaagaaataaaatatactcatttaagaaaaatattaaacttaaatgaagaagactgtttttcaactttaacatatagtattgataaagataaatctaaaactgaaaatacaaaatttgtttcattaaaaggatatcatgaaataagaaagtccatagagcatggagttagtaaagagtattggcaacaaattaaaaacaatagaaagatgttaaatgatatagcttatgttctaactcttggaaaaacagatgaggatattactaaacaattaaaacttagaaacatttcagatgaaaaagttatacaatcacttttagatatttcctttagtaaattcaataatttatctatacaggcacttgaaagaatactgccttttatgaaaaaaggatatcaatataatgaagcctgtgaaagagcgggatatgattttaaagctatatataaaggttctaaatctaaaaagctaccagtaattgaaatagatgaaatagtaaatccagtagttaacagagccttagctcaaacaagaaaagttataaattcagttattgaaaaatatggttctccaataagaataaatattgaacttgctagagatttagctaaaaattataaagatagaaaggctattgaaaaagaacaaaaagaaaacagggctaatatagataaaattagggaagaacttaaaagcttaatgggaaaagaaccaacaggaagtgaagtattaaaatatagattatgggaacaacaaagaggagaatgtgcatacacccaaaaatctatatacatagaagatttatttaatcctggctattgtgaaatagatcatataataccatttagtagatcttttgataatagtttatctaataaagtattagtattaggatttgaaaatcaaagaaaaggtaatagaacaccttatgagtattttggagaagatgaatataggtggaataagtttgaagtgtgggttaatggaagttatttaaattataagaaaaaatttaatttgttaaagaaaaagttttctaaagaagaacaggatgattggaaggctagaaatttacaagatactaaatacatatgtaggtatatagctaattacattaataatagattggaatttaaggaaagcaattcaaaacaaaaggtgattactgttaatggaagggctacggcatatttaagagcaaaatggggactaactaagattagagaagatggggataaacaccatgctctagatgcaactgtagtggcagttactacacaaggaatggtacaacaaatatcaaaatatagtaaagctaaggaattaagctatattagaaataatgatgaatttgtggatatagaaacaggagaagtagtaaaattagaagagcatagagagattttaaaagatagacttccaagaccatggagaggttttagtgaagaacttaaaatgagattaagtgaaaatcccctttatgaacttgaaaaatctccaattaataattataacttagaattcatacaaaatacagtaaaaccaattttagtttcgagagttccttttagaaaaattggagggaaattgtttaaagaaacaatatattctaaaaaggattttaaagagggatactttattgagaaaaagaacttaactgaattaaataagaatgatttagataatatttataattataattgtgataaaaatctttatgatgccataataagtagaatggaacagtttgattataatgcaaagaaagcctttgaaggtgaatttagaaaaccaactaaaagcggaaaagaaggtcctattgtaagaagtattaaaataaaaacaaaggtaccttttaaagatggaatagaattggagaatgttaaaggtttagttgctaaagaaggtatggtaaggatagatatttacgaaaaagaagataaatattttgcagtacctgtatatagataccaattagctaaaagaataattcctaaaaaagcagctttagctaaaaagccagaaaaagaatggccaataatggatgaaagttataaatttaaattttctatttacaaaaatgatttgatagaaataagatacaaaacgaagggtggatattttggttattatgatgggtttgatataaattcagctggattaactattaaaaagcatgataattctgagagatataggggaataggaattaaatcgggagttttagaatttaataaatatgaagtagatgtattaggaggtaaacctcataaagttaaggtaggtggtaataattgagttttagaagtataataatttcaaatccagctatccttaatcttaaaaataataatttaataattggtaacgaagaagaatttcaaattccaatagaggatatatctgttttagttatagaaggtgtatctgttagattaaccaataaacttttaagtaaattagcagaaaataatgttgcaactattatttgtgatgaaaaacatttaccatcatctatagttttacctttaaatgtacactataaatcctacagggttttaaaacaacaatttaatcaaagtgcagcttttagcaaaagaatatggcaaagcataataaaacaaaagctatttaaccagggaaaatgtttagaaattttatcaatagatggagcagaatttttaaataaattatctacttctgttgaaagtggagataagggaaatagagaagcagtaggtgcaaagtattattttaaatctttatttggagaagaatttacaagagatgatgacagtggatttaatgcagctttaaattatggatatgcaattatgagaagtgctgtagcaagagcactcgttatgtatggttttaatactacattaggtgtaaaccattgtaatgaattaaattcttttaaccttgcagatgattttatggagccatttagacctatagtagatttatgggtttataataatataaattgtgatgatgtattaacaaaagaacatagaatagcattagttgatttaattaataaccaatgtattattgataaacaaaatcattctattttaaatgccatagataaaatggtagcttcttatacaacggcttgtagtaaaaaagattttagattattaaaattaccactaataaaaccattggaataccattattatgagtaggagatttatgagactaattgtattttttgatttgcctgttgtaaaaagagaagatagaaaagagtaccagaattttagaagatttttattaaatgatggatatataatgattcaatactctgtatattctagaatttgtaatggaatagatggtgcaaataagcatgttgcaaggcttaagaagaatctacctcctaaaggatctgttaggtatttgcaaattacagaaaaacaatattgtgaaatgaagtttttagtaggttcgccaaaaccacaagaaaagaatataaattccagtcaattaaatgttttttaaaaagaccaaagcccttgaaacttagcagattcaagggctttggtagttcctattatagcatatggagaatttactaggaactataacgctcctaatgcataaagtctcatttgtttaattatagcatatggagaatttactaggaactataacagtacaagctgtaatagatatactagatagattatagcatatggagaatttactaggaactataactaaatagtagtaggagcatcaccaactcctattatagcatatggagaatttactaggaactataaccaataataaaaaataaaatcaataaaaaaaattatagcatatggagaatttactaggaactataactgtatagatttctatatcgtcaatattaatattatagcatatggagaatttactaggaactataactaatacgtattaataattaatatactttaaattatagcatatggagaatttactaggaactataacaattcctacattcacatcatctttaacagtattatagcatatggagaatttactaggaactataactaaattaaataattaatcttatttatcaatattatagcatatggagaatttactaggaactataactgtttctgagttgtgagcaatattcacttcattatagcatatggagaatttactaggaactataactaatcctaaccatacataaccttcacaagtattatagcatatggagaatttactaggaactataactttttttattaaaattcttaaaatagattattatagcatatggagaatttactaggaactataacaccatttttaatttggtcttgagatattctattatagcatatggagaatttactaggaactataaccatttccctaatgtctactatagtttgtccattatagcatatggagaatttactaggaactataactaaatataattctgaataatatccagttctattatagcatatggagaatttactaggaactataacctcttagcagctgtatatatttcctgtgctattatagcatatggagaatttaatcaaattattatagaaaaagtgtttgtttttgttataataatttacatggaattaaaataaattagaaggaatgcaaattatttattttgataggagaaatagaaatgaatttacaagaaataagaaattttataaacgaactatttttaaaaccattaaccaatggaaagaaacgtcatatagtattttggtatgatagtaatgaagatttttctaaagatatagatgaacttaatatagaaaatattaaaattattaaattaacaaataacaatgccttttggagtaaatatcatatagaaaaaggagatacaaccagtaatatacttgtgtattctaacatgaaaaaaccaataccttcaaaagattggctttacgatgttttttgttatagtgaggaattctctactgacagagcaactgtaattatgagagaattaaaggttaaagatccactccttatggaagaatttaaactttataatactttctttaaaaataaggaaagaatagcagcttttaagaatttaaatatacaaaattacacaaaggaaaaagttcatataggtgttcttgcagttttaactaaagtaaaacttatggattttgaggaaatattaaagactatattaaaggaatatttagatggaagtagcaaagtatataatgatataaataaatttggtaacttaggttccttatggaacttagtagctaaatattatggctatgaacttgaagaaaagagtatagaaagattaatggctatgtttttagtaacaaatatgaatgaaacaattaagtttcagttgccaaagcaatatgaaatttttatatcccaaaagttaactaattgtatagtatttataaatcattttatgaatagtattaaagatggaaaatattacgataagatgcaacaactaattggagaaaaattaaagataaataatttattgaaaaataaagactcagatacatttattagttgtgatatttttgaagaggtagataaattaatcattagtagaattacatcacttttaaaggatgaagtagaagaatacagtaaatatttaagtcttattgataaaagaagaactactcatttttataaaaaatatgaaaatgaatataaaggagtaagatgggctataaatctactaaaaaagaagagagagctagattcaattataaaaacagaatcatcctataatatgtttaaatcttatactaaagattattattacatagataaagcctatagaaagttttattattattatgatagctccatagaaaaagataaattaaatgatttaagagaaaaaatagaaaatatatataataattggtatctacaggaactttctattaaatggtttagctcattagaaaaaagaatttcttggagaatagatggattaaagcatcaagataacttttatgaggaatttattaaacttgaaaaggaaagagtttttgtaataatatctgatggtttaagatatgaaagtgcagaagaacttgcaagtaagcttactaatgaacgaaaaggcaaggtagagatagaatcaatacaaggggtattgccttcttatacaaaactaggtatggcatccttactgcctaataccaatatagagattaatgctaaatatgatgtagtagtaaatgggattagtacaaatggaacggagaatagaaatactatactaaagatggaaaatcccaattcactagcaattacctataataaagttatggatatgaaggaagctgaaataagaaaggcatttataggacttgatgtagtttatatttatcataatactatagatgctagaggagataatgcatctacagaaagagaagtatttttagcaacagaacttgcatttaatgaaatcattgctttagtaaataaattagtaaatagagtaagtgcagcaaacatagttattacggcagatcatggatatctttacaaaagaaattccatggaggaaagtgataagatatcaaaaattgatttagatgatagtgaaaatagcagaagatttatactaacatctagtattaatgaattagaaggtactgtagcatttagtatggattacttattaggcaaaggttctaataaaaatgttattacaccaagaggggtttccagattcaaagtgcaaggtttaggtgcaaactatgttcatggtggagcaatgccacaggaaatagtagtaccagtaattaaatttaaaaatgatagaagtgcttcatcagttaatgatataagaaaggctaatatattgctaacaagtataacaagaaaaataactaatataataacttatcttgagttcttccaagaagaaaaaattcaagataaagttatagcccaaagaattaaatgttactttgaagatgaaaaaggaaatagaatatctaatgaaaatattataattggagattctagatcagaaaatccattagaaagaacttatagagaaaagtttgttttaaaaagtatggcttatgataagacaaaacaatatttcttagtaatgcaagatgatgaagattcaaatgaggtatatgagagaataccttatactattgatatcgctataattaatgaattaaaaatttaataacaatgtgtaggcactatagcagtgcttacacattgtttttgtataattagataggaaaatattatactaatataataggcatcattaaataaattccatctaggaggacagttcatgaaaaagagaacaatggaaagaaactttagaaagataaaacatcaaatagatcaaatggagaacatagtaaagcataccaaaaacaatgctctatgggatcatgaagcagcggttagaaaaaaattaaaggcattaggcgaatataaaaatgaaaattttagagattttaatagagtttatgaaagatatttagatcttttagaggatatatccataaggattataaataattataataaaaataataatacagattttaaatttcacgaagtagtaaaagataattatgaagcttatttaaaatctggaattatgactgtattaataacaagtcatattccaaaaatgatatataaaaaatttgatacagtatttcctaaaaacccaaaagatgaatatgaagaagctagaaaacttactaggaaattttatattcacttaggagaaaccaatacaggaaaaacctataatgctatgcaaaaattaaaggagtcaaaacatggaatatatctatcacctttaagaatactagcattagaaaattttgaaagattaaataatgaaggtataaaatgtaatctattaacaggcgaggaagaaataaaagtagaaaatgctacacatacatcttgcaccatagaaaaattagatattaataaagtttatgatgtggcaataatagatgaaattcaaatgatagatgatgatgaaaggggagcagcttggacaagggcatttttaggtttaaattgtgaggaaatacatatatgtggagcaataaattcaaaagatatcataacagaaatagtagaagattgccaggatgaatatgaatttaaagaatataaaagggatataccgctagaagtagaatatgagcctttttcctatagaaatattcaagaaggtgatgctttagtggtattttctaaaaaaagagtacttcaattagctaagaattatgctgatatggggataaaatccagtttaatatatggagatttaccaccagaagttagaaaaaaacaatataaacaatttataaataaagaatcttcaattttgataaccaccgatgctataggcatgggagttaacttgcccataagaagaataatatttatggatgttaaaaaatttgatggaagtgaaataaggtatttaaactcccaagaagttaaacaaatagcaggaagagcaggtagaaagggaatatatgagattggatatgtttcatcctatggtaacactcaaaactttataaaagaaatgatagatattgaagatagaacaatagaagaagcggtagtaggaccaacagaagctatattaaaaataaaaggattaccccttagggaaaaattagctatttggagtacccaaaaagaaaaaattcctcattacagaaaaatggatattagtgaatatttaatagttttagatagtataaaattttataaattagatgaaagtatacaatggcaacttttaaaaattccttttgatgttggaaattcagatttaatgcgtgcatttttaaattatatggatgagatttttatagctaagagaaaggaattgtcaaaacctaaatatccttttaaaaccctttatgaactagaaacttattatcaaaagataaacctttactattcttcatcaaaggctcttaaattaccctttgatgaagaatgggtttatgaggaaagattaaaggtaagtgaagatataaataatatattactaaggatttaaaaatatatagcttaatgaatttatatgcacatattaaaggcttttgcatataatatttctgaagtaattataaaggattttgatatgaaatataaaataaatttaataagctttataaaaaagtatttaccaccaggagcggaaattataatgttagaagaacctcataaaaaaccagcaatatgcatagctgatttagatggagatggaataccagaaataattgtaggatataaatggcaaggagaaatttatattactatactaaaaagatataaaaatctatggtatgtagtagcaaacataaaaggtagaggctatggtataaattacttaggggttgcaagaattacagaaaaaaatataaatagcctaattgtgggatggcaagttggagctatttgggctcaattagatataattcagtacactccacagggttataaacacttacttaaagaagaggtttattacagtaaaattgaagtagaagatatgaaaggatgtagcggctatgatggtatatgtgaaatagcgctatggatccatgatacaggtaatgcttataaagttgaagtatatagatttgaaaatggagagttaattcctgctaaagatgtatatccctattattttcctagggtagtggctttttataaagaaagagtaaaagaaattcccgatgcagccttttattggtactatcttgcagatgctcaatttaaatcatgtatgtataaagatgccttaatttcgattaataaggctataaatttaaatcttgagtatccacctagagatgttttaattaaattaaaaaaagacatattaaataaactaaaatgtagagaggcagctattaatttatatccagcctccataaaaactgcaaagggagttttatggggatatataaataatagaggagaattaattattaaacctcaatatggtcaagcttttgatttccaaaataatggtcttgctatagttgagttaaataacctttatggtattataaatcaatctggaaaatatgtggtggaacctaaatatgaatctatttcagaattctcagaaggacgtgctacagtaatagactctagaggctttaaggtaatagatgaaaaagggcgtgaagtcacttcgaaagcttatgattatataggaacctataaagatggaagggctgtatttggtaattcgggtgataatggagcatatttttatgggtatctagataaagaaggaagggagataatacctgctagataccagtctgctagtgactttaaagatggaaaagctatagttaaagttaaggaaaatgaatttagacttatagatagaaatggacaaacattaaatacctataaatataatttagttggaaattttggcgagggtcttctagcttttcaagaaaagccggatagcaaatttggatatattgacgaatcaggaaatattgttataaaatctaattttacacaagctagagcttttagtgggggaagagctatagtaaatacttccgaagactatggaaataaatatggacttatagatacaaagggaaagttcgtaattgaagcaaaatataatgatataaataaattaggagagggaaggttagctgttggaaaggctattttagaagataaaccttatataggttctaaatatgccattgcggataataacggaaaatttcttacggactttatttactatggagtgtcagattataaaaatggattagcatcagcttataatgataaggatacattttttattgataaaagcggagttagggttaaaagtttaccagtagtaagcggaagtggtatattagagtttaaaaaagatataattaaagctgatgtggactttagaatatcttatttagataaaacaggaaaagtaatatggcaacaaaacaaggaaattccacttaataataaatataaaattatagaaaaaaggtatagaccaaataaagattacttagtgtattatcctgaaatttcaggtatgaaagataaagaggaagaaaaaagagtaaataaaaagctagaagaactttctcaggtgaaatatatagaagcggatgtacagcttgattataattattttggagatttttcagtagaatttttcaaaaagaatctattagttttagagcttaatggatatctttattattttggtgcagcccatggtatgcctactaagatatatcctcatatagatcttataagtggagaattttatgaattagaagatttatttaaaaaagatagtgattatgtaaaagtattaagtgatattatagattatcaaataaaacatgatgaacagtattcctatgtttttccagatgcttttaaaggtataaaagagaaccaaccattttatataggagaaagtgaattatatatttactttgaaccctatgaaattgctccttatgcagcgggatttcctacttttaggataccttataaggatattatggctattatagatatgagaggacagttttggagagcttttaattagattaaaaaatattttactaaagttaagtaaccgcgcatcaatttaatctaggtgtgcggtttgaattgcaggaattactttttagtagtgtttacttaattaggaggaatttgctttttaaaaagaagttttttttaaaaaaagattgtataaaaaataacaacaataaatagtacatatatagtaaattgttaaatagttaattaattttttagataaattcaagagtaaataacagaattagttattaaacgtgaaatatatggctaaaagcggtttaaataagcagatataaaattgaatagtttgaatatttgttatataattaacataacaaagagaatatatgtaaagttaattgttatatatttaacgaagaagttggaaatactattgaattaaatgttatatctataaaaactgaaaattatttaaaagagaggggactaaattatgaaggtagaaaatgttcaacagcttatggaaaagatagaaaatgtaagaaaggcacaaaaagaatttgcaaattataatcaaaaacaggtagatgagatatttagaagtgcagctatagctgcaaatgaggcaagaatagaactggctaaactagctgtagaagaaacaggtatgggaattatt

SEQ ID NO: 917 - DNA, 23213 bp, synthetic construct
  misc_feature 1..23213: note = Synthetic
  source 1..23213: mol_type = other DNA
attagggagagaataaaatttataaaggaaaaggctaaggaagtatatggattaaatatagttgaatttgatctttatgatataattttagaaattttagagtcaaagggatattttaagaagaatctagaaatggaacagaaaaaaggcagtgaacaagtgttcaatgctactaaaaaaacattaagattaacattagaaaatgacttagtggtaaaatacatttcagaaaggttagagggaagggacattgtatttttaactggtatagggaaggcttggcctataataagatcacatactattttaaataatctacatagaatcgtagaaaagcagccattaataatgttttttccaggaaactatgatggtggttcacttatgctctttaatactttgaaagatgacaattattatagagcatttccattaatagataaagtttagattaattcagaaaggtagaattgattaactaatgtttgtaaaagtaagagcctagtggtagttatcggataaatattaaaagtatagggggaaatttatatggacttcatgttaaaagatatgttttataaaaaaatagatagagatattaaaggtgttataaaagttgggcagtatgatgatgaaaatataaagcaggaattagatgaatatgttgtaactggtgagttaaacaaacatattgatagattttttgaaagctataaaacaggtatattaggaaatacagataaaaacggtgtatggatttcaggattctttggtagtggtaagtctcattttttaaagatactttcttatcttttagaaaatagagacatagaaggaaagaaagctattaattattttgatgataagggattggatagcgttatattagcaaatatgaaacaagcaggagatgtaaaagcagatgttattcttttcaatatagactcgaaatctgactctgattctaagtctaataaagatgcaattgtcaatgtatttaacaaggtatttaatgaaatgcagggcttttgcggatctatgccttggatagcagaattagagaggcaaatggttaaagatggagtttatgaagattttaaaaggacttttgaagaaatatcaggtaattcatggatagatgcaagggaagacttcttctatgaagaagattcaattatagaagccttgtctaaaactactaaaatgagtgaggaagcagcaagaaattggtataacaagtgtgaagaaaattattcattaagtatagataagtttgctttcaaggttaaagaatacagtgattctaagggaaaaaatcatcatgtagttttcttagtagatgaaattggtcagtatataggagataatactaggtttatgttagaccttcaaacagttgtagaggatttaggtactaaatgcaacggaaaatgctgggtaatagttacatctcaagaaggattggatgaatttacaaaggttaaaggaaatgatttttctaagattcaaggcagatttaatactagattatctctttcatcagcaaatgtggatgaagtaattaaaaaacgtatacttagaaaaaaagatactgctataagccatttaaaagcattatatgagcaaaaagaatctataataaagaatcttttaacctttacatcagatactgctgaaatgaaattatataaaaatggagaagattttgcagaagtatatccatttattccttaccaatttaatttacttcaagctacctttaatggaattagggagcatggagcatctggtaagagcttatctaaaggagaaagaagtttattaggtgcataccaacaagttgctgtagattatatggataaggactctaatatacttataccgttttcagctttttatagaaccatagaaacttttttagattcagccattagatcagttatcattcatgcagaaaacaatgatcacttaaacgattatgatgtggaaattttaaaacttttatttttggttaagtatgtaaaagaaattaaagctaatatagaaaatttatctacattattagtaagtgaaatagatgatgacaaactagaaataaagaaaaaagttcaagaatccttaaacagactaataagagaaacattagttcagaagaatggtgatgaatatatatttttaactaatgatgagcaggatgtaaataaagaaattaagaatatgccagtagatagtggggaagttgttcaaaagattggagaaataatttttgatgatatatatggtgatcctaaattttcatattcaaaaaaatatcaatttacatttaataaaatagtagatgatagaactagaggaccacaaacaaatgaaataggagttaaggttataactgcaaattttgatttagtaggtggctctagtgaaagtgagttaaagcttttatctactagagaaagcaatgtaattataaatattgcaaaggaagttaattatattgaagaaatagaaaatgtattaaagatagatgcttatttaagagttaagggaggaacaaaatctagtacagctatagaagacattaaaacaaagaaaagcagggagagagaagatagagccaaaagagcaaagtttttaatagaagaagctttaagaactgcagaagtatatgtgaatggaagtttactagatataaaagaaaaaagcagtatagatagaataaatgaaggactaagggccttaatagattctaagtataataagattaactacataaagagttttaaagaaaatgctaaagagctttatgacattatggatgcaagattaaaccaaatggagttagtggatagcaatcctaatagattagcggtagatgaagttaataatcatatacaaactagttcagcaagaaatctgcaagttacagttaagagcgtattaactaagttttcaaagcctccttatggatggaaagacattgacatacagaccataataataactttatttaaaaagcaggatattaaagttatattgaatggagaagtagtgactcctaacaatagagaaatagtaaactatattactaagagagattatattgagagagttatattaaagactagagaaaaagtaagtcaaaaatacatagatgtagttcgtgatttaaataaggatttgtttggattttcatcactaccaggtgatgaagatggaataatgagtatatttaaagatgaatgtaagaaggagctatcaagaataaacgaaatgcttgttaacttttcacatagaaactcttacccaggagaaaatatattaaaggatggtaagaaattatttgtagaaatagtagagcttacagatacaattgagttttttaaaaaagtgtatgatttagaagatgagttattagattatgcagataatattgatgagataaagggatttttctataagaaagaaaatggaagaatagatttttcatctaaaggcgagcagaggattatatttgatgatgctttagataagttagaaaactttcaagataataaagaatatatagtaaacgatgatgtaaagagagttgtagaagaaataaaggaaatattgagaatgtctaaaccttattctaagataccaggaataccacttttaatagaaaagtataacaacaagatattgtcattactagaagaagaaagtattcctgtaaaaggctttatagaaatgtgtaaaaaagaggtttttgaaaccttagacaattatgattttaaggataagtttaataataaaataattgaagaatttaataacctttatgctagagttgaaggagcaaataattttgctgtactttcatccatgtctgatctcgcagataagcttaagctaaaattaattaaggaaataatagaagaggatgaaagacaaaagataataaagtctaagaaaatagaaaatgccaatagagtggcagagaaaccagaaaataaagaagaaaaaactattgctgcagcttatgaagtagatagtataccagaggttattataaaaacaaagactttaagcatgagggaattagttaaaggtcagaagactataaagaataatgatgacatagatgaagttgtagaagcactaagaaagaaattaagagaagagctggaaaaggatacaataataagtttggtttagtgggcagtgattagtgagcagtaagtattgggtagatagtaactaaccactgctcactagatataagaaggggaaaaacaaatggataaaaataaaataaaaacttttgccatatgggctagaaaaaatttaataggttcagttagtgaaagagcaaatagaataggtgtaacagaaaataaaatagaagatgcagtagctgtacaaggtggatttaagttagaaggtaaggaagaaatatttaaactttctaaagggcatagagataagctagtaaatgaagttagagaaaaaggctttgatcaagtaatggaagaggcagcgtatacctggtttaatagatttatgggactcaggtatatggaagtgaatgactatcttccaagtggaataagagttctttcatcagaagttgaaggaaaaacagagccagatgttttaactagaatatccgaagtaatagatgaattaaaattagatgcagaatacatatatagacttttagatagtggaaagacagaagatagagaagaagcctataagcatattttagtaaagcaatgtaatgaactaggcaaaataatacctcaaatgtttgaaaagataagtgactatacagaattattactaccagataaccttttagaagaaggttctgtaataagaaaaatggtagaagatatagaagaagtagactttaaggaagaagtagaaataataggctggatgtatcaatactatatatctgaaaagaaagatgaagtatttgcagccttaaaaaagaatgtaaaaatatcaaaagaaaatataccagcagcaacacaactttttactccaaagtggatagttaaatatatggtagaaaattcactaggcagattgtggcttgaaggacatcccaatgaagagattcaaaaggagtggaaatactatttggaagaagcagaccaggagccggaagtagaagaagaattaaagaagataagggaagaacatagtaaattaaagccagaagatataaaggtattagatccatgtatgggctcaggacatatattggtgtatgcatttgacgtactttataagatatatgtatcagcaggatattcagaaagagaaatacctagaatgatactacaaaataatctttatggtctggatatagacgatagagcagcacaactggcttcttttgctttgattatgaaggctagacattataatagaaggttgtttagggagattgaaagagtagacttggaattaaatttatgttcaatacaagagagtaatgaaataactaaagaggctatagactactttgtaggagttgatagtggacagaagatagtggacagtaagaagattaaagaagatgtattacaagaagttgctatggatactgtgaaagttggtaatgatacgcttagagaagatattgaatatttagttgaagtgtttactgatgctaaggaatatgggtctatacttgaggttaaaaaagtaaattttaaagcattgaaacagagattaatggaaatagaaaaagatgataactttatatttggtgattatagaagaatacttttggataaacttcctgtaatagttaaacaagcagaaataatgggtagaaaatatgggatttgtgttactaatcctccctatttgggtagaaaaggtatgtcgataaaattaatagactatattgatgaaaaatattctaaacataaacaggatgtatattcggtatttattgataaggttaataactatacaaacaaatattgctttatgggaatgataacccaacattcatggatgtttttggagagattttcagagttgagaattaaattactagattatacaacaataataaatatggttcatttaggtgcaagagcatttgaagaaataagtggtgaagtagttcaatcagtagcatttgtattacaaaacagaaacaataagcaatatattggaaagtattcaaggctaatagactataataacacatatgaaaaggaaaaaaattatctggaaaaagaaaatataatatgtactaagcaaaaattatttaatgaaatacctaataattacattgcatattggataactgttaatatgaataaattatttgcaaatagcaatttaacttcttatggaaaagcacgagaaggtatggcaacggcaaacaatgactactttctaaaattatggtatgaagtaaattataaccatattaggtttaacgaattttcaagggagtcagcaataattagtcagaagaagtggtttccgtataataaaggaggagagtatagaaaatggtatggaaatagagattatatagttaattggtataatgacggggaggaaataagaaattttaaagatggaaagggaaaagtaagatcacataattataatctagaatatatatttaatgaaggaattgggtggtcgtcaattagttcaggtatatttaattctaggtatataccacatggaacgttatctgattctaaaggacctacctattattgtgatacagatgaaaatttaaattatatattaggatttcttaatagcaaaatttcaaatgaactacttaaaattttggctccaacactagattataaagttggagatatagcggatttgcctttaattttaaaagatgaaaaaaagtttttagttaatcaatatgttgattttttaataaataaatgtaaaaatgactgggattcatttgaaacctcatgggattttaaaatacatccacttctattagtggatagtggaaagtggatggtggggatagtagagatgaacaaaaaaatactaatcactattcactatccactacctgctatatctctgatgcatttaatatttggaagtcatttacggatagtcaatttaatcaattaaagcataatgaagaagaattaaataaaatcttcattgacatctatggtttacaggatgaattaactccagaagtagaagataaagatataaccataagaaaagcagatagagaaagagacataaaatcatttatttcttatgctgttggttgtatgcttggaagatattccatagatgcagaaggtcttatttatgcaggtggagaatggaaggataaatggagaggtgataatggagagtggagagttaggaagcaattaaaaaatgaagatggtgaaatagtagttgatgaatggattaaggctacttttgtgccagatttagataatgttattcctattacagaagatgagtattttgaggatgatatagtttctagatttattgaatttgtcagaactgtttatggtaaggaaactttagaagaaaatttagattttattgctgattcaataggtagaaagccttccgaaactgcaagacaggcaattagaagatactttattaaagatttttataaggatcatttaaaggtttatcaaaagagacccatttattggatgtttgattcaggtaaaaatgacggctttagggctttaatttatatgcatagatataatgaacaaactgtagcaaaggttagaactgattatcttcatacattacagagaaagtatgaagcagaaatacaaagacatcaattaatagtggattcagaagaatatactgcaaaagatagaactgctgctaaaaagaagataagtaaaataactaaacagatagaagaatgcagggagtatgatcaggtagttgctcatttagctaatgagaagatagctattgatttagatgatggagtcaaggttaactatgctaagttccaaggagttaaagtaattaactctaaaggaaaagaagttaagatggacttattagtaaagatttagaaattaatatagggtatgcttagtgtataccttatatcttataaataggaagattataaggcaggtgagtatataggtgcttattaaatttgattattgggagattgatgaagaatctccattcggtagtggagccagtgagaaaaagtggcttattaatcctaaaactaggcagaaaggtatatttaaatttcctaagggtgcagatatggggaagcctacaggcgaatattgggctgaaaaaattgcatcacaattggctgaagttttagaaatagaatgtgctaaggttgatataggaacatttagaggtagagtaggatctatgagttatatgatattaaatgatgaagaagaactaatagaggggattcaatatattactaagatatataaggaatataatcaagataagtttattgactacaaaacagcagaaccttattctataaatatgatacttcaatcaattaaggaaacaggattagaaaaggatttcttagctattccaatatttgatgcattaataggcaacagtgatagacatcatagtaattggggaatagtaaggaataaagtaagtggacacataagaatatcaccattatatgataatggatcatcgttatgttgccttattgatccaaaagatgttccgaactttttaagagataagatgagatttgagtctttaatatttggtaaatcaaaatctatgataagatggacaaaacctaatagaataagacattttgaattagttgaatatattaaaagtgaatactatgaagaaacagtttgtatagtagataaaataagagagaagttaaatgataatagaataagagatattgtatatagttatgatgatggaataattcatcccaatataaaaaaattattatatgcttttttaatagaaagaagaaagagaattatagatatatattatggagaaaaggaggaatagtaatgagtacaattaataccagagactatatttatctagtttggaaatattataaaactaggcaaagatatatagttggggagttgtctaaaaatggcaaatatgaatttagatataaagctgaagatataaacaaagcaattaaaaatgggtttaaaccacttatagcatttcctgacataaatgaagtatatgaaagttatgatatatttcctgctttttcaagtagattaccggataagagaagaaaagatgtaaaagaaatattagcaaaatacaagttagaaaagtatgatgcatttgaacttttaaaaaagagtggaggtaaacttccaacagatagtttagaattcatagatccaatatttttagatgaaactaatattgagagggagttttatatagcaggcgttcgatattatgactattgtgatgagaaaagtaaaaatacaaaattaaaattagatattaatgaaaagctgatattagaaaaagattacaataataagtatgataaatatgcaataaaagttattaataaagaaaataaaattattggatatataccagttttctttagcaaagagataagtgaagccattgaaaacaacagaaaaattaaatgtgttgtaattaataaagaatgtagtgatacttgtgaagagtgcataaaggttaaattaactattatttaaatactttaagataaaaaaagaaaactaacattgttgtaaaaataaggatttttaaataacatattgacaaatagtaaaattttaggtattatagtaataggaactaggtaaatgtttatagcatatcgagagtttaactagttactataacaaggcaaatgccgtaaagtatcccctgtgttcatatgagcataggggtatctttttttgtattaatttgtaaaaaatgtattttggtagaatagggtgattgtatgggtgaagaaattaattattcattagggcttgatattggtattgcttcggtaggatggtctgttattaatttagatgtaaatagaattgaagacctgggtgttagaatttttaatgctgctgaaaatccaaaggatggagcatcgttagcactgccaagaagatcagctagaggaagaagacgtttacttaggagaaaagcatatagagtaaaacgtgttaaaaattttataatggcaagaaagattttgagtgaggataaattaaagaacctttttataaataagaatgttataagtgtatgggaagcaagagtaaaaggattaaatgaaaagctgtcagaagaagaatggtcaaaaatattaattaacttatgtaaaagaagagggtttaagtcaaatagaaagaatgaagcaaagaataaagaaactggacaaattttgagtagtattaataataaccttgaaaaaatgaaagaggtaaatgctagaacggttggagaatttatttataatgaagttaaatcttcaaaagataggtataaagctttacgcaataagtttggtgaatataatatgtgtgtgtctagagacataattagagaagaaattcatactttatttgaaaaacaaagagagtttgagaacgaatttgcagcagatgaactagaagatgagtatttagctatatttgattctcaaagaccttattcgaaatttgaagatttagagaaattagtaggattttgtacctttgaaaagaaaaaatacaaacgagcacctaaaaattgtatttcatcagaggaatttgtattgtatgaaggaataaataaactttcaattatgaataatggtgatagaagaaaattgactaatgatgaaagagaattaattgtaaatgaagcttttaaaaagaaagaaataaaatatactaatttaagaaaactattgaatttaaaagaagaagataggtttttaacattaacatatagtattgataaagatacttataaaactgaaaatacaaaatttatttcattaaaaggatatcacgaaataaggaaatctatagagtatggtgttagtaaaatgtactggcaggaaattaagaataatagaaaaatgttaaacgatattgcttatgttttaactttaggaaaaacagatgatgatattattaaacaattaaaattaagaaatatttcagacacaaaggttatagactcccttttagatatttcatttagcaaatttaataatttgtctatagaagcaatagaaaagatattgccttttatgaaagaaggatatcagtataacgaagcttgtgaaaaagcagggtataattttaaagcattatacgagggaattaagagtaaaaagttgccagttattgagatagatgagatagtaaatcctgtagttaatagagcattagctcaaacaagaaaagttattaattcagttattgatagatatggttcaccaataagaataaacattgaattggcaagagatttagctaagaattttaaagataggaaagctattgaaaaggaacaaaaagaaaatagatgtaatatagagaagattagagaagaaattaaaagtttaatgggaaaagagccaacaggaagtgaagtactgaaatatcgtttatggcagcagcaaaggggtgaatgtgcatacactcaacaatctatatatatagaaaatttgtttgatcatggatattgtgagattgatcacataatcccattcagtaggtcctttgatgatagtctatctaataaggtattagtattaggtatagaaaatcaaagaaagagtaatagaaccccatatgaatattttggattagatgagcaacgatggaacagatttgagacatgggtaaaaggaagttacttgaattataagaaaaaaagtaatttgttaaagaagaggttatctgaggaagaacaaagagaatggaagactagaaatttacaggatactaaatatatatgcagatacatagctaattatattaataatagactagaatttaaaccaagtgagtcaaaacaaaaagttattactattaatggtagagctactgcttatttaagagctaaatggggattgatgaaggttagaggaaatggtgataagcaccatgctttagatgcagctgtagttgcagttgctactcaaaaaatggtacagcaaatatcaaaatatagtaaggcacatgaattaagtagtattagaaataaccatgagttcattgatatggaaacaggtgaaatagtacaattagaagaatataaggatcttcttaaaaaaattcttccaagaccttggttaggttttagtgaagaattatcaatgaggttaagtaatgatccaattagtgaattgaaaaaatcaccatttaaaagttatgatgaagagtttattagaaatacagtaaaaccaatttttgtttcaagagttccatttagaaagattggtggaaaattatttggagaaactgtttattcaaaaaagcattttaataaagatggatattttgttaagaaaaagaagctgacagagttgactaaagaagatttgaataatttttataactatgggtgtgataaaagactttatgatgcaataatggagagaatggaacaattcaattataatgcaaagaaggcttttgaggggaaatttagaaagccaactaaaaatggtactgaaggacctatggtaagaagtataaaaattaaaacaaaggtgccttttaaagatggaatagaacttcaaaatgttgaaggtttagttgctaaagagggaatggtaagaatagatatttatgaaaaagaaaataagtattttgtggtgccagtatatagatatcaattagctaaaggaataattcctaaaaaggcagttttaaggaactatcaggaggaacaatggccgacaatggatgaaagttataagtttaagttttctatttataaaaatgatttaatagaaataaaatatgaaaagaagagcggttattttgggtattatgatggttttaatagacatacggattcattaactattcaaaatcatgacagatctgaagagtatgagggagttggaattaaattaggagttgtagaatttaacaaatatcaagtagatgtattaggaaattactataaagttaaggcaggtggaaaacaatgagctttagaagtgtaataatctcaaattctgctaatttaagcttaagaaatagcaatttagtaattaataatgaagatgaatttcaaattcctatagaagatatatccgttttagttatagaagggatatctgttagattaacaaatagattgctaagtaagttatcagaaaataatgttgcaactattatttgtgatgaaacacatttaccttcctctatagtattacctttaaatacacattatagatcttataaagtgttaaaacaacaattgaatcaaagccaggcttttagcaaaagaatatggcaaggtataattaaacaaaagctatgcaatcaaggaaaatgcttagatattttatcattaaatggaggggaatttttaggaaaattgtcatcttcagttgagagtggtgataaaggcaataaagaagcaataggtgcaaaatattattttaagtgtttatttggagaaaattttacacgtgatgatgagaatggaattaattcagctttaaactatggttatgcaattataagaagtgcagttgcaagggctttagttatgtacggatttaatactgcgttgggtgtaaatcattgtaatgaattaaattctttcaatcttggagatgattttatggaaccattcagaccaatagtagatttatgggtttataacaatgtggagtatgatgatatattaacaaaagagcatagaatagatttagttgatttaattaattatgaatgcaccattgatgggcaaaatcactctattttaaatgctattgataaaatgatatcttcttatacaacagcttgtagcaaaaaggattttagattattgaagttacctctgataaaacaattggaatatcattattatgagtagaagatttatgagattaattgtattttttgatttacctgttgtaaaaaaagaagatagaaaagcatatcaaaactttagaagatttttattgaatgatggatatataatgattcagtactctgtatattctagaatttgtaatggaacagatggtgtaaataagcatattataagattaaaaagaaatttaccacttaaaggttcagttaggtatttacaaattacagaaaagcaatattctgaaatgaaatttttagtagggtcagcaaaaccacaagaaaaaaatataaattcaagtcaattaaatgttttttagaatcataaaagtcattgaaacatagcaatttcaatggcttttataattggtattatagcatatcgagaatttactaggaactataactgcttgattctcttcatctggattagcaatattatagcatatcgagaatttactaggaactataacataaaaacaacaaatgatattcttgaatggattatagcatatcgagaatttactaggaactataacctggcagcttcatcataagcaattggtgcaattatagcatatcgagaatttactaggaactataacacttcatcagcataggttttcattaatattattatagcatatcgagaatttactaggaactataacttatacttattcatatgtattaatgtgtacattatagcatatcgagaatttactaggaactataactgtgggagatgaagacgcagaaataaaattattatagcatatcgagaatttactaggaactataactcttcttcccttaacttctttttccaataaattatagcatatcgagaatttactaggaactataacgctaaaagccatagttccatctgtacaatattatagcatatcgagaatttactaggaactataactgatgtattagtacttactgcatcagttgaattatagcatatcgagaatttactaggaactataacgtttaaaattggagctattacattttctaaattatagcatatcgagaatttactaggaactataacctttcactagctactggcagttcattttttattatagcatatcgagaatttactaggaactataacgcgttcgctatacttatattatatattcatattatagcatatcgagaatttactaggaactataacaattatgcatttttaaaggcttgtggattgattatagcatatcgagaatttactaggaactataactgtattagtgcaggaatagcagtaataagaattatagcatatcgagaatttactaggaactataacggtaattgttcaagtctatgtatgtattcattatagcatatcgagaatttactaggaactataaccaaaaagcctaatggagccactgggttcaattatagcatatcgagaatttactaggaactataaccatcttttatatatatccacactactacctattatagcatatcgagaatttactaggaactataacccatctgtaagtaagtgattagtcatctttattatagcatatcgagaatttactaggaactataacttatctattgataactgtaattcttcttctattatagcatatcgagaatttactaggaactataactaatttctttagttgttctattgtaatcaattatagcatatcgagaatttactaggaactataacaagaagatgaatagcaagagtaggaggagcattatagcatatcgagaatttactaggaactataacaatctttctagttcatctcctgttaggttgattatagcatatcgagaatttactaggaactataacttacgatacaaggcactgcaccatctaaatattatagcatatcgagaatttactaggaactataactataaacttattttcatctctataagataaattatagcatatcgagaatttactaggaactataactatcacttatagtgattattttaaacttctattatagcatatcgagaatttactaggaactataactgaattttgaacataattatatcctcctctattatagcatatcgagaatttattagcataatatcgcaacttttaagtacttaaatagagatgctatttttagataataatagtttttgtgataaatgtagaatactagatattaagaatggtataattatattaaaattaagtaaatgagtgggtgaaattatgataaagagttttgcttttgaaaatttcaaaagttttgataaatcagaattcaatttagagaatttaactataatgaagaaaatggtggtagtgagtttatagatataaataaatatcctaaattattagctaaaggtaatttgggcgatttatcaataagtgacgagctactaaagtctattaaagggaaaggtataagagttaactttgtcaactagaagaagaaatatataatttattttataatgagtgagcaaacgtagaggtgagcatatgaacttacaagaaataagaaattttcttaaagaactattttcaaaaccattaggtgatggaaagaaacgtcatattgtattttggtatgatagtaatgaagatttcgctcaagatatggacaattttgatattgaagatgttaaagttattaagttaacagacaagaatgctttttgggctaagtattatatagaaaaagaagatacaactagtaacatacttgtttattcaaatatggaaaagccaataccttcggaagattggcttcatgatattttttgctatagtgaagaattttctactgatagagcaactgtaattatgagagaattaaatattatggatgcttcacttaaagaggaatttaagctttataatactttttttaagagaaaagaaagagtagatgcttttaagaatttaaatattcaagagtacaccaaggaaaaaattcatattggagttctagcgagtttaactaaggtaaaactgatggatatagaagaaattttaaaggctgtattaaaggaatatttagatggaaaaagtaagatatatgaggatatagataagtttggtgacttggattcattatggaatttaataataagatattatggctatagctttgaagaaagaagcctggaaagatttatggctatgcttttaactactagtatgaatgaaacgattaagtttgaattgccaaagcaatttagtacatttatatcaaagaagaatactaataacatggtatttataaatcactttatgaataacaataaagacggtgaatactatgataaaatgcaggagttaattggagataagttaaaaataaatagcatattagaaaagaatgattcagaaacctttgttagctgcgacatctttgaagaaatggatagaataatacttaaaagaattactaatctattaaatgatggtgtagaagaatatagcaagtacctaaaaattatagaagcaagaagaactatgcatttctataaaaagtatgaaagtgaatacaaagcaataaaatgggttataaacttattaaataagaaaaaagaattggaatccatgataaaaacagaatcagcttatgatatgtttaaaacatatgtaaaggactattattatatagataaagcttatagaaaattttattatcattttgataactgcggagaaaaagaaaacttaaatgacttaaaagaaaaggttgaaaatttatacaataattggtatttacaagagttgtctattaagtggtttaattcgttaaatactcaaaattcttggagaatagaaggaattaggcagcaggataatttctataaggaatttattaagtatacatataaagaaagagtatttgtaattatatctgatgctttaaggtatgagagtgctgatgatctttctattatgcttactaatgagagaaaaggtaaggtggaaattgagtatatgcaaggagtaattccttcttatactaaattaggaatggcagcactattaccaaatgacaaaatagaaattaatgacaaatatgatgtaatagtagatggagttagtagcagtggtattgaaaatagaaatgctattttaaagaaagaaagtcccaaatcattagcaattaaatatgataaagttatggatatgaagtatgatgaaataggaaaagcttttgcaggggtagatgtagtttatatttatcataatgcaatagatgctgtaggagatcatgcagcaacagaaagagaagtattttcagcaacagaggtagcatttaatgaaattattactttgataaataaattagtaaatagagtaagtgcatcaagtatagttatcactgcagatcatggatatatttataagagaagtgatatgaaagaaagtgataagatatcaggaattaaattagatgaggatgaggacagcaggagatttatattaacaactaatactgatgtagtagaaggaacagtggtctttaatatggattatttattaggtgaaggcgctaataaaagtgttatcactccaagaggaacattaagatttaaagtacagggtgcaggcgctaattatgtacatggtggagcaatgctgcaggaaatagtagtgccagtaattaaatttaaaaatgatagaagtatatcatctgtaaatgatataagaaaggctaatatatcattaactagtataacgagaaaaataacaaatcctataaccttcttagaattctttcaggaagaaaaaatacaggataaggtcatagcacaaaaaattagatgtttctttgaagatgaagaaggaaataagatttctaatataaaaactattataggtgattcaagatctgaaaatccactagatagaacttttagaatagagtttgttttagatagcagaacttatgataagactaagcaatacttcttagttatgcaggatgatgaagatagtaatggaatgtatgaaatgataccatatactattgatattgctatagttgatgattttggattttaaagaaagtggatagtgagtagttattagtgggaggtgaaaggaaggcaaaaaagctatccaatattctactagttactaaccgctaaaaatgagcgatagcgaatgttttacgggggagaatttcaatggatgaattgagtataaaattaaataactattttgcaggtaaagtagttagaaaggatttaacacaaaagttaaagcaaggggcaaatgtacctacatatgttcttgaataccttcttggtatgtattgtgctacagatgatgaggatagtataaatgctggtgttgaaagagttaagagtattttagctgataattttgtaagaccagacgaagctgaaaaaataaaatctaagataagagaaatgtcaaggtatactgttattgataaacttacagtaaagctaaatgagaagaaagatatttatgtagcagagttttcaaatcttggtttaaaagatgttgagatagatgctaaatatgctaaagattatgaaaaacttttaggtgcaggaatttggtgcattataaagcttcaatatctatatgatgaaactacaaaaaatgcttcaccgtttttaatagaacaggtaaccccaattcaaatgcctaatatggatatggatgaacttatagaaggaagaaagcaatttacaaaagaagaatggatagacatccttataaaatccataggaatggaacctactcaattaaaaaatgaaactaagtggcatatgattcttagaatggtacctttatgtgaaaataattataatatgtgtgaacttggaccaaggggaacaggtaaatctcatttatataaagaaatatcacctaactcaatattagtttcaggaggtcaaactacagttgctaacctgttttataatatgtctcaaagaaaaataggattagttggtatgtgggatacagtagcctttgatgaggttgcaggtataacttttaaagataaagatggaatacaaataatgaaggattatatggcatcaggttcttttgctaggggtaaggaagaaaaagcagcttcagcttctatggtttttgttggtaatataaatcaaagtgtagatgttttattaaaaacttcacatttatttgaaccatttccggaagctatggcttatgattcagccttctttgatagaattcatttttatctgccagggtgggaaatacctaaaatgaggccagaattttttacgaatagttttggatttattactgattatctttcggagtatttaaaagaaatgagaaagaggacttttggtgatgcgatagataaatatttcagattaggtaataacttaaatcaaagagatgttatagcagttagaaaaacagtttcaggcttaattaaacttatatatcctcatggcgaatttaataaagaagaattagaggagatattaagatatgcattagtaggcagaagaagagtaaaagagcagctaaagaagataggtggaatggagttttatgatgttcacttttcttatatagataatgaaactatgagtgaagaatttgtatcagtgccagaacaaggtagtggttcacttataccagaaggtgctatgaaatcaggtcaggtatacactataggtgtaggagattctggaatgataggaatatacaaaatagaaacagaagtagttaatggttcaggtaaatttgaaaaaacaggattaggatctgctagagaagcaaaagaaagtatagaaactgcatttagatatttcaaagcaaacagccgaaatataagtgcatctatatcaactactcaaaaggactatttaatgcatgtacaagacataaatggtgtagggcttacctatcatctttcgctagcagcattgattgctatgtgttcaggagcattaatgaaatcggtacaaagtcagttagcaattttgggttcaatgagtataggtggaacaataaataaggtagaggatttagcaaatacacttcaggtatgctttgacgcaggggcaaagaagatattattaccaatggctaatgcaggagacttaccaactgtaccaccagagttatttgcaaaatttcaaatcatgttttatgcatcaacagaagatgctgtgtttaaggctttaggagtgcaataaaaaattgaaagtgtagtttatattctttaaaggtgctgtgcttcaattttctttagagataagcaattctaaaagtttaaaggctacattaaaagtagttgaagggttattggtaaaggattacttgttaataataggtaaattagaaggactgttataaaatatattagttagaggtgaaggtaatgaagttaaaagttacgaatctaacagaagcgtgcgcaaaagaaatttgtaattggaaatatgatgatgaatattcagtatataattatccagagtggagcaggatatctagtgaaaagtgggctattacaatagaggaaaagagaaaagatgaatttaatgctatagttgatgatggtaatattttatacggatatataaggttaataaataaagataaatatattcttattggagttggactaaaaccatgtgtatgtggacaaggattaggaaatgatttaatggaaatagttaaaggacagtgtaggaaactatatcctggtaagaaaattgttttagaagttcgggcctttaataaaagagcgattaaatgttataaaagggcaggatttagtgtagtagatacttataaaaaagatacgcctattggttatggggaatttgttaaaatggaatgtacttattagcttataatattaggcttatgaattgttaatatgttatagttacagcaataaatatagaatatatatgttatgatcaactatataaacaataatagtagtattattatgcataggaagaaagtgactagttagtgaaattgagcaaggaaaccttaaaggagtggaacttccaaaatcctataatgatttccatactcagcttgtttatcataaagataaaaaatatctcaaccaatgagtaaactaatagaaattacattgaagcattgttgtaattggtgatttttatccagcccatctgcatagaattaaaccattaaattcactaatatagttttcatttcccataattaaaataactctaggtcgttctatcttaaacttatggttgcaaagcagatgagtacaaatatcatagttgtaagtagtacaatctattgatatgcttttgtaatttatactttttgcatattttatacaatgatatagcagagaatctaaagcatctttatagttaacatcagaacttatacaaagaagggttatctctaagcaatcagtggaattttctcttatacttttatgatgacataaagcaaagcctttaatttcatggttttgttttaatacaaaagctgttccaaaatcattatattttattaagtaaagttgagaagacaaatctaaaccattagatattttattggaaaaagtttttatatcttctttcaattttaaataatttgattcattggaaacatctatatttgttatttcatatttaggacagtaagaataattacagcaatcatcaagttgttttttcatgttcaaagaaagtttaagtggtttaaatcccatgctcatgtataatcccacattatagctggattcaggcatagtgtaaagaccaatattttgaacttttacatcttcttttaaaaattttattgtatgcttgagcagctctttaccaataccctgtcctctatataaagggtcaactccaaaactaccaaaccagccaaaatttccccagatgtgtatgaaattatagccgacaactttattgttaagttcatatacaatgctagcgttattacttttttctatataagatttaattccttcagcttttcttggagcatcagctttaaaacatattttatctattctttgtatttcaggaatatgatcaaaagtcatcttttttatcataggatatcct

SEQ ID NO: 918 - DNA, 23210 bp, synthetic construct
  misc_feature 1..23210: note = Synthetic
  source 1..23210: mol_type = other DNA
aacagactatttattagtaggaagaagttctggtggttatgaatttatatttattgaattagagcatccttgcggtaatataactaaacaagatggaaatttaggtgaagtctttagaaaaggtattgagcaaacaaaagattggaaaaggtggcttgataggaattatcaatcgcttagagaatattttaataagaatattaaagaaaatgatagattaccgagcgagtttatagaatatgattcaacaagatttcattatgttgtagttgcaggaagaagagataattttaaggaaaatacttattgcataaagagagaatataaaaaggatcaaaatatattacttttacactatgataatcttttagacttatctaaaaatattattgaaaaacataatttctaatgaagtacaaatatttataactaaaagtaatatatcatgggaaagtaaaaatggacttatttaataaagaattggtggagtttatatttagaaactatagtttaatataaaaattaattttaggaagtactattgcaatgaaagtaattttgtaatagtactttatttttgtataaactaatcattaaaaataactttatcatacttaatgtaataatatatatttttataaatagatggtataataaataatgaaaactggaccacggaggtaaagttatttatggaatataaatctacaattaagtcgagaccttatttatacaaagagactaagaaggcttcaagctttgtaaatgaagggttggacattaatgatataaaagaaaaatcattacaagataatatttttcaattagaaagtgaagccagaaagaaggaagttgcatcaataattactgctagattaaaaggtctagatagatatgttatagataaaattgaaaatagtaatgttgaaacatcaaagattttggttttatatgcaatattaaaaacagatagattgttttttgagtttattaacgaagtttataaagaaaagatattattaaaagatttatttataagagataaagattttagtatattttttcaaaataagagagagcaaagtgaaaaagttgagtcatggtcagagtacactttcaaaaagttaaaacaggtttacataagaatactatttgaaagtggtcttatatcaaatcaaaaaggtaatagagaaattaaaattcctataattgaaaatgaagtaaaggactatttatatagtattggggatgatgtttacttaaatgcaatacttggaattattaattagtaaatgataggtggttaatggagtgaaagatatatatcaaagattggatgagatattacctaagatagtcgaacctgattttagaaaaaataaaggcttaggtaatgaaattggcttttatgtatttgattataatccagaggatgaactactagttagagatagaactaactttataatagaaaaggcaaagaatgctcatggattaaatataaaagaatttgatctttatgaaattattttagaattattagaggagaagggataccttcaaaagaacttccaaatggaagaaaaaagaggtagtgaacaagtatttaatgcaacaaaaaaagcattaagacttactttagataatgatttagtagtgaaatatatagaggatagattagatggtagtgatattgtatttttaacaggggtaggtaaatcatggcccataataaggtcacatacaattctcaacaatctacatagaattgttgaagagcaaccacttgtaatgttctttccaggaaattatgatggtggttcacttatgttatttaactatctaaaagatgataattattatagagcatttaaattaattgataaatgctaaaaagagggtgggagtacaaatggatattaagttaaaatcaatgttttacaaaccaattgatagagatattaaaggggtaattaaagttggtcaagcagatgatgaaaatataaagcaagagttagaagaatatgttgtaacaggtgagttaaataagcacatagatagattcttcgaagcctataaggctggaataatagggcatactgataaaaatgcagtatggatatcaggattctttggaagtggtaaatctcactttttaaagattctttcttaccttttagaaaatagaagtattgaaggacaaaatgctattaattactttgatgataagggattagatagttttatactggcaaatatgaaacaagcaggggatatatctagtgatgttatcctatttaatatagattcaaaatcagattcagataataagagtaataaggatgcaatagttaatgtatttaataaggtatttaatgaaatgcaaggcttttgtggatcaatgccttggcttgctgatttagaaagacaaatggttaaggatggagtttatgaaaacttcaaaactgtatttgaagagatttcaggaaactcatggatagatgcaagagaagatttctattatgaagaagattcaataattgaagcactatcaaaaacaactaaaatgagtgaggaggcagcaagaagttggtatgaaaaatgccaagataactactcactaagtatagaaaagtttgcaaaaagagttaaggaatactgtgattctaaagaaaagaaccatcatgttgtattcttagtagatgaaattggacaatatattggagatagcagagatttaatgctaaacctacaaacagttgtagaggatttaggtactgcttgtggtggtaagtgttttgttatagtaacatcacaagaaggattagatgagtttgctgttgtaaagggaagtgacttctctaaaattcaaggtagatttgatacaagattatctttatcatctgctaatgttgatgaagttattaaaaaacgtatacttagaaaaacagaaggtgcaacaagccacttaaaagcattatatgagcaaaaggaatctattataaagaaccttttaacttttacatcagatactgctgaaatgaagctatacaagaatgcagaggattttgcagatgtatatccgtttataccataccagttcaatttattacaagcagcatttaacggtgtaagagaacatggagcatcaggtaagagtttatcaaagggtgaaaggtctctattaggtgcttatcaacaagttgcagtagattttatgaattgcgactctaatatattagtacctttttcagccttctataaaactattgaaaccttcttagattcatctattagatctgttattataaatgcagaaaaaaatgatagattagataagtttgatatagaattattaaagttattatttctagtaaagtatgttaaagagattacagcaaatataaacaaccttgcaaccttattagtagataatatagatgcatcacaaaaggaattaaaggataaagttaatgaatccttaaagaaattaataagagaaactttagttcaaaagaatggtgatgaatatatattccttacaaatgatgagcaagatgtaaataaagaaattaaaaacatggctgttgataatggagaggttattcaaaaggttggagaaataatctttgatgatatatatggagagtctaaattcaactattcaaataaatatatgtttaccttcaataagatagttgatgatagaactagaggacctcaaaacaatgaaattggagttaaggttataactgctaactttgatttagattatggaacatcacaaggagagttaaaacaattatctattagagaaaataacgtaatcgttaatattgctaaggacgttaactacttagaagaaatagaaaatgttttaaaaatagattcttatctaagattaaagggtggtacaaaatctactactgccattgaggatataaaaagtaaaaagggtagagaaagagaagatagaataaagagagcaaaattcttaatagaagaatcgctaagaacagcagaagtctatgtaaacggaagtttacttgatataaaagaaaagtctggtgtagatagagttaatgaaggattaagagccttagtagattcaaaatacaataaattaaactatgtaaaagaatttaaggataatactaagaatttattcgatattatggatgcaagactaaatcaaatgtctttagtagacaatgatccaaataggcttgcagtagatgaaatcaaaacccatatagaaactagtacatcaagaaatcttcaagttactgttaaaagtgtattacaaaagttttctaatgctccatatggatggaaagaaattgatattcaggctattatagttgttttatttaagaagcaagatataaaggttgtattaaacaatgaggtattagcacctaacagccgagaagttgtaaactatgtaactaaaagagactatgttgatagaattatcttaaaaacaagagaaaaggttgctactaagtatatagatgctttaaaggatttaaataaagatttatttgggttctcatcaatgcctgctgatgaagatggaatgatgagtatgtttaaagaatatagtaaaactgaacttcacagagttgagttaatgctaaataactttagtgtaataagcaaatatccaggtgaatacacacttaaagaaggtaaaaaattatttactgaagtaattgaagtaaaggatacattagagtttttcaaaaccgtgtatgatttagaagatgactttttagattatgtagataaaatagataatattaaaggtttcttctttaagaaagaaaatggtgttattgatactaactctaaaggtgaacaaagacaaatattcgatagggctttagatacattgaaaaattataatgacaacaaagagtatatagttaatgacgaaataaaagaaactatagaggaaataagggcaattttaaaaatgcctgaaccttacagcaaaataccaacaattcctttacttatagaaaagtacaataataagattttatcattgttagaagaagaaagtattccggttctagaaaatattgaaatttgcaagaaagaggttgtggaagttttagaggattatgattttacggataagttctcaactaaaatcactgaagaatttggaaatctaactagaagaacatcagaatcaaacagctttgctatattatcatctatgtcagaccttgctgaaaagctaaaggtaagattagtaaagaatattgttgaggaagaggaaagacaaaagagaataaaggctcaagagctagcaagaacagatagagttaaagaagcatcagcagctaagagtggtatagcatacgtagcggaatctccaaaatatcagccagaagtaatgataaaaacgaagactttaagcatgagagaactggtaaaaggacaaaaggtaataaagaatgattcagatatagatgcagttgtagaaagcttaagaagaaaattaaaggatgaattagaaaaagatacaattattaatcttatttaatatgttttgggtaaggagtatataaatatgggggtaaaagaaatgcaaggaactccggcgcatttggagtatgtaggacctgaaggaagaaaaagaagaagtacatgtgcttattatattcaagataaatgtcattgtagtaagtggccatcttttatggttaaatgtgtagggagaatgtattgttactatttcgatgattcggaagaaactaaaaaaatatttaaaattgagaaaaagaatttaataagacaacaaaatgaaagaatattaaataatcgaaaagaaaaaagtaatttagctaatgaagaaaaatcaatagaggattatttactcaataaaaaaataactttaaaagatataaaaactaataaaattattaatatacaggtcgtaaaagaagaatgggcaaattcatttaacatgagattttcaattaaatcacatgtggcaaaagcacttaaaaatgcaatggttggaaatgttataaaagtaaaagtggggaaaataataaaagaatatgaagttattaaaattaggtaggagtcaattatggataaaaataaaataaaatcttttgctatttgggcaagaataagtttaattaagtcggtaagtgaaaaggcgtatagtattggaatatatgaagataaaatactagaagcaactgttgtacaaggtggatttaggttagaaggaaaagaagagatatttactctttcaaagaaggatagagatgctttagttaagcaagttaacgaaaagggatttgagcaagtaatggaagaggtttcatatacttggttcaatagatttatgggattaagatacatggaggttaatgattatcttccaatgggaattagaatactttcatcagaagtcgaagggaaaaaagaaccagatgttttaactaaggtatctgaagtaatagatgaattaaatttaaatgctaatgaaatatacgaacttttagatacaggtaatacaatagatagagaaaaggcatatagaatcattttagttaagcaatgtaatgaactaggtaaaataatacctcaaatgtttgaaaaaataagtgattatacagaacttttattaccagataacctattagaagaaggttctgtcataagaagaatggttgaagatatagaggaatcagattggcttgaagaagtagaaataataggatggatgtaccaatattatatttcagaaaagaaagatgaagtatttgcagccttaaagaaaaatgtaaaaataacaaaagaaaatataccagcggcaactcaattatttactccaaagtggatagttaagtatatggtagaaaactcattaggaagactatggcttgaaggtcatccaaacgagaaactgcaaaaagaatttaaatattacttagaagaagcggagcaagagcaagaagttgaagaagagttaaagaagataagagaagagcatgcaaaactaaaaccagaagagataaaagtattagatccatgtatgggatcagggcatattttagtttatgcgtttgatgtgctttatgaaatatataaaacatcagggtattctgaaagagagatacctaggttaatattacaaaataatctttatggattagatatagatgatagagcagcccaactagcatcatttgctttaataatgaaggctagacattataatagaagattatttagagagatagaaagagaacatttagaacttaatttatgttcaatacaggaaagtaatgctataggaagagaggaaatagattattttgcgaatggaaatgaagaattaaagaatgatgtgaattatttaattgatgtatttaatgatgcaaaggaatatggttcattacttgaagttaaaaaagtgaactttactgcattaaggaaaagattaaaagaaatagaatgtgaagataactttatgtttggagattataaggcagttcttttaggaaaagtgtctatattaattaaacaggcagaaataatgagtataaattatgagatttgtgttactaatccaccatatatgggaagaagaaaaagcatgaatgatactttgagtaaatatatagataaacattatactagcgccaaaatggatttattttcagtttttatacttagaaatattgaatatactaatataaatggattatcaggatatatgacaccatttgtatggatgtttattaattcatatttagatatgagaaaaatattgattgataagattaatatggttaatttggttcaattggaagaatcatcatttaaggatgcagcagtatcaatatgtacgtttacaataagaaatacaaaattaaattatagaggaagttatataaaattatctgattttgttggagttgagaatcaagaaaaaatggtaaggagatgtgttgaaaatcctaatcaagaatataactattttgtatgtatggataaatttaaagaaatacctgataatagaattgcatattggataagtgataaggtcagaagtacatttaattttaatttactaggtaatgaaatagatataaaacaagggataacaacatcagataatgaaagatttttaaggttatggcatgagataaattttgaaaaaatgggttttggattggagagagaagaagcaaaaaatagtaactataagtggtttccttacaataaaggtggaggaaatagaaaatggtatggaaataatgagtatgcaataaactacgaagatgatggaagagaaatgaaagaatttcatgacatacttaataaaacaaatccaggtggaagacttaaaaatagagatttctactttaaaaaaagtataacatggtcagatatatgtggaagaagttttgcagcaaggttttcagataaaggttttttatttgatgtaaaaggatcaagtgcttttccagatgataaagactttaattatatcttaggatttttaaactcaactttaattaagcagtatattgacatattaaatccaactgttactacccaagtaggtgatttaaaacagattccagttactgtgaaaagacaagatgtagatgaaataaataggttggtcaatgaaaacatagaaattagtaggcaggattgggataatgatgaaatttcttggaactttaaagaaaatattttattaaaacagatagtctttagtaagaatttaaaagattgtattaataattttagagattatgcaagtggacaaagaagtaaattaaaatataatgaggaaaagttaaatcaatattttttaaatatatatgatcttaataatgagtttgaatataaagttgaagatgaagatataaaaatttatgaaatagtagataaccaaattattaaatcatttatttcttatgctgttggttgcattttaggcagatattcaattgatgctgaaggtcttatatatgctggtggagacttttctgagaagtgggtagtggataatggacagtggaaagttagagatgttcagaaagatgaagacgggaatgtagtagaggataaatgggttgagtgtcgttttacgccggatattgataatgttattccgataacagaggatgagtattttgaagatgatatagttacaagatttattgagtttgtaagaactgtttatggagaagaaacattagaaggaaatttagattttattgctgattctattggtagaaaatcatctgaaacttcaagacaggcaattagaagatactttattaaagatttttataaagatcatttaaaggtttatcaaaagaggcctatatattggatgtttgagtcaggcaagaatgatggatttaagtgtttagtttatatgcatagatataatgagcaaacagttgctaaggttagaactgagtatcttcatactttacaaagaaaatatgaagcagagattaatagactgcagttagttgtagattcagagaagtatacaataaaagagaggactgctgctaaaaagaagatagatagaatatcaaagcaaatagaagaatgtagagagtatgatgaggctgtggcgtatctagcaaatgaaaagatagccattgatttagacgacggagttaaagtcaactaccagaagttccaagatgttaaagtcattaattctaaggggaaagaagttaggatgaatcttttatcaaaaatatagaacatagtagtaattagtagtgaataatctctcttctaatacaataaaagaaattattgacataacttcaaaagtatcctaaaataataataggaactaaataaacgtttatagcatatcgagagtttagttagttactataacaaggcagtaagccgtaaagtatcccctggatttttgtctaggggtatctttttatataaaaatagaaaggggttagaattaatgaaatacagattggggttagatattggtattacatctgtaggatggtcagtaatcaatttagatgaaaacagaattgaagatttaggggttagaatctttaatgctgctgaaaatcccaaagatggatcttcattagcagcacctagaagagaggcaagaggaagaagacgtttacttagaagaaaagcttatagagttaaaagagtgaagaatctgattgtagacaagaaaatcttaacaaaagatgaattagaatctttatttacaaacaaaagtgtaataccgatatgggatgctagagttgaggctttagatagaagtgttactaatgaagaatggtcaaaaatattaattaacttttgtaagagaagaggatttaaatcaaatagaaaaaatgaagttaatgataaagaggcaggagttatcattacaagtattaaaaacaatgaggaaaatatgaagatgacatcctcaagaactataggtgaatttatttataatcaagttaaaaatagtgatgatggatataaagctatgagaaataagtctggtgagtataatatgtgtatatctagagatatgatacgtgaagagattcacacactatttgaaaagcaacgctattttaataataaatttgcatctgatgaaatagaagatttatatttgaaaatatttgactcgcagagaccttactcaaaatttgaggatctagaaaaaatggtaggatactgtacttttgaaaaaagaaagtataagagagcacctaaaaatagtatctctgcagaggaatttgtgttatatgataatttgaataaattatctattataatggatggagataagagaactttaacaaaagaagagagaaattttatagttaatgaagcatatataaaaaaggaaatcaagtattctagactgagaacattattaggattagatgataaggaacgtttttctacacttacatatagtttaaatacatcatatgccaaaacggaaaattgtaaatttgtttcattgagaggttatcatgaaataaaaaaagctatagaacatggcattagtaaggaatattggaattctaaagttaaagataatagaaagatgcttaatgatattgcatatgtattgtcattaggaaagactgatgatgagattattaatcaacttagaaaaagagacataccaaatgtagtaattgatgtggttttagatatatcttttagcaaatttgcaaatttatcaattgaggctatagaaaagatcataccttatatgaaagaaggatatcagtacaatgaatcctgtgaaatggcaggatatgattttaaagctattttccaaggggaaagatcctacaagttaccagtgataaaaattgatgaaattgttaatcctgtagtaaatagagcattggcacaaactagaaaagttattaatgcagttattgatgagtatggttcacctataggtataaatgtagagcttgcaagagaattatctaaaaattttaaggatagaaaagttatagaaaaagaacaaaaagacaatagagataataaagaaaaaataaaaaaagaaatttatgatttaatggataaagagccaactagtatggagattttgaagtatagattatgggaacaacaaaaaggagaatgtgcttattctcaaatgatgataagtataaatgatttatttacagtaggtgcatatgaaatagatcatatcatcccatttagtagagcttttgatgatagtttaaataataaggttcttgtgcttgcaagagaaaatcagcttaaaagaaatagaactccttatgagtattttggcaatgatgaagataagtggcatcaatttgaggtttgggttaataatagcaatttaccatataaaaagaagcagaatctgctaaagaaaaaaatttctaaagaagagcagaaggattggaaagcaagaaatttacaggacacaaagtatatttgcaaatatatatccaattatattaacaacagattgatttttgtagaaagtgaatcaaagcagaaggttattactgtaaatggtagagcaacttcatatttgagagctaaatggggacttattaaagcgagagaagatggtgacaaacatcatgctttggatgctaccgttgttgcagtaactacacaaggcatgattgctgaaatatctaaatatagtaaagcaaatgagctaaaatatgttagggaaggtgacgactttatggatatagaaaccggggaaatagtaaaacttagtgattataaatatctacttaaagacaaattacctcgaccatggccatattttagtgaagagttgcaacttaggttaagcgataatccaatagaggaattgaagaaatggtctattaagacttatgatgaggagtttatagctaatacggtaagacctatatttgtatccagagtaccttttaggaaaatcggtggtaaattatttaaggaaacgatttattctaagaaatcattcaaagaagattctttcattaccaagaaaaatcttactgatttaaagattacagataaagtaaatgatatggatagtgtgtataattataattctgatagaaagctttacgacgctattgaaactagattaagagagtttgatggagatggaaaaagggcatttcaagaggtgtttagaaaaccaactaaaagcggtaagttaggaccagtagttagaagtattaaagttaaagctaagcaaccatttaaggatggaattagattaaaaaacggtatagtagctaaaaaccaaattgtacgtattgacatttatgaaaaaaataaaaaatattttgtgataccgatatattcatgtcatctaacaattggaataattcctaaaaaagcagtagtggctaaaaaatcagaggagaattggagtgaaatagattcaacctataaatttaaattttccttatttaaaaacgatttgatagaaataaaatatgataataaaaaagggtattttgggtattttgatggatttgacataaattctgctggattaactatagaggaacatgatacatctaaacaatatagaggaattggcattaaaagtggagtatgcttatttaataaatacgatgttgacgtattaggaagatatcataaagtaaaagatggtgctaaaaatggcatttaggagcgttattatttcaaatcctgcaagattaaacgtaaaaaatagcaatttaattattacaaatgaagatgagtttcaaatacctattgaagatatatctgttttagttatggagggaaatagcattaatataactaatagattacttagtaaattagcggataacagtgtggctacaataatttgtgatgaaaaacatctacctaactctatagtattacctttaaacactcatcatagatcgtataaggtattaaaagagcagttatgtcaaagtgctgcttttagtaaaaggatatggcaaagtatcattagacaaaagcttataaatcaaggaaaatctttagaaatcttaaataaggacggttatgaaattttgtacaaactttcacaaatggttgaaagtggggataaaggtaataaagaggctattggagcaaagtattattttaaatatttatttaatgatgaatttataagagatgatgataatggatataatgcagtattgaattatggatatacaattataagaagtgctgtggcaagaacattggttatgtatggatttaatacagcgttaggggttaatcattgtaatgaattaaattcatttaatttagcagatgattttatggagccatttagacctattgttgatatgtgggcagtgaataatgctaactatgattgtgtactatcaagagaggacagaattaaattagttgatttagttaactatgaatgtattataaatggtcaaaatcattctgtattaaatgccattgataaaatgattgcttcgtataccacatctgttagtaaaaaggattatagattattaaaattaccatcaattaaacctttagaatatcattattatgaataataattttatgagattaattgtattttttgatttgccagtagtgaagagagaagatagaaaagcgtatcaaaattttagaaggttcttattgaatgatggttatataatgatccagtattctgtatattcaagaattgtaaatggaacagaaggagcattaaaacatattagaagactaaaagaaaatttaccatgtaaaggatctgttcgatacttacaaattacagaaaagcaatattcagaaatgaaatttcttgtaggttcaccaaaaaagcaagaagagatggtgaattcatcacaattaaatgttttttaaacagtaaaaaccccttgaaaactagatgcttcaaggggtttcatagttcctattatagcatatcgagaatttagtaggaactataactagaggtgaatggtttgtacctatatcgaaattatagcatatcgagaatttagtaggaactataacaacaatttataataagtattatgataaagaattatagcatatcgagaatttagtaggaactataacataccttcttaaataaataaattgcgaaccattatagcatatcgagaatttagtaggaactataacgttgtacactatttttccgtttgtaataatattatagcatatcgagaatttagtaggaactataaccatacttacatcgcaatcataattattaaattatagcatatcgagaatttagtaggaactataactgatgattcaatataattactgaattttgattatagcatatcgagaatttagtaggaactataaccaagttctgtatcttgccatttataacgtcattatagcatatcgagaatttagtaggaactataacggaaacttcggaggagattttagctagaaattatagcatatcgagaatttagtaggaactataacttctgaacatttgcatactcttaattatttattatagcatatcgagaatttagtaggaactataacttataggacaatggacatttgacgattaggattatagcatatcgagaatttagtaggaactataacaaaaaagattgttattgcattaaacggatcattatagcatatcgagaatttagtaggaactataactggcaaggtcgctttgtctggtgaagttgattatagcatatcgagaatttagtaggaactataaccggcgagtgtggggtatggggcaaagccccaattatagcatatcgagaatttagtaggaactataaccatatctaaactatgtgtacttggatgaacattatagcatatcgagaatttagtaggaactataactgggtcttcagcttgtgtttttccgtcagtattatagcatatcgagaatttagtaggaactataacagtaaggacatgctatataccttttattttattatagcatatcgagaatttagtagaaaacaatttgagtttaactacactttttatttaattaggttattgatataatgattgtattagtattaatatataatttataaataattgaggtgtatcaatgaatttacaggaaataagaaattttctaaaagagttattttcaaagcctttaggtgatggaaaaactcgtcatattgtattttggtatgatgaaagtgaagattttattgaagatatagatacttttgatttagaaggtattaaggtaattaaattaacaaaaaacaatgccttttgggcaaagcattacatagaaaaggaagatacaacaagtaatatattagtttattctaatatgaaaaagccagatccacaagaagattggctttatgatatattttcgtatagccaagaattctctactgatagagcaacagttataatgagagaattaagagtaatggattcattgctaaggccagagtttgaaacctataatgtattctttaaaaataaagaaagaatatcaggatttaaaaatttaagtatacaggattatacaaaagaaaaagttcatataggtgttcttgctgttttaactaaggttaaagtaatggatattgaggaaataattaaggctattattaaagattatttagatggaagtaataagatatatgaagatataaagaaatttggaaatgtagatgtattatggaatttacttgaaaagtattttgggtattcatttgaagaaaaaagcatagagagatttatggctatgttattagtaactaatatgaatgaaaatattaagtttgaatttcctaaagcatataaaacatatatttcttcaaaggttagaaactgtttagtttttataaatcattttatggataacattaaagatagtgattattatgataagatgcaagagttaattgcagtaaacctaaaaatatcacagttattagaaaaaagagatactgatgaatttataaaatgtgaagtttttgaagatgttgataaaataattttaactagaataaccaatctcttaaaagatggtgtagaagaatatgataagtatttatctattttagcagcgagaagaacattacattattacaagcagtataaaagtgaatacaaggctataaaatgggctataaacttattaaataagaagaagttattaaattcaatgataaaaacagaaggctcatttgatatggttaagtcttatacaaaagattactactatatagataaggcatatagaaagttctattatcattatgataagtgtcaatggaaagaagaattaactgatttaaggaatgctattgaaaatacttacaataattggtatttacaagagttatcaattaagtggaatgattctattaaaagtttaaattcatggagaatagaaggtttaaaacaacaagataaattctacagagaaaatattatgtataaaggcaaagagagaacttttgtaataatatctgatggattaagatatgaaagtgcagaagaattaaatactttacttataaatgaaagaaaaggtaaaagtgagttagattatatgcaaggggtattaccttcatacactaagttaggaatggcatctcttttacctaataaaactattgaaattaatgaaaaatatgatgttatagttaatggaataagtagtaatggaacagataatagagactctattttaaaaatggaaaatgaaaaatctttagcaattacatacgataaagtaatggatatgagagatactgaaataaggaaagcatttgtaggattagaagtagtttatgtttatcataatactatagatgcaaggggagatcatgcttcaacagagagagaagtatttagtgctacagatgaagcatttaaagaaataattgatttagtaaataagttagttaatagagtaagtgcagcaagtataattattacagcagatcatggatatctttataaaagaagtgctatggaagaaagtaataaaatatcaggcattaaacttgatgatggtgaagatagcagaagattcttattaacatctaaagatgaatcagttgaaggtacaataacatttagtatggattatttattaggcgatgactctaataaatatgttataactccaaatggaacttcaagatttaaagttcagggagcaggtgctaactatgttcatggtggagcgatgctgcaagagattgtagtaccagttattagatttaagaatgatagaagtacatcatcagttaatgatataagaaaggttaaagtatcattaacaagtataaatagaaaggtaactaatccaataacattcttagaattcttccaagatgaaaaattacaggataaagtaatcgggaagaaaataagaacttattttgaagatgaagaaggaaataagatatcaaatattaagacaataatagcagattcaagatcagagaatcctactgatagaacttatagaattgaatttgttttagaaagtagaccgtatgataagacaaagcaatatttcttagttatggaagatgaagaagatgcaaatggtgagtatgatagaataccatttaatattgatatagcaatagtagatgattttggattttaaggttaagtaggagcgtgtctatgctcctacttagcaatatctaataattctttaagtataagttcatatttctcagaagttaatgagaaaatattaaaaattttaagagcagttatatcacttaaaaaagaataagaaaaaggtatatcattatctaaataatataaatctattggagttatggtacgtgatatagttttatctttaagttcttctgctgttataaaaatatctttcttttctgtagtattccaaagaggtgacattttaaactgtaaactatttaaattaacttttctagaattagtatatagataaactttattattaaatttacctagttcatttaaccatatatagggtatgtggttgcaggttatgtttcttagttttaaagttttaggatttgctactttttttaatatttttatgaataaaataatatctaatgaattaatatattcagattgtaaatgcagaaaaattttataagaattttttataatagattcttttaagttttcgatttcttctgaggttttggaatgaccagtagaattaaagaattctgcataagatttatatgagcaagattgtttaggtttatgagaaaaatgagttttttcatcagaattttttgctctaacaattaactccttgccgcaaaaaggacaaaaagcaggagtgtaaacccctttaattttagattctatacagtagtcttcaatatgaacaatatgattattggcatttatgcagtaaaacatataattaccttagaaattaatatcataatataatattctaaatattatttaaatagaactatggatggtggagagcatggatgaattaagtataaaacttaaccagaattttgctggtaaggttgttagaaaagatttaacacaaaagttaaagcaaggtgctaatgtacctatatatgtacttgaatatttacttggaatgtattgtgctactgatgatgaggatagtattaatgcagggtcagaaagagttaaaaatattttagcatacaactttgttagaccagatgaagcagaaaagattaagtctaaaattagagaaatgagtagatatactgttatagacaaattaacagttaaacttaatgaaaaaaaggatatatatgtagcagagttttcaaacttaggtttaaaaaatgttgagataagcgctaactatgttaaagattatgaaaaacttttaggtggtggaatatggtgtattgtaaaattgcaatattactatgaagatggtgttatagatcaaaatccgtttattatagaatcagtaactccaattcaaatgcctaatatggatatggaagaactgattgaaggtaggaagcaatttacaaaagatgaatggatagacatacttattagaagtatagggatggagccaacacaattagagaataaggttaagtggcatatgttacttagaatggttccgttatgtgaaaataattataatatgtgtgaactaggaccaagaggaacaggtaaatcacatttatataaagaaatatcgccaaactcaatattagtttcaggtgggcaaacaacagtagcaaacttattttataatatgtctcaaagaaaaattggacttgtagggatgtgggatacagtagcctttgatgaggtagcaggtataacctttaaggataaagacggaatacaaattatgaaagattatatggcatctggttcctttgcaagaggtaaagaggaaaaggcagcatctgcttcaatggtttttctaggaaatataaatcaaagtgtagatgttcttttaaaaacatcacatctttttgaaccatttccagaagcaatggcatatgattctgctttttttgataggatgcatttctatttgccaggctgggagattcctaaaatgagaccagaacttataacagatagttttggatttattacagattatttatctgaatatttaagagatatgagaaaaagaacctttggtgatgccatagataaatactttaagctaggaaataacttaaatcaaagagatgttattgcagtaagaaagacagtatcaggcttagtaaaattactatatcctcatggagaatacacaagggaagatatagaagagatattaagatatgctttggtagggcgtagaagagttaaagaacaattaaagaaaatagggggaatggaattctatgatgtacatttctcttatatagataatgaaacaatgaaagaagaatttatatcagtaccagagcaaggtagtggttcattaatacaagaaggggcttcaaaggctggtcatgtttatactataggattaggtgattctggaatgataggtgtatataaattagaagtagaagttgttggtggaacagggaagtttgaaaaaacaggacttggatatgatagagaggctaaggaaagtattgaaactgcatttagatactttaaggctaatagtagaaatattagtgcttcaatatcaacaactaacaaagactacttaatgcatatacaagatgttaatggagtaggaatgacgtctagcctatcgttagcagcaataatagcaatgtgttcaggttcattaaataagccagtacaaagtcaattatcagtattaggttctgttagcataggtggaacaataaataaagtagaagatttggctaatacactacaagtatgttttgatgcaggagcaaagaaaatattattaccaatggcaaatgcagcagatattcctttagtgccaccagaactatttgcgaaattccaaataatgttttatagtggcgcagaagatgcagtatttaaagcattgggggttacatagaaaggagtgtatacaatgaataaaaatttaagaagcgctatcttaggtttagctataggtgatgcattgggagttccggtagaatttcaaagcagagaagatttaaggctaaatccagttgtagatatgagaggatatggaacttataatcagcctgaaggaacttggtcagatgatacaagtatgacattgtgtttgttggacagtattgctggtggcataaattacaatgatattatggacaagtttgttatgtggaagaattatgggcagtataccccttacggagaaacatttgacataggaatgggtacgagggaagccatattgcgatatgagaatggcatagaatgttgtggaaaaagcgaatatgataatgggaatggatctctaatgagaagtttgtcaatggctttttacattataaaaaaatatggatatgaatgtgatacatcaattattgttagacttgtccatgatgtttcatctttgactcatggtcatataagaagcaaaattgcttgtgtaatttatattatgatagccattgaactagcggatggaaatgacattgagacttcggtgtctagggggactagcagagcttttaaacattatataaggaataatgaaaaggaaatagaaaactacatgagaattaaaaataaaaattttaaattcttaaaggaagacgacataaaaagtagtggttatgtagttgatactttggaagctgctatatggtgtcttcttaatacaaataattatagtgattgtgtgctaaaagcagtaaacttaggaagtgatacagatacggtggcagcagttgctggaggactagctggcattgtttatggtatagataatatacctagtgaatggctggagaaacttgtgaaaagagattatatagaaacgctatgtcatagattacaaaattaacatatattttaaaagcatatgaaattataaaaagagacaatccctaatttccacagaaacagggattgtctcttctgttatttacgcttgataaaataatacacaggtaatccaatcaatgtgataataattcctacaagtgattgtgttggattagatatcactgtgctgattagaatatatagtccacctagaattcctacaattggggtgatagggtagaagggaacacgataaagtccttcttttttaggcatatgctttctaagacgaaatacaccaaagactcccatggtaaagaaaatccaaagtacaaataccaaaagatctgttaatgtattaaatgttccagtcaaaatatagattactgcaagaacactttctaaaattagagcattggcaggtgtatggaatttcttgctgacttttgataagaagcttgagcctggaagcattttctcttcgcccatggcgaatggaattctggcaccagtcattaggaatccatttaatgcaccgaatacagataccataataccagcagtgataaacatagcaccgttcttaccaaataaggcaattgcagcatctgcagcaggtacagaggaagttactacttcattaattggaattgctctgaatatggcaagattaaaaattgcatatacaacaacaacaaatagtacaccaagagaaataactctaggcaagtctctagtaggtttttttaattcgccagccatattggtgacactaatccaaccttcatatgcccatagagttccaagaatagcaacaccaaatccgtttccgccagaaatagtatcggtacctgttatttggaaggaactgctgttgattataccaaatagaataattgcgacaattggaactaattttcctatagtagccactacctgaataattccaccatacttagtagcaagaacattcattagcaaaataaaacctagaacacaaatagcgactattttttgttgagctgcgctgattggccagaagaaactggtataggtggcaaaagcaattgcctgagctgccacagaagcaggataagaaataatagtttgtacccatccaagcaggaaaccaaatacgtcaccgtagagatcttttaaataagtatataagccaccagattttggtatggcagcagcaatttctgcaatggttagtgcag

SEQ ID NO: 919 - DNA, 23210 bp, synthetic construct
  misc_feature 1..23210: note = Synthetic
  source 1..23210: mol_type = other DNA
attaaaatactattttgaacaaaatcataaaaataatatttctatcattgcgcatccagatgcatttaaagaaaaagcaatagataatttaaaaatttgttctcctattttacaagaagaactaaaagaaaaatgtaatttaattctttcaaaggagcctaaaaaagttagcaaacatataacttttttaggggaaatacctcaaataaatgacttcgaaaataggacacctattggtaaacaaattgttggtgaaactttagttgatgattatttattagatgataccgcacttgcatataaaaatgaaaatggcatttatattattacaggatgctctcatagtggtatatgcaatataatagaatatgcaaaagaagtatgtaaagataatagagtagtaggagttattggaggctttcatttgttcaaagtaaatgaacaagttgagaaaacagttgattatttgaagcagaataaggtaaaagaactatatccttgccattgcacttcatttaatgttaaagcagaaatacataaagctttgccggtgaaagaggttggagtaggtttagaaattaactggtagaaatatagatgataaacagacttataagttagaatagttgcaataatttccatgtactgcaattattcttttatttttatgttcaagaatatatccattaataattatgtaattttacttttattgtgttaaaattactattgtaaaactggaccatggaggtaaaaaataattatggaatataaatccactattaagtctagaccatatttatataaagaaactaaaaaggctgcaacacttattaaacaagggataacagttaaagatataaaaaacaaatccatagaagaaaatatatttcaacttgaaagtgaatccagaaagaaagaagttgcatcaattatagtggcaagacttaaagatttagataaatttataatagataaaatatcagagggtaatgtagaaacatcaaagatacttgtcttatatgcaatcattaagactgacagattattttttgaatttatgaatgaagtttataaggaaaaattattattaagagatttatttttaaaagataaggactttaatacgtttttccaaaataaaagggagcagagcaaaaaagtagcctcttggacagaaactacttttaaaaaattaaagcaggtttatgtacgaattctttttgagtgtggattgattgaaaatcaaaaaggtgaaagaagtataaagacacctattttagagggtgaagttaaagagcatctatataaaataggagacaaaatatatataaatgccataataggagatagtgagtaggttaggaggaaacatgaaagatatatatcaaagaattgatgagatattacataagataacagagcctaattttaggcaaaacaagggcttaggtaatgaagttggattctatgtatttgattatgaaccggagtatgaacttttagttagggataggataaagtttataaaggaaaaggctaaagtagcatatggattgaatatagtagagtttgacctctatgagattatattagagattttagactcaaagggataccttaaaaagaactttgaaatggaagaaaaaaagggcagcgggtatatattaaatgcctctaagaaaacattaaggttaacgttggaaaatgacttagtagttcagtatatatcagaacgattggaaggcaatgacatagtatttttaactggtgtgggaaaagcatggcccataattagatcacatacaattttaaataatctacacagaattgttgaaaaacaacctttagtgatgttctttccgggaaattatgatggtggaacacttatgttatttaacagtttaaaagatgataattattatagagcatttccattagtggacaaatattaaagaatattgggggagattatatggaatttaagttaaaagaaatgtttcataaggaaattgatagagatataaaaggggttataaaagtaggtcagacagatgatgaaaatataaagcaagagttagatgagtatgtagttacaggtgaattaaataaacttattgatagattttttgaggcatataagataggtatcataggaaatacagataaaaatggagtatggatttcaggtttctttggcagtggtaagtcccaccttttaaagatactttcttaccttttagaaaatagagaaatagaaggaaagaaggcgattaattattttgatgataaggatttagatagttccattttagaaaatatgaaacaggctggggatgtatcaacagatgttattctttttaatatagattcaaaatcagattctgattctaaatctaataaggatgctatagttaatgtattcaataaggtattcaatgaaatgcaaggcttttgtggctctatgccatggatagcagatttagaaaggcaaatggttaaagatggagtttatgaaaactttaaaaaggtttttgaagaaatatcaggtaattcatggatagatgcaagagaagatttctattatgaagaagattcaattatagaagcattatcaaagactactaaaatgagtgaggaagcggcaagaaattggtataataaatgcgaagaaaattactcattaagtatagataaatttgcggataaggttaaagaatatagtgagtctaaaggaaagaatcatcatgttgtatttctagtagatgaaataggtcagtatataggagataatacacaacttatgttaaatcttcaaacagtggtagaagatttaggaactaaatgtggcggtaagtgttgggttatagttacatcacaagaaggattagatgaatttacaaaggttaaggggaatgacttctcaaaaatacaaggtagattcaatactagattatctttatcatcagcaaatgtggacgaagtaattaagaagcgtatacttagaaaaaaagatagtgcaacaagttatttaaaagcattatatgaacaaaaggaatctataataaagaatcttttaacttttacatctgatactgctgaaatgaaactatataaaaatggagacgaatttgcagaggtttacccatttataccttatcaatttaatttgcttcaatcagctttcaatggggttagagaacatggggcatctggtaaaagtctatctaagggagaaagaagtttacttggggcatatcagcaagttgctatagattatatgaatgagaatactaatatacttatacctttttcagctttctataaaactatagaaactttcttagactcatcaatcagaacagttattattcacgctgaaaagaatggcaatttaaataaatttgatgttgaagttttaaaactattattcttagttaagtatgtaaaagaaataaaggcgaatatagagaacctttcaacattgttagtaagcgaaatagatgcagataagttagaaataaagaaaaaagttcaagagtctttaaataaattaataagagaaaccttagtacaaaagaatggtgatgaatatgtattcttaactaatgatgagcaggacgtaaataaagaaatcaagaatatgtcagttgataatggagaggttactcaaaaggttggggaaataatctttgatgatatatatggagaccctaaattttcatattcaagaaaatatgcatttacatttaataaaattgtagatgatagaacaagaggacctcaaacaaatgaaataggagttaaaataataaccgcaaactttgatttagtaggtggttcaagcaaaagtgaactaaaattactatctactagagaaaataatgtgatcataaatattgcaatagatgtcaattatttagaggaaatagaaaatgtattaaagattgatgcttatcttagagttaagggtggctcaaaatccagcactgctatagagaatattaaagcaaagaaaagtagagaaagagaagatagattaaagagggcaaaattcttaatagaaggggctttaagaactgctgaagtatatgtaaatggcagccttttagatataaaagaaaaagatggagtagatagaataaatgaagggttaagagccttaatagattctaaatataataaaataaactatgttaaagagtttaaagaaaatgctaaagatctttatgacataatggatgctaggcttaaccaaatggaattgattgataacaatcctaatagattagcggtaaatgaagttaatacccatatacaaactagctctgcaagaaatcttcaagttacagttaagagtgtattaactaagttctccaatgccccttatggatggaaagacattgatatacaagccataatagtaactttatttaaaaagcaagagattaaggttatattaaatggagaagtattaagtcctaataatagagaaatagttaattatattaataaaagagagtatcaagaaagggttatattaaaaactagggagaaggtcaatcaaaaatatataaaggtagttcgcgatttgaacaaatatttatttggattctcatcattgccaacggatgaagacggaataatggggatatttaaaaatgagtgtaaaaaggaactttcaaaaataaatgaaatgcttgttaattttacattcaaaacatcatatccgggagaacaaacattaaaagatggcaagaaactatttacaaaagtaatagatattacagatacaattggcttttttaaagaagtatatgatttggaagattacttcttagattatgtggataatattgatgaaataaaggggttcttctataagaaagaaaatggaagtatagagttttcatcaaaaggtgagcaaagaattatatttgataatgctttggataagataaataactatgaagataacaaagagtatatagttaatgatgatataaaagcaattataaaggaaataaaagaaataataagaatgcctaaaccttactctaagatacctacaatacctcttttaattgagaagtataataacaaaattattgagttactggaagaagaaagtgttcctgtgaaaggctttatagaaatgtgcagaaaagaagtatttgaaactttagatggatatgactttaaagataagttcaaagacaatataattgaggaattcaataatctttataatagagttgatggtgcaaatagttttgctgttctttcatcaatgccagaccttgcagaaaagattaaattaaagtggattaaggaaatagtaacagaagatgaaagactaaagagaataaaggctaaagaaatagatgaagcgaatagagtagcagagggaacagtaaatggtgaaaataaaactgccacatcaacatataaagtagatcctgtaccagaagtagttatcaagactaaaactttaagtatgagagaattaatgaagggacaaaagactataaagaataatgatgatatagacgaagttgtagaagcacttcgagcaaaattaagagaagaactagaaaaggatacaataattagtttggtttagttggcagtggatagtggctagtgagatcaatttattgctaaatactactagcttctcactaataactacccattaaaaaaggagaatataaatggataagaataaaattaaatccttcgcagtatgggctagaagaaacttaataggtgcagttaaagatagagcaaggtacatagggatatttatagatgataaaggaaaatataatgagttaaaagcagaaccagttcaaggtggatttaaacttgaaggtgtcgatgggatttttaaattatcctttaatgatagaaaagctttgttagacaaaattaaaagttatgatgacaaaattgaaggatttgaacaagcaatggaagaagtagcctatacttggtttaacagattcatgggaattagatatatggaagtaaatgaatatcttccaataggaataagagttctttcatcagaagtagagggaaaaacagaacctgatgttttaactagagtttcagaggtaatagatgaactaggcttaaatgcagaatatatatacccttttagatagtggaaagactgaagatagagaagaagcgtataagcatattttagtaaagcaatgtaacgagttaggtaagataatacccgaaatgtttgaaaaaataagtgactatacagaattattattaccagataaccttttagaagaaggctctataataagaaagatggtagaagatattgaagaaaaggactggaaagaagaggtagaaatgataggctggatgtatcaatactacatatctgaaaagaaggatgaaatatttgcagcattaaagaaaaatgtaaaaataacaaaagaaaacattccagcagcaacacaattatttactccaaagtggatagttaaatacatggttgaaaactcattgggcagattatggctagaaggacatccaaatgaagaacttcaaaaagagtggaaatactacctagaggaagcacagcaagagctagaagtagaagaagaattaaagaaaataaaagaagaacacagtaaactaaaaccagaagatataaaggtgttagatccttgtatgggatcaggacatattttggtttatgcttttgatgtactgtatgaaatctacaaaaccgcagggtattcagaaagagaaatacctagaatgatattaaaaaataatctttatggtttagatatagatgatagggcagcacagttagcttcatttgctctaataatgaaagcaagacattataatagaagattgtttagagagatagaaagagaacatttagagttaaatttatgttctatacaagaaagtaatggaataactaaagaggcaattgattattttgtaggtaaaaatgaagagttaagaagcgatgtggagtatttagtagaggtgtttactgatgctaaagaatatggctctatattagaagttgaaaaagtaaactttgaagcactgaagcagagattaaaagaaatagaagaagatcacaactttacttttggtgattatagaaaaatgcttttagataaacttccgatgataattaaacaggcagagattatgagtagaaagtatgaggtttgtgttactaatcctccatatatgagcagtgcgggaatgaacggaaaaatattttcatatgtaaagaaaaactataatgaaggtcgaaatgatttatatacagtattcatattaaaatgtatggactattgtttaaatggaaaatatgtttcaatgattactcaacaagggtggatgagtttgacaagaagtgaaaaacttcgtgaatatatatatgggaatgtattttatacaaatctagttgaattaggttctcatatttttgaaggattaagtggagaagtagtaaaaagcactgcatttgtttatagaaaagataaaaacgataattatttaggcatttataataagttaggcaattatactgacagtgagcaaaaaagatgtgcattcttatcaggaaaaaatcaatatgtatactcaatgaagaatataaaaaaaattgaagggtatccactgtcgtattggctatctagtgaattattgaatttattttcaaatagtacagtatctagcaattttatttgtagagcaggaatgcaaacaggaaataatgaagtatttattagatactggtatgaggtggaaaaaggtaagcttgaatcaataacaaaatcttgtgattcaaaatggtattcttataataaaggtggttcacaacgaaaatggtatgggaataaagaattagttgttaattgggaaaacaatggtaaagatataaagaaatataaaaaagaaagatatgaagcaggagaaattgaaaagaaaaatagcgaatgttggaatacagaattttattttgttgaaggaattacttggtcatctatttcatcggggacaccaatgtttaggtatgaaagtaaagagtcaatttttgatattaaaggaccaacttgttttgctaaaaatacagtatctcatgacaaactactttgtattatggggtatttaaatagttcggttgctagatgtttattgcaggtactatcgccaacattagactgtaacccaggaacggtaagtaagttgccatatattgattataaagaagaaaatttattacaattaattaataaatgtattaaaatatcaaaaaaagattgggattcatttgaaacctcctggaattttaaagttcatccgcttttgttaattgagaatggagagttgagagctgagagtgatgagaaaaacaagaaattatctaccactaaatatatagctgatgcatttgatgtatggagatcatttaccgataaacagtttgagcagttgaagtataacgaagaagaactaaatagaatttttattaatatttatgggctacaagatgagttaacgccagaggttgaggataagaatattactattagaaaagccgatagagaaagagatattaaatcatttatttcttatgctgttggttgtatgtttggtagatattctattgatgcagaaggtcttatttatgctggtggagaatttaaaggtaagcggaatttggatgagaaaaaagttagaagaatagaaaaagatgatgatggtaatattatatcggattcatgggttgatgctacttttttacctgatgctgataatgttattcctattacagaggacgagtattttgaagatgatattgtttcaagattcattgattttgttagaactgtttatagtgaagaaactttagaggaaaacttagattttattgcagattctattggcagaaaaccttctgaaactgctagacagaccattagaagatactttattaaagatttctataaagatcatttaaaaatttatcaaaggagacctatctattggatgcttgactctggtaagaatgatggatttaaggctttaatttatatgcatagatataatgaacaaacagttgcaagggttagaacggactatcttcatacattacaaagaaagtatgaagcagagatacaaagacaacagttaatagtagattcaaaggagtatactgtaaaggatagaacagctgcatcgaggaagataggtagaatatcaaagcagatagaagaatgtagagagtatgatgaagtagtagcccatttagcaaatgataaaatatctattgatttagatgatggggttaaggttaactatgctaaattccaaggagcaaaggttattaattctaagggtaaagaagtaaagatggatttattagcaaagatataaaagatatgctcctatgtaaatcatagtggtatatcaaatggtagataaaataaaagatatagcatatagctatggggataacataattcatccagatgtaaaaaattgatatgtgcttttttaatagaaagaagaaatattagaaaagtataatttagaaaaatatgatgcatttgaacttttaaaaaagagcgatggaaaactgcctatagatagtttagaatttatagatccaatatttttagatgaaactaatatttaaagagagctttatatagcaggcgttagatataattaactatttgtggagtcataagaagaaaatacaaagagaacattgacaagcaatgtaaaacatggtatatttatagtaggaactaggtaaatgtttatagcatatggagagtttaactagttactataacaaggcgtaaagccgtaaagtatcccctatgttcgtatgagcatgggggtatcttttttatattctaatatttataagctttatggcgaaataaattgcatttaaataaaatacatttcataaggtggggtttcaatgaagaatgaaattaattatgctttggggttagatattggtattacttctgttggatggtcagttattaatttagatgtaaatcgaattgaggatttaggagttagaatttttaatgctgcggaaaatcctaaagatggggcatcattggcattgccaagaagaacggctaggggaagaagacgtttacttagaagaaaagcctatagaataaacagagtaaaaaatcttatattagaaagagaaattttaagcaaggatgaattggatactctttttacaaataaagaagttataagtgtatgggaagcaagaataaaaggattggatcagcaactatcagggaaagaatggtcaaaaatattaatcaatttatgtaagagaagaggatttaagtctaatagaaaaaatgagtcaaaggataaagaagcaggacaaattataagcagcataaataataatattgaaaaaatgaaagaggcaaatgcaagaactgttggagaatttatctataatgaagttatgaactcagaagataaatatagaccactacgtaataaatttggtgagtacaatatgtgtgtttcaagaaatatgattagggaagaaatacatatgttatttgaaaagcaaagagaatttggaagtgaatttgctacagatgaaatagaagatgattatttaaatatatttaattctcagagaccttatgcaaactttgaagatttagaaaagttagtaggattttgtacatttgagaagaaaaaatataaacgggcacccaaaaattgtatttcagcagaggagtttgttttatacgaaaatttaaataaactttcaattattaaaaatggtgatggaagaaagcttacccaagaggagagaattttaattgcagatgaagcttttaaaaagaaagaaataaaatacacccatttaagaactttattaaacttaaaggaagaggagcttttttcaactttaacctatagtattgataaagacaaatctaaaactgaaaatacaaaatttatttcattaaaaggttatcatgaaataagaaagtctatagaacatggtgttagcaaagagtattgggaagaaattaaaactaatagaaaaatgttaaatgatatagcttatgttttgactttaggaaagacagatgaagatattaaaaggcagctaaaacttagaaacatttcgaatgaaaaagttatacaatcacttttagacatttcttttagcaaattcaataatttatctatagaagctatagataaaatattaccttttatgaaaaagggatatcaatataatgaagcttgcgaaatggcagggtatgattttaaagcaatatataaaggagttaggtctaaaaagctaccagtgattgaaatagatgaaatagtaaatcctgtagttaacagagcattggctcaaaccagaaaagttattaattcagttattgaaagatatggatctccagtaagaataaatattgaacttgctagagatttagcaaaaaactttaaagataggaaagctattgagaaagagcaaaaggaaaatagaaataatgtaaataaaataagagaagaaattaagagcttaatgggaaaagagccaacaggaagtgaaattctaaaatatagattatgggaacagcaaaaaggagaatgtgcgtatacccagcggcctatatatatagaaaagctatttgggtatggagattgcgagatagatcatataataccatttagtagatcttttgataatagtctatctaataaagtattagtattaggagtagaaaatcaaagaaaaggtaatagaacaccttatgaatattttggagaggatgaggaaagatggaataggtttcagacatgggttaatggaagtcatttaaattataagaaaaaagttaacttgttaaagaaaaagtttacccaagaggaacagaatcaatggaaagctaggaacctacaagatacaaaatatatatgtaaatatatagctaattatataaataatagattagaatttaaagaaagtgattcaaagcaaaaggttattactgttaatggaagtgcaacagcgtacttaagaggaaaatggggattgagtaaaattagggaagatggtgataaacatcatgctttagatgcaactgtagttgcagttaccacacaaagtatgatacaaaaaatatcgagatataataaagctcatgaattaagatatattagagccaatgaagattttgttgatgtagaaacaggggaagcagtagaattacaaaagtatagagatgagttaaaggagattcttccaagaccatggaggggatttagtgaagagcttatgatgaggctaagtgaaaacccaattggtaaacttcaaaaatctccaattgaaagttatgatcttgattttatccaaaatacagtaaaaccaatatttatttcaagagtcccttttagaaaaattgggggaaaattatttggagaaactatttattctagcaagggctttaagggagaatactttgttaagaaaaagaacttagatgagctgaagaaagaagatttaaataatttctataattataattgtgataaaagattatatgatgcaattatagataggatggaaaaattcgattataatgcaaaaaaagcttttgagagtgaatttagaaagccaacgaagagtggagagaaaggtcctattgtaagaagtgtaaaaataaagaccaaagtgccttttaaaaatggaatagaattagaaaatgttaaaggtttggttgctaaagatggtatagtaagaatagatatttatgaaaaagaagaaaaatactttgcagttccagtatatagatatcaattagcacaaagaattattcctaaaaaagcagcactagccaagaaatcagaagaagaatggccaataatggatgaaagttataaatttaaattttcaatttataaaaatgatttaatagaaataagatacaaaactaaaggtggatattttggatattttgatggttttgatataaactctgcaggaataaccattgaaaatcatgacggctccgaaagatatagggggataggaataaagtcaggtgttttggaatttaacaaatatgaggtagatgtattaggaaaatattataaggttaaagtaggtgataggagttgagctttagaagtgtaatcatttcaaattcagctaatttaactcttaaaaacaataatctgattattaataatgacaacgaatttcaaattcccatagaggatatatctattttagttatagagggaatatctgttaggttaactaatagattattgaataaattggctgaaaataatgttgcaaccataatttgtgatgaaattcatttgccgtcatccatattaatacctttaaattcacattatagatcttataaggtattaaaacagcaattagatcaaagtgctgcttttaataaaagaatatggcagaatataataagacaaaaattatataaccaaggtaaatgcctagatattttggggttaaatggaggagattttttagataaattatcaaatacagttgaaagtggagataaaggaaacaaggaagctataggtgcaaaatattattttaaaagtttgtttggtgaaaattttacacgaaatactggaaatgggattaatgcagcattggattatggatatgcaattatgagaagtgctgtagctagggcacttgttatgtatggatttaacactgcattaggagtaaatcattgtaatgaattaaattcttttaatcttgcagatgatttcatggaaccacttagacctatagtagatttatgggtttatagtaatataaattatgattgtgaattaactaaagatgatagaatagctttagttgatttaatcaatagtgaatgcattattgagaaacaaaaccactctattttaaatgctatagataagatgattgcttcttatacaacggcttgcagcaaaaaagattttagattattaaaattgcctacaataaaacagttggaatatcattattatgagtaggagatttatgagattattagtatttttcgatttgcctgttgtagagaagaaagatagaaaagaatatcaaaactttagaagatttttattgaatgatgggtacataatgattcaatattcagtttatgctagaatttgcaatggaatagatggagctaataagcatatagcaagattaaaaaaaaatttacccccaaaaggttctgttaggtatttacaaattacagaaaagcaatattgtgagatggaatttttagtaggtgcaccaaaagcacaagaaaaaattataaattcaagccaactaaatgttttttgaagagataaagccccttgaaatctagttatttcaaggggctttacagcacctattatagcatatggagaatttactaggaactataactatagaactttacaaatggataacatcccaattatagcatatggagaatttactaggaactataactctggcaacaacttctttatcaaaaccattattatagcatatggagaatttactaggaactataactcaagttgcttcttctgttccgtatttttaattatagcatatggagaatttactaggaactataacctgaaaccacgtactatgcggattatggcgtattatagcatatggagaatttactaggaactataaccaattacttcgccatctcgaatacttttttattatagcatatggagaatttactaggaactataactatataccattaactatggcaggcaaacaaattatagcatatggagaatttactaggaactataacagaatgtcacatatattgttgtcactccatattatagcatatggagaatttactaggaactataacctcggcaactgttttaaagttaattgtcttattatagcatatggagaatttactaggaactataacaccgcaggcattgtatagaatttcagtgttattatagcatatggagaatttactaggaactataacgcattgtcatgtttcgtttcatctgttatattatagcatatggagaatttactagggactataactgtcttggtagtccatgtcctattcctttattatagcatatggagaatttagggcatctacctattcatttccctacaaaattagaaaactaatttgaacttaatttatataaaaatattaaaaattatttactggatttcaatataattaagaattatttctatttattgtaacaaaaaatatctagtttatattttataatgatatactataatatacatataataaaaataaatatttatttacgatttaatcaatactttaatttagaatttaattttactataaagtcattaaagaggtgtacttatgaatttacaagaaataaggaattttctaaaagaattattttcaaagccattaaacgatggaaagaagcgccatattgtattttggtatgacagtaatgaagatttcgctgaagatatagatgaatttgatatagaaaatgttaaggttattaagttaacagataaaaatgctttttgggctaagtactatatagaaaaagaagatacaacaagtaatatacttgtatattcaaatatggaaaagccaataccttctgaagattggctttatgatattttttgctacagtgaggaattctctacagatagagcaacagtaattatgagagaattgaaggttatggatgtttcacttaaagaggaatttaaactttataatactttctttaagaataaggaaagaatagcagattttaagaatttgaatatacaacattatactagagaaaaggttcacataggagttttagcagttttaaccaaggttaaaattatggatatagaagaaatattaaaagctgtattaaaagaatacctagatggtggcaatacaatatatgaagatataaagaagtttggtgatttaggttcattttggaatttaatcgttaagtattatggatatagatttgaggagaagagcttagaaagatttatggctatgcttttagtgactaatatgaatgaaacaattaagttccagttaccaaagcaatatgcaacttttatatccactaaagtgactaattgcatagtatttataaaccactttatgaataatgttaaagatggagaatactacgacaaaatgcagaggcttgtaggaaataaactaaagatagataaactattagaaaagaatgattcagagacttttattaactgcgatgtttttgaagaaatagataaaacagtacttaaaagaattatttctcttttaaaggatgaattagaagaatacagtaagtatttaaatcttatcaatacaagaagaactatgcatttttataaaaagtatggaaatgaatataaagcggtaaaatgggctataaatctattaggcaagaataaagagttaaatttaaacataaagactgaatcatcttatgatatgtttaaatcttatgttaaggattattactcaatagataaagcctatagaaaattctattattactttgataaatgtatggataaagatcagttaaattatttaaaagaaagaatagaaaatgtgtataataattggtatttacaagagttatctattaaatggtttaacgtattagaaaaggaaacctcttggagaattaatggattaaaatatcaagataatttctataaggaatatgttaagtttgaaaaagaaagagtttttgtaataatatctgatggattaagatatgaaagtgcagaagaactagctagcaaacttacaaatgaaagaaaaggaaaggtagaaattgaatcaattcaaggggtattaccttcctatacaaaactaggtatggcttctttacttcccaataaaagtatagaaattaatgataaatatgatgtagtggtgaatggaattagcacaaatggaactgaaaacagaaacactatattaaggatggagaatcctaactctttagcaattacttacgataaggttatggatatgaaagatgctgaaataagaaagacctttatagggcttgatgtagtgtatatttatcataatgctatagatgctagaggagatcatgcatctacggaaagggaagtgtttgaagctacagaacttgcatttaatgaaattattaccctagtaaacaaattggtaaatagagtaagtgcagcaagtataataattacagcagaccatggatacctttataagagaaatgttatggagaaaagtgataaaatatttggtgttaacttagatgatggtgaagatagcagaagatttatattaacccataataatgatgaagtagagggtacagtattgtttagtatggattacttattaggcgaaggttctaataaaagtgttattacaccgagaggagcttctaggtttaaagtacagggtgcaggttctaactatgttcatggcggagcaatgctgcaagaggttgtagttccagtaattaagtttaaaaatgatagaagtacatcatcagcaaatggtataagaaaggctaatatatcattaacaagcgtaacaagaaaaataacaaatattataacataccttgagtttttccaagaagaaaaaattcaagacaaagttatagtacaaagggttaaatgttattttgaggatgaagcaagaaatagaatatctaatgagaatattataattggagattctggatcagaaaatccattagaaagaacatatagagaaaagtttgttctaaagagtatggcttacgataagacaaagcagtatttcttagtaatgcaagataataacaattcaaatggtatgtatgagagaataccatttaccattgatattgctgtagtagatgaatttggattttgaagatagtagttagtgaatggttaaaaaaaagtaaaaaaactaattactattcattggcaacattaatactaataaaattttcaattagaaaagaagggttatttatatttaaggaagtaagaagaaaagatagagaactaaatattgcaaaagcaatagaagtaagatacaatcctccttcagcagaggaatatatttctttgagactgaaaactggaatgggaacaaaggacctgtctaaagcagagattgccttaaaaaattcattgtttattgtttctttgtgggacaaaggcaaattgattggatttggaagaattgttggggatcaaggtataacttatgtggtttctgatattatggtagacccaggttaccagcgcaaaggcatagggaaaatgattatgaaagaaattgatttttatttagagaagaacaccgatcagtatgcatatgtgtgtttaattgccaataaacctgcagacaaactctattcccaatttggttttgaatatgtagatccaaagtcatgtggtatgaagagaaagcaaagtaaagtaaataaatccttataaaaggattattatttcattgaaatatggaggggataaacaaatatgaaaacacttatagtttatagatctaaacatggctgtgtagaaaaatgcagcaaagagttagcagataggctttctggagaggctgtaactgtagatttgaaaaaagagaaagtaccggatttaagaagatttgataatattattattggaggatcaatttacgcagggagaattcaaaaagaagtaacggatttttggttaaaaaatatcaatgaattaagagagaaaaaaattggattatttgtatgcggtatgagagacgaagaaagtggaaaaacacaactagataattcttttcctgaagaattgttatctaaggctgttgctaaagggtattttggaggagaagtaactttcagcaagatgaatttttttgagaggtttataattaaaatagtaactaaaaatgataaagatgtatcaaatatattaagtgagaatattataaaatttgcacaagcaatgaatggttaacttaatatagatgctatttcaggtgctatagttacaaaagattgctgaaataaaacattaatattagtatggataaaataaaaatagcagtaaccatttgtatacggtgctgctatttttaaaattacttactaagaatctctattccatcttctgttactaaaatggtatgctcccattgtgaagaaagggaaccatcagttgttagcactgtccaatcattatccttatctataaatattttatatgaacctgaatttatcataggctctattgtaaataccataccaggtgccaataccataccttctccttttttgccaacgtgaggtacaaaaggatcttcatgaaattcaactccaacaccatggccaccaaaatcccttacaacagagaagccgtttttttctgccagttcttggactactgctcctatatcacctagaaatccccaaggttttactgcttctacaccttttaataagcattcccttgaaacctctactaatttttttgcttcttcactggcttctccaattataaacattcttgaagcatcggaataatagccatttaatatagtggatgcatctatatttattatgtcaccatttttaagaattctattttcactaggaataccatggcatacctcattatttattgaggtgcatacgcttttgggatatccctcaaagttaagagttgctggaattgccccttgagatatagtaaaatcatgaactaatctatctatttcctcagtgctcataccttcttttatatttgctgcaactaaatctagtacagcattattgacttcaccgctttttcttataccttcaatttgttctttagtttttataatttttcttgatggaacttcaaatccctgttctgctaaaatatttaattttttgtcaaattcaagatgacattttttatactttaatccacttccacaccaacacaaatcatttctacttaaattcatatcaacatctcctaatagtattataatttatatcaccaaaacttatattaccatatttatctgataaatgcacatgattatggtcatttcattggaatggattagagtatatttaaggaagaattaatgtatttaataaattaaaggatttataataatagtataggcttatattaaaaaaagttggaggagtgtatatgataattacaactacaaatgcaattgaaggaagaagagtacttgaatataagggtatagcttttggagaagtgatttcaggagtgaattttataaaggattttgctgctggattaactaacttctttggggggcgttcggggtcttatgaaggagaattaattgaagccagagaaaatgctctaagggagcttgaaaatagagccatatccatgggagccaatgcagttattggagttagtatggattatgaagttttagggcaaggtggaaatatgttgatggttacagcttccggcactgcagtagttatagattaaaattatatataacaataagaaagggcctatttcaaaatgattttttaaataagttttgagatagctcttttacatgaaggaaacggaagcaatgcctataaaatttagggaggaaaattatgaaatatgcaattattggagtagtattaattggggttttaacaattttaagtagtattcatacattacaagataatgtgtcacatatgaattcaattttaaataaaattgctaaacaggttggagtaccaggactagatatagatagtgaattacgagctcttgttgcagaaggtaaaaaggttcaggcagttaaaaaggtaagaatggttttagggctttcattattagaagcaaaggaatatgtggattctttgtagaatatcaaaattgactctaaggagatataaaaagtatgaataataagaataaaataaaattaactaaagaaaaaagagcagagatgatttcctccataaaaagttattttttaaatgaaagggaagaagaattaggtgaattggctgcaagtttaattttagattttattatagaagaattagcaccagaattttataatcaaggtgtatatgattcctatgcatatatgagtgatagacttgaagatgtattatcaattcaaaaatattaaacattaagtaataaaaggggagaaaacatggaaaagttatatggactcttaggtgaaaagttaacacatagctattcaccaataatacataatatcatatttaaaaatatagatacaaaggctcattatcatctttttgaaatagaaggaaataatcttaaaaatgttatggaaagtcttaaaacattaagtattcaaggagtaaatgtaactataccctataaaattgaaataatgaagtatttagatggggtagctagtgaggcagaaaagattggggcagtaaatactatatgtataaatgacaataaggcagtgggttataatactgattattatggatttggtatgatgctaaataagtttcatatttctgtaaaggatagacaggccataatactaggaactggtggtgctgccaaggctgtatttcactatcttgtagataaaggaataaaggaaataacttttgtaagcagagataataataagaaaaataattttagtaaggatataaatataattagttatgaacaattgaaaggtatcaaaaataataatattttaattaactgtactccagttggtatgagtcccaaagtaaatgaatcacctatctctaaaaatgacatgacaaattctgaaacaataatagatctaatatataatcctaaggaaacgctgctgcttaggcaggctaaagaacttaagttacagggagtaaatggattgtatatgttagttgctcaggcagtaaaagctgaagaattgtggaatgatattatagtttctagtgatgttatagataatatttataatgaagtaaatacatatacccaatatttataaaagagaaaaccattaaaataagcttcgatttccatcataatacctcttatttattaaaataatcttgaaagtattgttccactttaatgaaaatattattctatattaatttttggaggttaactgataaatagagaatatataatgcattttggcaattaatagtgtatactaatataagaataaaacatgaaggttttggaggcgatgtattattaataataatgttatgttaaatgaagaaattagagtaaaggaaattaggctggtaggagaagacgaacccagaataatgagtactaaggatgctttgaatatggccattgaaaggaatttagacttagtgatgatttcccctgcggctaatccacctgtatgtaagattatggactataataagttcctttatgagcaaactagaaagcaaaaagaaaataaaaagaatcaaaaggttgttgatattaaagaagtaagattgagtgctactattgaggaacatgatatagaggttaaggctaataatgctaaaaagtttttagcaaatgaaaataaggttaaagtttctatcagattcagagggagacaaaataactatactaatgtaggaaataaaatatttgatttatttctttctaaaataggagatttaggaatagttgaaaagccagcaagattagaaggtaataatatgattatggttttgggacccaaaaaataacatagttaatataaagaggtagattgatgaatctatctcttttttagactaaataaggaactacactgatttgtctttacaaatgggataagaattggtagaatatatttgtagaccaaaattgtactacaattttgacctacaaatgtggcaaaaaggagatggaaaatatgaaaaagaaaattaaggaatgtgtattaataaatttagggctgcttttagttgctcttccaatatatcttatattagttcctaatcgtcttgcaccaggcggcataagcggtcttgccattgtggtgaataattttttacctaatatacctgttggtgttttaatgatgacttcggatatgattttattt

SEQ ID NO: 920 - DNA, 23201 bp, synthetic construct
  misc_feature 1..23201: note = Synthetic
  source 1..23201: mol_type = other DNA
tcttagaaaaacaatgaataaaaagaatgaaaaatttgttaaaaaattaaaagaaagcacaataatgaacggttgaggtaattaaatatgagaaatatatttagaatttacaaaagagatatagttacaatagcaactaattgggcagcgttaatcatgattatagtgcttataatagtaccttccttatattcattaataaatataaaagcatcatgggatccatatggagctacaaagggaattaaaatagctataatcaatgaagataaaggaactgtatttaaagagaaagatataaatttaggtgaagagttaatagaaaaattagaagacaatgataaaatgggttggtcatttgttgataaagaaactggaaagaaaggtttgctagaagaaaaatactatgcaactattgaaattccagaaagtttttctaaagatcttactacattagttgaaaaagaagttgaaaagcctaaattaatatatacagtaaatgaaaagaaaaataccatagctcctaaaatgactgatgcaggggtaaaaacattaaaaggacaactagatgataatataactagaactgtaacaggggctatgtttagagcttgtaatgaagttggcatagatatacaaaataatagagaacatcttagaagaataatagatggtgtatatgaattagatgaaaatatgcctgaaataaaagaattattggatgattctatagaggggacggtaaatgcttcagaattaataaaaaaatctgaagaaatgatacctgtagtttatgatagtatagatgcaactaaagaacttatagataatagccaatattatttagaggaaatagaaggaaatctttctgacttatctccattaatagaagaagaacttataaatggtgaaagctcattagatgctttaggagtaactttaggcaattttgatgaaaaagtattacctgatgttgcaagaaaaacttttatagctttatctgattcagcaaatgatttgaaaaagatagtaaaaactgcgaagtatgatttaaaaactataaaatctcatatagataagataagtaacatagaaataaaacttaaggaaaatgaagaacctgaaggtgaagatccacagaaaagtaaaaaagataataaagaattaaaatatttacagggtatacaaaaagatttgaaaagtgtaagtagaaaaatttcagatgttattgataaattagatttaatttatgacagacttgatgtggttattgatagatcaaaagaagaaatagaaaaaatagatactgatggagtaaatattcaagctttaactgatacgagaaaaatattagatgacattcattcattagtagcaaatttagtagataattatgattcagaacttgtaccagttattgaggatggatttaaatcaattagagaaatatctgatagtggattaatattattagagcaaggaaaaggaatattaccagatgtagaaaatttattaggagattttactgaaataactaatttatctaatgagcaattagtaaaattacaagataaatttccggatatacaagataaagtacacaaattagcacataaacttaaagctgtagatgaaaaagatcaaatagatgaattattagatatgataactaatgattgggactctcaaagtgtattcatgacaagtcctgttgaaattgaggataatagattgttcccatggccaaattatggatcaacagctacgcctttttatacagtattgtgtttatgggttggagggttattatcatctgcattattatcattagaagtacatgaatttgaagagggcactgtaattaagccttatcaaatgtatttaggaaaattattaacgtttttaactcttgcaatatgtcaagcattagttgcaagtttaggagcattatttatattaggatcttatacattgcatccagtaatgtatgtactctattcggtatttgttagcattgtatttatgactatgatatatactgctggaagcttactagatgatgtaggaaaagctattatagtatttatattagtgcttcaaattgcaggaacaagtggtaatttcccaatagaagttactcctgtattattccaaaaaatatatccgtatctaccatttacttatgctataaatggaatgaggcaaataatggctggaatagtatatcctatattaattaaagatactgttatattaagcttttatatgataggtgctttagtattaggattgtgtttaaaaggcattcttaataaaaccactggtaaattaatggccaaattgggcgagagtggtatattaagacattaaaattaattattaagagatgaaattatagttattattgtttcatctcttatttttatgtgttaaattataaatgaaagatgaaaagaaataaagaaataaagaaataaagaaataaagaaataatatttctgtaattaaagaaaacgtttatattaattaagagcattttaagtttaaataagtatagattcaagaatagtaaaaatatgacgattatttaaatatcaacaaaaaaagttatatatgtaaaaaataacaaaaaattatgtacatttacagtataatacagtaaaattgatattaaaggtgattttttatggataattatagaagaaagataaacattatatcgatagatggaaaaaatatattgaaaatttgtttagctacattagtagtctattttttagttaacttaatttttaaatggaaatttgatcaggtcattacagcttttagaatttattatttagttggaatgatcatatttagcattttatcaaagcaagtatttcacttgtataatcataataaatacaattatatatatatgtacatatattgtcttgcttatgtaattttatttggacatagtatccaatttgcaccagataataattatagtgccgaaatacttactaattttattatattatttgaattatattttggatttaaaactatagaatataaccataaaacagaagagaaaagatatattatatacattgttttaaaaattttttgtattttaattttaactttatattatagaatatataatattgtatcaattatatcatttttaagttgtattgaatgttttttaatatataaaattttcattaataacgactcaaaatcatataatccatttaacataaatacttatttggtactagtagcattaattccaatagctagtttttttagtttattaatgtatccattaaatgggggaatgcttaggtttagagaactattaattttaagtgtatttaatatatttttcagtatgttttttaaaaactttatgcgaaacccttacaaagagttggcagaatcattaaataaaaaaaataaaatattagatgaattatctgaggatatatttataaaaaataaggaattagaaacatctatactaaatttaaaaaacaaagaatatctatatgaaacattttttagatttatgcctcatccaataattttaattagtttggagaataatagaatattatttgcaaacaaggcattcttaaatttagttgatgtaagaaatgttagagatgttataaataagaaaataaatacatacatacattttgttaaatctagcagtgatacagatctaacttttaatgctattttaagttctaaaactgaggaaagatttgttaatgctaaatttttatccatgtataaggataagatggaagatttaattttaatagaagataatacatctaaagtattaacagaagagataaaaaaagaagttgagagtagaatggtagaagagagaataagaacagaatttttatctagtataagtcatgatttaaagacacctataaatgttatatattcatctatacaagttcaacgaatatatactaataaaaatgatattaaatcattagaaaaatataactctatatctaaaatgaactgcatatcacttattaaattaactaataacttaattgatatgtcaaaaataaattctaactttttaatgcctaatttagaggaaatcaatgtagttgaaacaactgaagatatagttacatctcttgtagattatgcacaaaacaatagtatagaaataatatttaatactaatacagaggaaagttatttaaatttagattatgaatttttacaaagaataattttaaatttaatatctaactcaataaaatttactccagttggaggaaaaataataattgatatattagatgaagaagataaagtgaaaatatctataatggataacggttcaggaatgactgaagattttataaaagatgctttctgcaaatattcaatggataaatactctagaaaaaccaaaaaagggacaggtataggattatttgttgttaaaaaattagttgaactacagtcaggtacaattgaaataaaaagtaaacttgatgaaggtacaaaaataacaataatatttccaaaggagaagttaggtgaatagtatgcaagaagatttaaatttatccagtttaaaagtaggggaaaaaattaaatttttatctattgaatttataatatacttaatatataatatgtagttgtatattagtaaacaatataaattatatttattagttaatacattaatatatttatcgattgtattagcaatttgttatatatgtttaattaaagaaaatgcaataaaaaatttgtttattgaatatatatcatttgaacttcttttagtagcagcaattttgtcattaaaattatcagggctaattttaacgtttgacattgcttcaagtgataaatatctatgtttaggggttctgatatattattttgaaataatattacaatgtttaggtttttattttgttaataaaaaagaagagataaaaagaacaataccaatttttttaggtatatttgttattatgtttatactaatgagttctaatatttataagtatatatatataaatacaaaaatattaactatattttctgtagtaagtataattgtggttagttataccattttatatatgataaaagctttagtaaattataaaagcgttacaagtgaagattttattgaaaatttaaaattatatgtaattataaggtatttaacttatataactagtacaattttaattaatagcaataagttaattatagtagctggagcattaaaattgttagccttttatatattatttaagggtatagtaaattatatgattaatgatccaatgagaactatgaaagtaaatttagaaagaactcatgaagtgaatttagagttgcatagaacattgaaaaaacgtaatcgtatattaaatgatactaatataatgatagaaaaaagtgaaagtaattataataaattgatagattcagtatatgatggtgtacttttattttcaaagaataaattacaatatataaataaagcaggattaaaattattaaatgatgtaaataaagaaaatattataggaattagtttagaaaaatttatattagataattttaattttaaattacagcctaacaatgaaaatgaaacatgtataagtgatcttaaattaaataatgcagatatgatggtaactctgtttataatagatatagatgaaaataataagctgttatatgcccatgatgtaacggatctaaacaaaactaaagatatgaaaaataaattagaaaagtacttaaaagaagaagaattaaaaaaggagtttttctctaatatttcacatgaattacgtactcctataaatttaatatattcagcaatacagcttaatgaaatttatttaaaacaaaaaaaagttgataatataagtaaaaacaatgaaataataaggcaaaattctttaagattaataagaactataaataactttatagacacaaatagagtatcagaaggatatctaaaaccggatttgaaaatttataatattgttgaagtggttgaaaatataactattgcatgtaataaatatatagacagagctgaaataggtttaacatttgattcggaaaaagaagagatattagtaagatgtgataaagatatgattgaaagaattatattaaatattatgtcaaactctgttaaatacggacaaaaaggtagccatataaatgtgactataagtgtagaagaaatgaatttagttacaataaaaattgaaaataacggtaatagaattgaggaagatacaataccacatatatttgataaattcacacgaattaataaatcttttaataggcctaaagaaggcagtggtttaggcctattcttaagcaaatcattaacagaattacaagggggagagcttgctttagaactagatgaaaaagaaaatttatttatgataaactttcctatcgcatgtgatgttagctattcagatataaagtgtgatttagaaattaatgatatagaagaaaaagtagatatagaattttcagatatatatatggactagtggagagtgtttttgattatggttatgttttaataaagcattgtgatatgtgtataataaaatagttgagaattaagaatgaaaaatggagagttaaggaaaaacttacttcaagagattttaaaactatattgttaaaaagtattaaagaatatcattctaaattatcaactctccactaaaaagagtggtgtagcatcaattaaacataattttaagaaaatcaacatataaattaaataaaacataagtattattttttgaatttatggagtgttgatatgagagaagaaaaaaagagaactaaaaaaatattttttataccacttataatatcagtaggattaccattacttatagcttggcttataaattctacaatgccttatacaggagagttatacaatagcttaaataaaccattttttgctccaccagcaagtgtatttcctattgtttggaccattttatatatattaatgggaatagcttgttacagagtatatatacttaaatatagaggtattgatacaagctcagcaatatttacgtattctatacagctattattaaattttttatggacatttatattctttggattaagattatatggaatagcttttattgaattattaataatattattttttgcagttttaacattcattaaattttataataaagataaaattgcaggattgttgtttattccatatttactttggcttacttatgcaggagtattaaatttctatgtatggatgttaaatgaaatgtagatttttctaataggattagaaagatgctaaaaaataaggttagttgctgcagacgggaatgcagtaagctagccttatttttgttttaatgttaatatatatgttggtaaaagataataaatagagtagtgattttaaggaggtaaggcatggcaaaggtaattattgcagaaaaaccttctgttgcaaaaaatattgcagatgcgttaaatataaaaactagaaaagatggttattttaaaggtgaagagtactatatcacttgggcctttggtcatcttttacaattatatgatgcaaaagattatgatgaaaatatgaaggggtggagaatggagaagtttccatttattcctgaatcttttcagtataaagtaaagtgtgataatattgatagaacagttgaagataaaggcgctgcaaaacaaattaacataataaagtccttaatagagcaagaagatgtagatggagttatatctgctacggattttgatagagaagggcaagtaattgcagatgaattatttaattatttaaatattcaaaagccaatatacagattattgttaaatgaatggactccagatgaagtaaaaaaagggatggggagtttaaaagaaaataaagaaatgcaatttttgcaagatgcaggaataggcaggcaatggacagattggattattggaataaatttaacttctgttagtacattgaaatataaatttgaagaaaacaaaactattaacataggtagagtattattaccaacgttaaagataatatatgacagagataaagaaatagagaattttgaagctactacttactataaattaacttctacatttaaaaattcaagtaatgaagaatttgatgggttatattatgaaaaagaatcagaaaagtttgaagataaaagtgttttagataatttagttaagctattagaaggaactaatgcaactataatagataaacaaactgaaaaaaagaaagattatccaccatatcttttcaacttatctaatttacaaggatatataacaagtaagtataaaggatggacatcagataaagtattaaaggttgcacaaagcctttatgaaaagaagtatacaacttatcctagaactgcaagtgtggtcttagaagagagcttagaggacagagcaaggaaagttttaaatacattaaagacaggattaccttacgaaaaagatattaaatttgtaaaaactaaaagagtatttgataactcaaaggttgaaagccatagtgcaataacaccaacatatattaagccaaatggacttagtaaagacgaagaaattgtttataatgctattaaaaatagatttataatgcagtttatgcctattgcagagtttgaagaaacaaagataagattaaaaccatctaatgaggaaatacaaggagaatttatatcaaaaggaaaagttcaacttgtagagggatggagagtagttgaaaaaatagatactaaagatacaatacttcctatggttaatgtagatgaaaaagttgatatagtatcaaataaagtaaataaggtaactaaaaaaccaccaaagcatcatacagaaaaaacattacttagagttatggaaacttgcggtaaggggatagaaggaaaagaagattctgaagagatgatgcaatctatattaaatggatttagtataggaactccagcaactagagcagaaactatcaaaaaacttaaagatattggatacataggaactaaaggaaaaagtcttatatgcacgcaattaggcataaatatagttgaaatatttccagtgcaagaactcttagaccttgagtatacaggaaggcttgaaagtacattatctgatatagaaaagggcaaatttaaaaagtctgattttatgagtttgatatatgattttacgaataatgctgttgataaaatcaagaaggatacatcagctttatctaaatttaaggttgagcttccagaaggtgcagaggaaattggaaaatgccctgtatgtggaaattcagtcattgaaaatgaaaaaaactttggatgtacaaattggaaaaatggatgcaaatatacaatctggaaagatgataaatatatatcatcctttgggaaaaaagtttctaaagaaatggttgctttattacttaagaatggaaaagtaggatttagaaatttaaagagtaaaaaaggaaataccttttcagcatattttagatatgaaaaaaatgagaagacaggatattttaattggatgatagaatttatttaagttggcctacaagtaagcataaaatgaaagttagtatttagaataggatgttaaaggaaaaaactcctttatggaattttgaatttgtattgtgtaaaatcattaaaaatacaaatgttaattgacataatatataaaaaatggtaatctaataataggaactaggtaaaatgtttttatagcatatcgagagtttaactagttactataacaaggcaataagccgtaaagtatcccctatgttcttaggaatataggggtatctttttatcattttttaaattggaaataagaggaaagatggagttatatgagaaaacaaatagattatgcattaggattagatattggaataacatcagtaggttggtcaattattaatttaaataaaaatagaatagaggatttaggagttaggatatttaatgcagcagaaagtcctaaagatggttcttctttagcctttccaagaagaatagctagaggaagaaggcgtttattaagaagaaaagcttatagagttacaagagttaaacgcttaatagtaaaagaaaatatattatctaaggatgaacttaataatttatttatgaataaaaaagttattggggtttgggatgcaagagtaaaggctttagatgaagaagttagtagagaagaatgggctaaaatattaattaatttttgtaaaagaagaggttttagatctaatagaaaaaatgacagcaaagataaagaagctggtttaatattagaaagcataaaaagaaataaagaaaagatggagcaatctaattatagaactataggtgaattaatttataatgaaactaaaaattcagaggatgattatactccattaagaaataaatttggtgagtataaaagatgtgtttctagagatatgattcgcaatgaaatatatgttttgtttgataaacaaagagaatttggtaataaatttgcaactgaggatatagaagctgaatacataaaaatattcaattctcaaagaccgttttctaaatttgaagatttagaaaaaatggttggaaattgcacttttgaaaagaatgaaaaaagggctccgaaaaactctatatcagcggaagaatttatgttatacgacaatatgaatagattatttatagttaataatggtgataagcgtaaattaagtgaagatgaaagaagaattatagtaaatgaagcctttaacaaaaaagagataaagtattctaatttaagaaagttacttaatttaagtgatgaagattatttttcaacattaagttatagtactttgaaatctgataaatcaaaaactgagaatactaggtttatagctttaaagggatactatgaaattaaaaaggctgtagaacatggcattagtaaagattattggaaatctataaaggagcatagagcgctattaaataatattatatatgtattatctatagctaaaactgatgatgagataaagcatcaattagcattaaggaatgttcctacagaagtaattgaaacagtatatgatatatcttttagcaaatttaataatttatctataaaggctttagaaaaaatattaccatttgttaaagaggggtatcaatataatgaagcatgtgaaaaagcaggttataattttaaggctgtatatgaaggcgaaaaaagttataagttacctgtaattaaaattgatgagatagttaatcccgtagtaaacagagctttggctcagactagaaaagttataaatgctgttattgatgaatatggttctccagtaagaattaatatagagcttgctagggaattagctaaaaattttaaggatagaaaaactatagaaaaagaacaaaaggaaaatagagacaataaagataaaattaaaaaagaattgtatgatttaatgaataaataccctacaggcagtgaagtattaaagtatagattatggaaagaacaaaattgtcaatgtgcttatacacaacaaggaattagcattgaaaatttatttgctcctggctattgtgaaattgatcatattctaccttttagtagatcttttgatgatagtttaaataataaaatattggtattaggagtagaaaatcaaagaaagggtaatagaactccttatgaatattttggaaataatgaagagagatggcataattttgaaatatgggttaatgggagtaatttaaaatataataagaaaaataatttacttaaaaagaaattttcagaagaagagcaaaaggattttaaagctagaaatttacaagatactaagtatatttgcaagtatatagctggatatattaataataaattaatatttaatgaaaaaagcgaatttactaaaaaacaaaaagttataactgttaatggtagggctacatcttatttaagagcaaagtggggattaattaaagtgagagaaaatggagataagcatcatgcattagatgctactgttgtagctgtaactactcaaggtatggttcaagaaatatctaaatatagcaaggctaatgagcttaaatatattagacaaggtgatgaatttatagatattgaaactggagaaattgttaaacttgaaaattatagatatttattaaaggacagattgcctagaccgtggttaggctttagtgaagaattaaaaatgagattaagtgatgatcctaaaggagaactagaaaaatcaccttttacatcttatgataaagaatttattgaaaatactgtaagacctatttttgtttcaagaatgccttttagaaagattggaggaaagctatttaaagaaactatttattctaataaagcatttaaagatggagcattcattagtaaaaagaacttgattgacttaacattaaaggatatggataatatttataattatgattctgataggaagttatatgatgccattagagaaagattagaaaagtttaatggaaatggaagaaaggcttttgaagaagtatttagaaaaccaacaaagagtgaaaaattgggcccagttgtaagaagtattaaaattaagtcatcaaagataccttttaatgatgggatttctatgaataaaggattagtagcaaaagaaggaatggttagaattgatatttatgagaaggatgaaaagtattatgcagttccagtatatagatatcaaattactaacggtgaaataccaaaaaaagcatcattagcagctaagtcagaaagtgaatggccattaatggacgaaacatataattttaaattttcaatatttaagaatgatttaattgaaattaaatataagaaaaaagaaggttattttggttattatgatagctttaatagggcaaatgcatcattaacaatagaattccatgataactcaaaaacgtatggttctattggatttaaatctggagtaaaagaatttaataaatataatgtagatattttaggaaagtataatagagctaaaaggtaggtgattttttgagttttagaagtataattataactaatccatgtactttagaggttaaaaataataacttagctattaataatgaagatgaatatttgattcctatagaagatatatctgttttagtaattgaaggtgtaggtataaggattacgaatagattattaagtaaattgtcattagaaaatgtagctacaattatttgtgatgagaagcatttaccttcatctatagtaatgcctttgaatgcacattataagacatataaagtattaaaaaatcaattaaatcaaagtgctgcgtttagtaaaagaatatggcaaaacattacaaagcagaaattgtttaatcaaggagagtgtttaaggattttaaatttaaatggatatgaatttttaaataagttatctaaagaagttgaaagtggagacaaaggaaacaaagaagctattggagctaagtattattttaagtgtttatttggtgataactttacaagagatgatggaagtggaattaattctgctttaaattatggatatacaattatgagaagtgctgtggcaagaactttagtaatgtatggttttaatacttctttaggagtacatcattgtaatgaattaaattcttttaacttagcagatgattttatggaaccattaaggcctattgttgatttatgggtatataataatgtgaattatgatgatgaacttactaaagaccatagaatagcattagtgaatttaattaattacgaatgcattattgatgaaaaaagtcactctattttaaatgcaattgataagatgatatcttcatatacaacagcctgcagtaaaaaagactttagactattaaaattacctataataaaaccattggaatatcattattatgagtaggcgatttatgagattacttgtattttttgatttacctgttgttaaaaaagaagatagaaaagaatatcagagctttagaagatttttattaaatgatggatatatgatggttcaatattcagtatattcaagagtttgtaatggaatagatggagccaataaacatatcttaagattaaaaagaaatttaccatcaaaaggttccgttagatatttgcaaattactgaaaaacaatattcagaaatgaaatttttagtaggttcaccaaaaccacaagaaaagtatataaattcaggtcaactaaatgttttttagaaagaacaaaccccttgaaactcacttgtttcaaggggttacatagttccttattatagcatatcgagaatttactaggaactataacattatcaattgctttatcatttaaagcataattatagcatatcgagaatttactaggaactataacaaaagaatttagggagatgatttaatgtatattatagcatatcgagaatttactaggaactataactgtgtgctttaaagataatgaaacttgtgcattatagcatatcgagaatttactaggaactataactcagaccaatgagtatagtcaatagagaaaattatagcatatcgagaatttactaggaactataacaattgttgcaaaggaacattttttaagttaattatagcatatcgagaatttactaggaactataactgggtttagaccgaatagtgaatcgggtggattatagcatatcgagaatttactaggaactataacctaatagatttagctaatatatttatctctattatagcatatcgagaatttactaggaactataaccccaaaacataaatctcctactcttagatgattatagcatatcgagaatttactaggaactataacgagaagttaatattttagttgaaatgtgtgattatagcatatcgagaatttactaggaactataacgtagtaattgctgtaccatttacaagacctattatagcatatcgagaatttactaggaactataacaactgggggcttgcttgggaaggcgtaaaaattatagcatatcgagaatttactaggaactataacatgagtttacaaacaaagttgatgagagctattatagcatatcgagaatttactaggaactataactgaggatgattattttgctgttgaaaatgcattatagcatatcgagaatttactaggaactataacagaagatattcctactagattaactgtttaattatagcatatcgagaatttactaggaactataacgtagtatttatagcattgccctcactatctattatagcatatcgagaatttactaggaactataacctaatagatttagctaatatatttatctctattatagcatatcgagaatttactaggaactataacaatgtagaagttgtaattacaaaccaatgcattatagcatatcgagaatttactaggaactataacacagttagcaatccttgtgcacctgtaataattatagtatggggattattgataaagtcacatttaataagatataatataaatataactatttcaaatgagatattacttgttagaaatttaagtgttaatctcaatcatctactcttaatttatataaagaaactaatattaaagaaaaagtaattataggatattttagagtttcaagtaaaaacaaaaataaatctaaattaaattggattagattatgtgagaagaataaaattcctattgattacaaatatataaatcctcatgctgcttatgatggtgttaattggtttatatgtgtaggaatagaatatcaagataatgaagatatttctagtaataaaggaattgggattgatgtaggcataaaggatttagttatatgttcagataaaaatataaataaattaagaaattagaaaagaaaagacgtaggttacaacgtaaaatattttaataaataagaaaggagaatgttacagaaaaacaagtaacattataaaaagtgaaaaaagactttttataagttttatgtaatggtgtattaaagtgaaagaaaaaatattatatttaaagtactatgatattactgtaggcttattaagcgtagaaaataatataccaaaacaattagagatattaagaccagatttattttttgatagacatacgaaaaatattttatttggtgatgagttaatagattggataaaagatagagtaagaccaaatgcacaggttgggttagacaaaattttaaaatcactaggtatagatgatagtggttccatgtggtattggaagttgtttttaaaaactaaaggaatgaatgtaaaggatagattatggatatcggaaaatgaattcgataatagtccttgggatctattgttaactatagataaagatatacctgaggttgatttatataaggagtatttaaacgtcaataatagttattataatataaaccttataggagcatgtgaaaaatctatagttagagtaaatggtaatctggctatattaaaacattcactgcaacataatacatttgatggaatagcagaagaattatgctatttgatagctcgtacattgggtataaattgtgctgaagctaaatatcttggtaatggattaagtttatcgtttatagatgaaaatatagatttaattcatgcagaagcttttttagatactgatagtagaaatatagaaatattatataaaaagttagttgttaaggatattgataaaagagtacgtattgatttcttaagaatgttcttatttgatatattaacaagacagatggataggaatttaactaattttggattttacaagattaattcatatgttaaattatatagattatatgataatggacttagtttattttcaagtgttagatttaatcctaatttagtatactcatctgtatatggcaattcagatgacatattaaaatatatagtaagacaattaaagaatgaattagtagataaaccttttgcaggaaaattaaaagcagagtttttagaagatatatttaagccatatgcaaatgaaatattagaaattaagggaactgattataaagatataataggatggcttatgaatatgtataatcatattttagatcagttttaattaaaagtagaaaaagagtagctgaaagttgatattgaaaagaggacattatatgaagaattcatttatggaattttgaaattatgattttataaagtcattaatcatttaccttaaacttttgattatccactttcaactaaaaaaagacgttgcaaaattaactttaagttaattttgcaacgtcttttttgttagatggataccatttttataaaatattttttgtaataataatttatattaattattttatgaagttatacataaatattgctaaatgataagctataggagcaataaatactgtcataagtccagcaacacctattgaaagactgctcatagcaccttcagtgtctccaagttctaaagcttttgtagtaccaacagcatgagccgcagttccaattgagattccaattgctactttgtctttaatcttgaatactttacatatagcaggtcctaatatagctcccataattccagtaattataattgcaagtacagttataggaactaatccacctaagttactacttatttcaatacctattggtgttgttacagattttgggattaaagattttattatagtagaatctaatccaacaaaataagagattcccattacagaaaacattcctataatgcttcctaaaaatactccagaaaaaatagctacagcatttttcttaagtaactctatttgattataaagtggtacagctagtacaactgttgaaggtcctaaaaacatatttatgaattgtccaccttcattataagtactaaaatctatattaaatgcgaataagaaacaaattataaaaccaattgctataagtaatggatttaataaagcaactccagtttttttgtttataaatattcctatttcaaatgcaattaaagaaagtactaatccaaataaaatattattaactattatgtccaattatttcacttccctttttttgatcttttgatttttttgatataaattgaacgattaaaccagtagaggctatgattattacagttgtacataagcaaactataagtaattgcaaccaattagactttatgatatttaatgatgtcataagtcccactccagcaggaataaagaagaatgctaaatgatctagtaaaaaatttgatacgtttgagatattatcaactttgattatattagaacataataataagaataatataatcattcctataatattacctggtacaggtaaattaaagaaagatgataaaaactctcctagtagataaataattaaaataattaaagcttctttaaataatttcatcttgtcctccccaaaaaatatattaaattttaaaattttaaaattctaaaatgtaatgtctaaataataagttcaccacctatataatttatcacttgttgcccaataagtaaaaggtatataacgccaaaataataaaagattttcagaaataattctaaaaatcttttattagagtgagtatagtgaatttttctacaaaaaactcgatattattagttaatttgaagatttagacataaaatttaattatttttctaaagatttatttttaattaaacgtttttctaaaaaggctacgatttcatacattataaaagctataacagaaagtatgactatactcatcataaccatatctaattgagcaatttgtccaccatatactattaagaaacctaaaccttcccttgcaactaagaattctcccattattactccaacccatgataatccaacgttaatttttaatgctgatatgaaaacaggaattgagtaaggaaaaattaaatgtcttaagatttgaagtttagatgccctaaaagttttcattagcatgattttgtcactatctatttcattaaatccacttaacacactaataattgtagtaacaatagaaatcaataaagctattacgattattgcagtagtaccatttccaacccagaatataattattggagctaatgcaacttttggaagagcatttaatactaccaaataagggtctaatactttagaagcaaaaggacaccaccataaaattacggcaattgctgttccaagaacagttcctaaggtgaagccaagtattgtttcatagcaagttacccagatgtgacgcaataatgttccatctgcataaaaagatacaagagatttatacattctagatggagtagaagttaggaaaggatcaatccattttaagtcacctgcaatttcccaaagtgctataaaaataactaatattaacattctagtaattacaagctttactttgttgtgtttcaatttttttaaatatatatcatgttctttactcattgcattgatccaactccttccataaatcattgaagtagcctctaaattcaggttcttttcttctttcaaaaggagtaatatcttttttagagaatattatatctacatctttttttacttgtgcaggcctttgggataatacaagtatcctgctagaagtagaaatagcttctgatatatcatgtgttaccattattgcagttttcttttctttttttattattttaaatacatcatcacatactaaaagtcttgattgataatctaaagctgaaaaaggttcatctaaaaatagtatttcaggattaagagctaaggttcttattaaagctactctttgtctcattccacctgataattcgtttgggtaatgttctttaaattttgataatccataggtttcaactaatccattaactctttcaacagcttctttagtaatttgtttttttatttttagtccaattagcaagttgtcccatacatttaaccactcaaataaatggtctttctgaaacatatatcctattttgtttaaattgttttttatatcttcatctttgtataatatagatccagtagaggcttttaataatccacttattatattaagaagagtggatttaccacaaccagatggacctaatattgatataaattcaccatcatttacttcaaaactaatattatttaatgctttagtttcaccctttaatgagtgatagttcatagataaatcagagattttaagcaagctcaaagcaaatcaccaatctactttatttagttgctttttcagcaaaactattgtctactattttgttgaaatcaggctttgatggaattaatgatttatcatactcttgaattatatctatcaacctatctaaattttcttctttaattgaaggatcatgagctaaagcatctattttattgtaattgttaataactcttataattatatctctgtcagttccagggaaaaattgaattattgagtcagctatttcttcaggagtatgagaaaaataccattgttgtcctttatatatagctcttgtgaatttttctattgtttccttattgttatctaagtaagacttagttgagaagaaacaagtataagggataacaccagaattttctccaacagatgctaagatacatccactaccttctttttcaagcattgaagcagtaggttcaaataaagctacataatcaccagtaccacctttgaatgcaccagaagtagcagcaaaatctatatttgttaccatattaacatctactttaggaattatattgttatttttcatagcgtactctaaagccatagcaggaacgccaccaggtcttccaccaataacttcttttccttttaatgtattccaatcaaattttgtttctttatttcttcctactaagaaagaaccatctttttgtgtaagaccagcaaatactacggggtaatcttctcttccttgattgttaatgtaaattacttgctcaggaccacagaagccaatgtcagcattattacttaaaacagcttgcataactttgtcggcaccttgtccagttgctaaatcaatgttaattccttctttatcaaagaaaccctgactaattgcaacatacataggtccatagaaaacagaacgagtaacttcatttaaacgaacagtaacttttgcatcttcaccagcagttttagaagaactcttagaattacaagcaattaaagaagtagccaaagtaagaattacagttaaagaaagtaaaagctttaaactttttttcattaaattgcatctcctataaagtaatgattaggctaaaaattacttaactatttaaactaagtcatttttttattgagcctaaagtctttctgttgtatattatgaaattttatagaaaagagtgttaaattgatgaattatatgtaagagaaaattaatagatactattcattatgtgtggattagattaggattaaagactttaaaagattttagaatgatagaggttgatgaggataatcttattaagattattaatttattgaaagcaacttctggttgtcaaatttgttacacttaattggtagaaacataatgatattgtaagtatactgatataagaggtggttaaatttatagaagttgaaggaattttcttatttttatcatctaatttagtatttgatttctgcttattagataattttataggtattctattttttagatatttagatagataatctttacaatagcttgttaggtttttttatatgtgaaatctatcgctaacttgtattgaatcaggatgagaggttttaatagcgttatgtaatagatccatctcgtgaaaataatttaatattaggatattcacgtagctacgtaactacatcatcatgctttcttgagtcaatcatatcaacgattacatgagttgcaatgtcaaccattactgttccataaatttttctttttctaagtgcaaaagcatcaatacatactttagtaatttgggttttatcaaatattatgctatctttttttaagagagtacatatagtacttttatctatatctacaacattatctctcaaatagttttgagctgctattgaacttatgttcattgcaatttttgttattgtatttgttaagcgaattgtttttttatttttaggatgaaaacaagaaaagctttttgtgaaagtctttcggtaacattcacgatttaaacaaaaatattttttattatttaaaataatttctacttttttatcttgaataggtaaattttgaaaacttcttttatatctagaatgaacttttgaagaatattgtccacaataaggacatttgcatttaatcaaatttgaagcaacattaatataaattgtattgtctataattgcatgatttatataatctaaatttttatctaagaatttaataagcttatccattttgatatcctctttcaagtaaatttatatgttaatgatacaaataaatacaattgaagtataataataacataaaattaagataaagattataggtatatgtggaggtaaattatgagtaatgttatatatagaaaagtaacattagaagagtgtcagtgtataaatgaaatgaatccaactcaatatataggaaaagcgtggagaaaagtagatggaaaacgtcagttagtagaaataaattaccaagattgcaactggccgaatggttatgaatatcacatcagccatttaaaagaaactattttaaataagggaagtgcaattggtgcttttaatagcaataataaattattaggatttgcaacaattaatcgtcagttcttcggtgaaaggcataattatgttttattagaccaattgtttataacattagaatgtagaaataaaggaataggcaaaaagttatttatactttctgcaaatatagcaagagaatgg

SEQ ID NO: 921 - DNA, 23198 bp, synthetic construct
  misc_feature 1..23198: note = Synthetic
  source 1..23198: mol_type = other DNA
agaagtagagataataggttggatgtatcaatactatatttctgagaaaaaagatgaagtctttgcaggattaaagaaaaatataaagataacaaaggagaacattccagcagcaactcagttattcacaccaaaatggatagtcaaatatatggtagaaaactcattaggaagactatggcttgaaggtcatccaaatgaagaacttcaaagacagtggaaatattacttagaagaagcagagcaagaaccagaagttcaagaagaattaaagaaaataagagaagagtatagcaaactaacaccagaggatataaaagtgttagatccatgtatgggatcaggacatatcctagtttatgcttttgatgttctatataaaatatacaaaacagcaggatactcagaaagagaaattccaagaaaaatacttcaaaacaatctatatggattagatatagatgatagagcagcacaattagcaagctttgcattaataatgaaagcaaggtatcataacagaagattatttagagaaatacaaagagaagaactatacctaaatctatgctcaatacaagaaagtaatggaatagaaaaagaagcaatagaatacttctcaaatgaaaataaagaacttcaagaagatgtagaatacctagtaaaagtattcacagatgcaaaggaatatggttcaatcctagaagtagaaaaattaaactttgaagcaataaaagaaagattaaaagaaatagaagatgatgataatctaatgtttggagattatagaaaaatgcttttagaaaaacttcctactttagtaaaacaagctgagataatgagtagaaaatatgaaatttttgtaactaatcctccttatatgggaagtaatggaatgtcaaataagttgcaacaatatgtaaatagaaattggagtaatgttaaagcagatatgtattctgtatttatgaaaagagccttactttttgtaaaaaataattattttaattctatggtaactatgcactcatggatgtttttaaattcttttgaaaaaataagaagagaaatattggaaaattacaatataacttcaatattgcatttaggtatggaggcatttgatggaataataggaaaagtagttcaaacagtagcattcaatataagaaaatataaattacaagaaagtaagattactggtattagattagtagattattatgattctagaagatatgagaaagaagttgaatttttcaacataaaaaatagatataaccaaataaaacaaagtgatattttaaaaattcctaattcgccaattgcatattggataagtgaaaaagttgttaactgttttattaataaaacagtttcaaatgtaggtgaaacaagaaaaggaatggttacagcagataaccctagatttattagagggtgggcagaagtatcatttgataagataggatttaatatcttaagtgttaataaatcaattgaaagtcaaaaaaagtggtttccttatcaaaaaggtggtgaatacagaaaatggtatggtaataacgaatatttagttaattttgaaaatggtggaaaagaattgctaactatgaaaggaaatggatataaggttggatctactaatcataactttgactatatttttagaagttcaatagtatggacaaaagtaacaacagttaatttttctgcaagatatgttggagatggttatttgtatgatgatgcatcaccttttgtatatgttaatgacaagaaaaatatattgttaacattaggatttttatcttctaaaataagtaattattttatgatgataataaatcctactatgaattttaatcctggaagtgttagtgttattccactaattcagatagaagagagagataatattaataatattgttagaaacaacataagaatttctaaaaaagattgggattcatttgaaacatcatgggattttgaaagacatcctgtattaaaatatttaggtaatagtgatgataataaaataagttttgctttttataaatgggaagaagattgtgaaaataacttcaataaattaaagagtaatgaagaagagttaaatagaatatttattgatatttatggacttcaagatgaacttactccagaggttgaggataaggatgttactattagaaaagctgatagggaaagagatattaagtcatttatttcttatgctgtaggatgtattttaggtagatattctattgatgcagatggtcttatttatgcaggtggagagtttaaggataaatgggatttagaaaataagaaggttagaaagattgaaaaagatgaagatggtaatataatatctgattcatgggtagatgctactttccttccagatagggataatattattccaattactgaggatgagtattttgaggatgatatggtttctagatttgttgactttgttagaactgtttatggagaggataccttagaggaaaacttagatttcattgcagattctattggaagaaaaggaaatgaaacatctagagccactattagaagatacttcttaaaagacttctacaaagatcacttaaaagtatatcaaaagagacctatttactggatgtttgaatcaggtaagaataatggtttcaaagctttaatttatatgcatagatatgatgagcaaatagtagctaaggttagaacagactatcttcatacacttcaaagaaaatatgaagcagagatagaaagagtaaaattaacaatggattcaagtgaagcaacagcaaaagaaaaaacagcttctaaaaagaaaatagataaaataatgaaacaaatagaagaatgtaaagaatatgatgaagttgttgcatacttagcaaatgaacaaataaatatagacctagatgatggtgtaaaagttaattacgctaaattccaaggagtaaaaattataaattcaaaaaacaaagaaactaagatgaatttactagctaaaatttaatggaaaaagatgtcgtattttataaacggcatctttttatttgttttaatttagtgtatattttaaataaaaaggattttatggtaaaattgttacgaaaatataaattttggaggaatatatgttagacaagtacaatgagaagaaaaataaagttatagatatagttaagagttatatagaatttgaggaaaagaatcctgatttaaatggtaatgttaatatggatagcttaaaaagaagattaaaagccattgaggatagtaaatatattttagcggttgtaggagaagtgaaagcaggaaaatcaacttttataaatgcattattaggtgaaaaagtgttgcctagtgatgttttacaaagtacaagttctgtaattgagatatttaaaagtgatgagaaggtacttaaaataacttatgctgataatcacatagaagaaaaaagaggaaatgatatagaagaattcttgaaaaataatgcatgtgttcaggaagagtatagagaaatacctacggtgactatagattcttggataatgttatttaaaacaataaatgaggatggtattaaattaatttataacaaattacaaaaagaaagagaatcatttatcgaatctttatttgagcataatatacatcagttagaaaaaaatacttttaaatctaaagtagaaaaatatattgatgaaaaaacaaatttaaaaaatataatagaaaaaatagaattagggtatccactaaaatataagttcgattcattaagattagtagatagtcctggagttaatgctaagggtggattagaagatttaacttataattatgttcaaaatgcagatgcaacaatatttgtaaagcctataaagcctgttgaaagcaagtcttttaatgagttttttaataaaatagtcactgataagaaaaaggatacagtatttttagtattaagccatatttcatcacaaaccgaagagcaaataagacaattaagagaagaaactgaaagaatatatagtgagataaataaagaaagaataattccagttgatagtttgttaagagaaattgagaaaaagtttgaaggaatgtctgaagaagaaattattagatattttagaagtaaggataatataactgagcagaaaaaaatcgaaaagaaattaatttctgaatatttaaccgacttaatatgtggagatataaataaagaagaatttatttatgagatttctaaaagttctaattttgataatattgataaagctataaataaatttgctatgacagctaaagatattcaattaagagatatattaagtagcattaatgttggatgtagtaatataaaaaataaaattaatggttcaattttatgtcttaatatagaagataaacaagaagtagaagaaaaaataaagtctgaaaaagctgaaataaataaattagagcttgagtataaatattttgattgtggattagaagaaaaatataataccatagatgatgagttcaacacattcctacgttcaaaagacaaaagaatgaaaaaaataaacaagagcttagatattttagagatagaaaaagaaactcaaaatataattgatgaggctaacgatattttaaataaaggtatagaaactatatgtaaagaagctaatgatttttttaggagttattctaaggatttctccaataaatatattaataataatcgcattatagaaatttcaaagattgattttgattctataatgaatgaagcaaaagaaagtagttctattgaatctgcaaataaaagggagtgttttggatataagattcctataagcagtaaatataatcatttacatatttttaaggaaaatttgaataaacaaatagatagtgagtttgcacaagggaaaaaatcatattctgaaatattatcaaatgttagaagagatatagtaaaagaagtatcacacatgattgatgaaagtcatatttatttagatatgcttttagaaaaaaaacagaatataaagaaatcagaagaagaaaaagaaagattaaaccttattaatattcagataaatgaaattaataatgattgtaaaaatataattattaatttgaattgttaggagagtaagaatggatactatacttgaagagacaaagaaaaatagaaaatttttagtagagcaattaagaaatgaaatagaaagatattatgatttaggtcaatcaaactttaagttaacaaagagaatgaatacagatatagcagaaaattttaagttttctttaaaagaatattcaaaaatcttaatggctaaattagaaaaaggtactttaaaaaagttaattgaatcaaattataataaaaagtttatttctatggatagtgagactataaataaagaagttaatattaaactagaaaaatttaatggttgtaataaggctattgtagtatgcagtgttacaagtgcttttggaattataggatctacattagtgaagttatatgtagaaggagcagtaatatctgaaatagcattaccaacaatagtaggagttgctgttggctttgcttcttatagatatataagtaagaaagaacgtattcaattaaagaaaaatatagattcttattttgataatttagaaaagctattagaatcatatacaattgaatactgtaaagtttatgagaaaaaaagaaatatgttaatataaggagtattagaattgaaaggtgaagaaataactaaagttaaagattttgaaaaacagttaaatggaatcataaatgatttctatccttttagcaatttagaaaataataaattagaagtatattcagaaagagaattagaagaagtcttaaatagttattacttatatgagatagaggatttatttattttagatgatgaagaaaaattcaatattattgaaaatagatttatgtctattctgaatgcagcatataatgctgatattaaattagcatttatattaacatccaataataataaaatttcatttagaataggtgtaaatgacgaaaaatatacagataagtcacctattataaatacaataaatggagttttacctggtagtaagataaattataataaaaatttattaattagtgatttgattaagtcatgtaattttagtggtgcaatttcatcaataccaacattgaagattgatgatgagaaacaagttatagatttttcaaatgtaacaagagcgttggagaatgaaaattatactataattcttatggctaacccaataaaatatgaaactatatcagaaatatataataatatatctaaattgaatgataaagtgcatactttaactaaatacaatatgaattatgaagaaagtattggtaaaagtttttctaattctaatacaattggacattcaattggaggaaatttaggacttaattttggtattggaaatattattaatactggattaagtatttgcagtcctttaggtggagtatttgcaggagttggtagagttcttaatactggaaatactataggagtttctgtaagtaaatctaaaagtgaaactgttactgaaggtgaagacactaggagtggacaaggtttaagtatagaagttcaaaattcaatagcattatatctagagtgtgaaataaatagattattggaaaggttgagagttggatttaatacaggtttatgggagactatgattggattttcaacagtaaatgaacattctagggatgtattgattggaagtatattaggtgaattaaataaaccaagatctgaaggggaatccccaataataataaaatcacaagaaaatgaaaattttattatgcctaaatataaaaaacaaaaagcattgtataacaaaacattatcattaataactaataatgaattagctaatatagtgccagttcctaagtttaatgttcctggctttgaaattaaaaagcagttaaatttatcattaaacatacctaataatggagaaaaatatataggtaaggtatgtgaattaaaaagagggataaaaaatataaaattaggaattgatgaaaaagatatcttaaaacatacttttgtatgtggattaacaggatcaggaaaaacaaatacggttaagaatataataaatagtcttaataagccgtttttagtaatagaatcagctaaaaaagagtatagaaatatgttaactgatgatttgaatatttatacaattggaagcaatgttagtccattaagattcaatcctttctatattatgaaaggagtttcattaggaactcatatagataatctaaaatcaatatttaatgctagtttttcattatatgggccaatgccacatattatagaaaaatgcttatatcgtgtttatgaaaaatatgggtgggatttaacgcttggaagacattatgctatgtatgatgaatttggtgatgaaataatagatgaattttataaatcaaaagaacacaaatacttctttccaactataaattccttaaaatcagaagttgaagactatattgaaaataacatgggatatcaaggagaagttggtgataatataaaaacagctattcttaccagattagaaagtttatctgtaggatcaaaaggaactatatttaatactattgaacctttaaatataaagggaattttaaaatcacaaagtattttggaactagatgaacttgcagatgatgatgataaagcatttttcattggattaatattaacatatgtttcagagtttagaatattagaaagaaacagcttgaactttaaaaataatttaaatcatatattaattcttgaagaagcccataggttacttaaaaatatttctgcagaaaacaataatgaaatgattggaaattctaaagggaaggctgtagagtatttttgtaatatgattgcggaaatgagagctttaggacaaggtgtaataatagcagaacaaatacctacaaagttagcatcagatgtaataaagaatactagtaataaaattgttcatagaatagttggaagtgatgatttaaaagtgcttcaaagttctcttggacttagtgatgatgaaatagattatttagcaactttagaaactggctatgctttatattctaaagaagggatgagaaaagctacagaggttaaaataaatctttttgaaaatgaagtatatataactgatgaaaaagtaaagtatcatatgaatctaaaacatagttcaaatgtagattctatatttttaaatatgcttaataatagtattaatattgatgaccttataataagatttataaactctcttttagttgaagaaaatataaactttataaaattgatagatttaacaataaaagaagttaagaaaagtcttggatttagactttctaaaatcataaaagatgatgagattataaataagtttatcataaataaaaccttagaaatcttactaagtacacaaggaatgtattcaattgttgataataaatcatttggtataattgatgttttagaagaaatagtattaaataaaaataaacaatatcatgaaagatttaaatacttattcaaagaatcaaagggaattgaagatgtttcaagatatattagtgaaattatatctaatttaataagaaatagaattcttattagtgaaaatactttaaaattttcaagaaagttaattaatgagtatttcataattaataatgatagtatgagagatataattgtatcaatatacaatgagatggagtgatattatggagacttgcaggaaagtggatactgttggtagaggtggaagcttggaaggattcagtggaaagagtttagagagtatcaaggaaaaattattagaaggattaaaaaatcagtgtaattttattagagagaattcattagatgaattgaagagttttaataaatcaattgaaaaagctaatgaaaatgaaatttcagaaatagataattctcctataaaaaataaaatagaaggatgtcgtagagaaggtgaggttttagacgaattaaaagatttatatccagaagaggaagggtataaaatagagcaagaggtttatttaagagatgaaaatggaaaagtagtaaaagatcctgaaacaggagaagcaagaagaatagactttattattacaaaggacgggaaagtagtaaaatctatagaagttacatctaaaacagcatcaaaagaggtgcagacagcaaaggaaaacagaataagagaatcaggtggaaattatataaaagattcaaatggaaatttagttgagatacctaaaaatattaaaactgaaatttggaggagagaataatatgaaagtttatgacaaggctaaatggcacaataattgtgaaaataatgaacttaatgtaaaagcgtattttcaaaatttaatggagctattactaaagaataatatgcttagtgaagacggaagagagattcttgatataggaatagataatgatttctcacttaactcaaaattagtaaatgaaaagggaaatctgtttttagggaaaaattatgatgaaatattatcttcaatagatttcaataataaaattagtatagataatatagataaattctttaatcaataatagagtttatggatgacataactaaaataatttaaacaaaaattgatataaataggcaatatggaaaaatatgttgacttaacgttgaaaatattgtatcatttaatcaggaactaggtatagcatatcgagagtttaactagttactataacaaggcattaagccgtaaagtatcccctatgttcatttgaacctaggggtatctttttatttaaattatgtaaaataatgtaatttgatatagaaaaagggtgattttgtgaataaagatattaattatgctttaggattagatataggaataacatctgtaggttgggcagttataaacttagatctaaatagaatagaagatttaggagtaaggattttcaatgcagcagaaaatccaaaggatggatcttccttagcattaccaagaagacttgcaagaggtagaagaagattgcttagaagaaaagcctatagagttgaaagggttagaaaacttatattaaagaataatatattaactaaagaagaacttgaaggtttatttaaaaataaagaggtaattgatgtctgggaagcaagggttaagggattagactataaattatcaagagaagaatgggcaaaaattttaataaatttttgtaagagaagaggatttaaatctaatagaaaaaatgagacaaaagataaggaagcaggacaaatattaagtagcattagctataacatagaaaagatgaaggaaacaaattcaagaactataggagagtatatttataatgaagttaaaaattcagaggatagttatgctcctttaaggaataaatttggtgaatataagatgtgtgtttctagagatgttattagagaagaaatacatactttgtttgaaaagcaaagagaattaggcaatgactttgctagtgatgaaatagaggataagtattttgaaatatttaattctcaaagacctttttctaactttgaagatttagaaaagcttgttggattttgtacttttgaaagaaagaaacataaaagagcaccaaaacattgtatttcttctgaagaatttactttatatgaaggaatcaataaactatcaataataaaagatggagagaaaagaaagctttcagaagaggagagaaccttagttgttaatgaggcttttaataaaaaagagataaaatatacaactttaagaaaattactaggattaagtgaagaggaacttttctcaacattgacttatagcattgataaagatatatcaaaaacagagaatacaaaatttgtttctctaaaaggatatcatgaaataaaaagagctatagaaaaaggagtttctaaaaaagcttggcaggatattgaaaataatagaaaccttttaaatgacatagcctatgtattgaccttaggaaaaacagatgatgaaattgagaagcagttaagacttagaaatgttccagaggaattatttgaatctttattagatatgtctttcaataagtttaataatttatctatatatgctttagaaaaaatattaccttttatgaaggaaggatatcaatataatgaagcttgtgaaaaagctggatataattttaaagctatttatgaaggagtaagaactaaaaagttacctgttatagaaatagatgaaatagtaaatccagttgtaaatagagctttagctcaaactagaaaggttattaactctgttatagataaatatggttcaccagttaggataaatatagaattggcaagagatttagctaagaattttaaagatagaaagttaatagaaaaagagcaaaaagaaaatagagctaatttagataagataagagaaaatcttagagaattaatggataaagagcctacagttgtggaagttttaaagtatcgtttatgggagcaacaaagaggagaatgtgcatacactcaaagtcaaattcctttagaaagattatttagtccaggatactgtgaaatagatcatattattccttttagcagatcttttgatgatagtctttcaaataaaattttagtattaggaagtgaaaatcaaagaaagggcaatagaaccccttatgaatattttggagaggattctgaaaggtggaatagttttgaaatatgggttaagggaagctatttaaattataagaagaaagccaatttacttaaaaagaaattttcagaagaggaacaaagggattggaaagcaagaaatttacaagatacaaagtatatatgtagatatatttcaaactttgttaataatagattagaatttaaagaaagtgaaaataagcaaaaggttataactgtaaatggaagagctacagcttatttaagaagtagatggggattaaataaggtaagagaagatggagataaacaccatgctttagatgcagctgttgtaggggttacaactcaagggatggttcaaaaaatatcaaaatatagtaaagcacatgaattatatacagttagaaagaatgacgagtttgtggatgttgaaaccggtgaatgtgtagatgttgatgagtataaagaaataagaaaagatatacttccaagaccatggcgtgggtttagtgaagaattgaaattaagacttagtgataatccattagaagagttaaaaaaattacctatagagacttataatgaagaatttataaaagaaaatgttaaacctatttttgtttcaagagttccatttagaaaaataagtggaaaactatttaaggaaactatttattcggaaagagcttttaaagatggatattttgtctctaaaaaaagtctagttgatttgaaaaagggtgatttagataatttttataattatgagtgcgacaagaaactttatgatgcaataagtgagagaatgaaagaatttaattacaatggaaagaaagcttttgagagtccatttagaaaacctactaaaagtggaaaagaagggccagttgttagaagtgtgaaaattaaatcagcagcaccttttaaagatggaattcctatgaatgaaggattagttgctaaggaaggtatggttagaatagatatttatgagaaagaaggaaaatattttgttgttccagtttacagatatcaattagcaaaaggactagttcctaaaagagcagctatagcaaaaaaagatgaattaaaatggcctattatggatcaaacttataatttcaaattttctatatataagaatgatttaattgaggttaaatatgataaaaagggagtatattttggatattatgatggatttgatagaaatagtgcatcattaacaatagaaaaacatgataattcagaaagatatagaagtatagggctaaaggtaggagtacttgaaattaataaatatgaagtagatgttttaggtaactatcataaagttaagttaggagggaactagatgagctttagaagtttaattatttctaattctgctaacttaagtattaaaaataataatttattaattaacaatggagaagagtttttagttccaatagaggatataagtgttttgcttatagaaggagttgccgtaaatttaacagctaggttattaagtaagttatcagaaaataatgttgcaacgattatatgtgatgaaaagcatcttccagtttcaatcaatatgccaataaatacacattataagacttataaggttttaaaacaacaattttctcaaagtgcagctttctctaaaagaatatggcaaagtataataaaacaaaaattaataaatcaaggaaaatgtttatatatattagaaataagtgggtatgaatttttgaacaagctttctgatgctgttgaaagtggagataaaggaaatagagaagctattggagctaaatattattttaaaaacttatttggaaaagcttttgttcgtgatgatgaaaatggtataaactcagcactaaattatggatatactatacttagaagtgccattgcaagaagtcttgtaatgtatggattcaatacaacattaggagttaatcattgcaatgaattaaattcttttaatttagcagatgactttatagaaccttttagacctatagttgacttatgggtagctcaaaatatggattatgatgatattttaacaaaggaagatagaattcagctagttgatttattgaattaccagtgtgttattgatggaaaaaatcattctattttaaatggaattgataaaatgatatcttcttatacaacagcttgcagtaaaaaagattttagattattaaaattaccagagataaagcctttggaatatcattattatgagtaaaaagtttatgagaatacttgtattttttgatttgccagttgttgaaaaagaagatagaaaagaatatcaaaattttagaagatttttattaaatgatgggtatttaatgattcagttttctgtttactcaagaatatgtaatggtattgatggagtaaataaacatgtagcaagactaaaagaaaatttaccaccaaaaggatcagtaagatatcttcagattacagaaaagcaatatacagaaatgaaattcttagtaggatcaccaaaaaagcaggaaaagaagataaattcacgacaattgaatgttttttagaaagtaaaaaccccttgaaattagttgtttcaaggggttcattagttcctattatagcatatcgagaatttactaggaactataacaccatctttatacttcacacaatataaataattatagcatatcgagaatttactaggaactataacatttctatgcacagaataactcgcaacatcattatagcatatcgagaatttactaggaactataacctttcgttctgctcctccgtactaactcttattatagcatatcgagaatttactaggaactataactaagcctatcattttgagtaactaatataaattatagcatatcgagaatttactaggaactataacatgaggagccaagacaaatcccattcttacattatagcatatcgagaatttactaggaactataaccaagagcattggagttaatgcaccttttaaattatagcatatcgagaatttactaggaactataactattttttcattattagcaacatcattctcattatagcatatcgagaatttactaggaactataacactctagcactatttaaataattataagtaattatagcatatcgagaatttactaggaactataacgggtaatctctcaatttcctctcctatgtattatagcatatcgagaatttactaggaactataacctttattcaaaagtggtataattttcttaaattatagcatatcgagaatttactaggaactataaccaatttatgtttaactcccatattatcagtattatagcatatcgagaatttactaggaactataactcttaaaataacatcatctccctcaacatcattatagcatatcgagaatttactaggaactataacacctataggattagagctaaagaaagagttattatagcatatcgagaatttactaggaactataacggctatgagatacttaaacaacgatttaaattatagcatatcgagaatttactaggaactataactaacttcaatttagcttggtttatttcatcattatagcatatcgagaatttactaggaactataacttcaaattgagccattattaattcatgcattatagcatatcgagaatttactaggaactataacttctgttgttaatactgctcctataagttcattatagcatatcgagaatttactaggaactataacaatatcttcatcaaacattaataactcaaaattatagcatatcgagaatttactaggaactataactagaaggtggcataattctcgataatgagaattatagcatatcgagaatttactaggaactataacttatataacaaagtatatgactaaagaaacattatagcatatcgagaatttactaggaactataactaatggtagtgttattcaagagttttataattatagcatatcgagaatttactaggaactataacgcgtctgtaataggtttaagcatttcagctattatagcatatcgagaatttactaggaactataacatttgggggtgtattatgttacaaaaaataattatagcatatcgagaatttactaggaactataaccttttttatagatgagtttaaggctttggattatagcatatcgagaatttactaggaactataactgccttctcttatgttcttatcaaaatcctattatagcatatcgagaatttactaggaactataacagaatctactacatacgtaaactctatgtattatagcatatcgagaatttactaggaactataacacaaagaagagatgaggctatttctacagcattatagcatatcgagaatttactaggaactataacacttgtaactaatcttcctaaattttataaattatagcatatcgagaatttactaggaactataactaacaactctcataataaaaaaagtcctatattatagcatatcgagaatttactaggaactataacctcatttttgatttcctttgtcattttatgattatagcatatcgagaatttactaggaactataactaacaactctcataataaaaaaagtcctatattatagcatatcgagaatttactaggaactataacagaacctttagcattttcactcatagtttattatagcatatcgagaatttactaggaactataacacaaagaagagatgaggctatttctacagcattatagcatatcgagaatttactaggaactataacacttgtaactaatcttcctaaattttataaattatagcatatcgagaatttactaggaactataactaacaactctcataataaaaaaagtcctatattatagcatatcgagaatttactaggaactataacctcatttttgatttcctttgtcattttatgattatagcatatcgagaatttactaggaactataactaacaactctcataataaaaaaagtcctatattatagcatatcgagaatttactaggaactataacagaacctttagcattttcactcatagtttattatagcatatcgagaatttactaggaactataacctcatttttgatttcctttgtcattttatgattatagcatatcgagaatttactaggaactataacgtttttcaacaaacttttcataagaatttgattatagcatatcgagaatttactaggaactataacttcattttctttatatgttagtgttaccccattatagcatatcgagaatttactaggaactataactttttgcttagcagttaagcaagctaaacaattatagcatatcgagaatttactaggaactataacgtggaaatatgggatgtagataaaaaagaattatagcatatcgagaatttactaggaactataactattttcaacatatattctgtagtccctggattatagcatatcgagaatttactaggaactataactttgttattaacaactgttaactcttgcttattatagcatatcgagaatttactaggaactataacaattagaagttaatgtagttactttagaatattatagcatatcgagaatttactaggaactataaccatacgcttttcccatagttttcctcttaaattatagcatatcgagaatttactaggaactataacaagtgggaattcattaaaaagattattttcattatagcatatcgagaatttactaggaactataacgattgtgcagcagaccattaatttcttaatattatagcatatcgagaatttactaggaactataacaacattaagaactgaatctacattacaagtattatagcatatcgagaatttactaggaactataactgatatgttatagacaaaatataatttcatattatagcatatcgagaatttacttatgatatgttaattttattacttttaagttattatattattatatattaatttaaaaaatatttataaaattttatttagaggtgacaaatgaacttaaaagaaattaagaatttccttaatgatattttttcaaaaccattaggtgatggaaaagtacgtcatattgttttctggtatgatgaaaatgaggattttactgaagagatagatgaatttgatttagagggtgttgagcttattaagttaaatgataacaatgctttttatactaaatatcatatagaaaaagaaaatgtagatggaaatattctagtttattctaatatgaaaaaacctaaaccacaggaagattggctttatgatattttatcttatagtgaggaattttctacagatagagctactgttattatgagagaattgaaagttaataatccttatcttaaggaagcatttactttttacaatactttctttaagaataaggatagacttgctgcttttagaaacttaggtattcaagattatactgaggaaaaggttcatattggagttttagctgttttaactaagataaagattatgaattttgaagagatagtaagagctttaattaaagaaaaactagagggaaatagcaagctttatgaggatattgataagtttggaagtctagatatactttggaacttaattagtaagaactatggttatagttttgaagagagaagtttagagaagtttatggctgttcttttaattacaaatatgaatgaaactattaagtttaatttgccaaagcaatatgaagattttgtatcaaagaaaagtacagattgtattgtgtttataaatcattttatgaatagtcttaaagatagtcattactatgataagatgcagcgattaataggggaaaagcttaaaatttctaaacttttagagaaaactgattcagataaatttttgaaatgtgatgtttttgaagaaatggataagttaatattaggtagaataatcaatttgcttaatgatggaattgaagagtatgataaatatttaaatttaatggcttcaagaagaactcttcattattataaaaaatatgaaagtgaatatagagctttaaaatgggccataagattattatctaagaagaaagaattaaattccattataaaaacagaaagttcttatgagatggttaaatcttatgctaggaattactttgagattgataaagcttacaggaagttctattatcattttgataattgtgaactaaaggaaattttaaataacttaaaagatactgtagaaaatttatataataactggtatttacaagaactatctataaaatggaatgaagcattagctaagcaaaaaacttggcaaattgaaggggtaaatcagcaagagaggttttataatgacaatatcaaatatggtcgtaaagagagagtttttgtaataatatctgatgcccttagatatgaaagtgcagaagagctttctataagacttagaaatgaaagaaaagctaaagtggaattagattatatgcaaggggtacttccatcatatacaaagctaggtatggctgctttattaccaaataagaaaatagaaataaattctaattatgatgttttagttgatggaataaattcaaatgggacagaaaatagagataagatactaaaagttgaaaatgagaaatccttagcaattacttataataagcttatggatttaaaagaatctgaatttagaaaagtattttcaggtttagaggtagtttatatttatcacaacacaattgatgctgtaggagatcatgcaagtacagaaagagaagttttctcagctactgatactgcattaaatgaattgataaatcttgttaataagcttgttcatagagtaagtgcatcaagtattattataacatctgaccatggatacctatataagagaagcaatatagaagaatatgataaattatcaggtataaagcttgaagatggagaggataatagaagattcttattaacatcacaaaataaagatatagaaggaacaatgaggtttagtatggattacttattaggagcggattctggaatgaatgtaataactcctaaaggtatagcaaggtttaaagttcaaggagcaggagctaattatgtacatggaggagcaatgcctcaagaagtattaataccaataattagatttaaaaatgatagaagttcttcttcagaaaatgatattagaaaggtaaaaatatcattaacaagcataacaagaaaaataactaatataataacttatttagaatttttccaagatgaaaagattcaagataaagtaataacacaaagaataaagtgttattttgaagatgaagaaggaaatagaatttctaatgaaaatgcaataataggtgattcaaaatcagaaaatccaattgaaagaagttatagagagaagtttgtattaaagagtattccatatgataagagaaaaaaatattacttagttattgaagatgaagatgactcaagtttacaatgtgaaaagataccatttaatatagatatagcaatagttgatgactttgggttttagcgaatagtgggaaattaattcccactattttcttttatatgaagttaatttataattatagtgttaagtttattttacttaatattataattataaaattttaggtggattattatggatgaattaagtataaagttaaatcaaagttttgcaggcaaagttgtaagaaaagatttaacacaaaaattaaaacaaggagctaatgttcccacatatgtattagaatatcttttaggaatgtattgtgctacagatgatgaggaaagcataaatgaaggtgttgaaagagttaaaaatatactatcagataattttgttagacctgatgaagctgaaaagataaagtctaaaattagagaaatgactagatatactgttatagataaattaacagtaaaattaaatgaaaaacgtgatatttatgtggcagagttttctaatttaggattaaaagatattgaaatatcatctaattatgttaaggattttgataaacttttaggtggaggaatttggtgtattgtaaagttagaatattattatgatgaaaatgaaaagttatctactccatttattattgaatctgtaactccaattcaaatgcctaacatggatatagatgaacttattaaaggaagaagagattttagcaaagaagaatggattgacatattaattagaagtataggaatggaaccaactcaattagaggagaatgttaaatggcatatgcttttaagaatggttccactttgtgagaataactataatatgtgtgaattaggaccaagaggtactggtaaatcacatttatacaaagaaatatctccaaactcaatactaatatctggaggacagactacagtagctaatttattttataatatggctcgtagaaagattggtttagtaggaatgtgggatacagtagcttttgatgaagtggcaggaataacttttaaagataaagacggtattcagataatgaaagattatatggcttcaggatcttttgcaaggggaaaagaggaaaaagcagcatccgcttctatggtttttgtgggaaacataaatcaaagtgtagatgttcttttgaaaacttctcatttgtttgaaccattcccagaggtaatggcttatgactcagctttttttgatagaatacatttttatcttccaggatgggagattcctaaaatgagaccagaacttcttacaaatagctttggatttataacagattatttagcagagtatttaagagaaatgagaaaaagaacctttggagactctatagataagtattttagattaggaaataacctaaatcaaagagatgttatagctgttaggaagactgtttctggacttattaaaattatatatcctcatggagaatttgaaaaagaggatttagaagaaattttaagatatgctcttgtaggaagaagaagagttaaggaacagctaaaaaaaattgggggaatggagttttacgatgtacatttttcttatatagataatgaaactatgagagaagaatttatttctgtgccagaacaaggttcaggttcattaattccagagggactaggaagagctggacatgtttatactataggattaggtgattctggaatgattggaatatataaaattgaaacagaagttatttcaggatcaggtaagtttgaaaaaacaggtttaggatatagtagggaagctaaggaaagtatagaaactgcatttaggtattttaaggctaacagtagaaatatgagttcttcaatatctactacaactaaagattatttaatgcacatacaagatgttaatggagttggaatgacttcttcattatccttagctgctataatagcaatgtgctcaggagccttaaataagccagtacaaagtcaattagttattttaggttctgtaagtattggaggaacaataaacaaggtagaagatcttgcaaacacattacaagtttgttttgatgcaggagctaaaaaaatactacttccaatggtaaacgcaggagatatagctttagttccaccagagctttttgcaaagtttcaaataatgttttactcaacagcagaggatgcagtatttaaagctttaggagttcagtaaaactaagtatatgggatatatttgttttattgtaaagtgaaaattctaatttacataaagatataatattaaatatcttttatcctttttggaacatgaaatataaagaattataatacaaagcaatagttctattaaactatgtcagagcgtaattttgtttaaaaaagttttttgtttttaaagagaaaataggcccataatttaaagagaatttttaaattatgggcctttaaaagtatattttatagcctttatttagggtatttataagcaaaaaaagctataaatcacccttaaaattaattataataagtaccaatttcttttaagctataaattttttagcacaccaacctgtgtttccattatatctaaccttaacccaatctccactttcttctaagatttcaaccctatgaccattgcccattacagttaatctagatgaagtagaggagtctttagatgagtgtagccacaatcctccattagcctttatatggccttctcttagggaagcttcactggtatttgatttaactattttacttacttccacagtattacct

SEQ ID NO: 922 - DNA, 23195 bp, synthetic construct
  misc_feature 1..23195: note = Synthetic
  source 1..23195: mol_type = other DNA
agcagcttaaaaaataccctaacgtggcagagttaaagctattaataggaactttgtactggcaatatgttgttctgcttaaggatgatgaagaaacaagcaatagaatgataaaacatgcttgtgaaatctttgaaaaggcaagtgaatcctcaaatacagatattaaagaagctgcacttcatgtgatggcatctctctatatgatggaagaggattacgacagtgcactaaaaacagcagaaagacttaatcagaaatccaatgatacaatgcttttattagcaactatttatcgtaataagggtgaaaatcatgatgcaaaacagctctatcaaagaatacttcttaaaaatatccaaagctctgccttagtgcttcaaagtttatcttggattgcagctaaggagttaaagcctgatgaagcagaatttttcctagagacaataattaaattagatactctatttgaagttcaaagtaatggagaagcctgttctctacaattagcagaactatatgctagaaataaagagcaagataaggccatcactatgttaaatagatacgtagctttcataaaagagctagtaaccagtggaaatctaggccttaacagtagtagattttttaaggaaatagagttcaaagattttcaaaatgaaaagtcagagttcatgaaacagcaccttgccgaggaaatcattaatactccagcatttgaggatttaaaggaaaatgaagagtttaaaaagattataaaggagttaaggagtttgtaagatatagaaagggtttataaatataatttaggtaaagtcagtagagagtactggcttttttagtggggataatttattgatgtttaggggtactattgaagaaatttatttaaggcttaactatttaaaaagacaagttttgaatacagtctatgttttataattttttgttttaaaatggattaatatcataataaatagtcaaaataaaaataaagcgtatattatataacaatttatattattataacctagtgatataataatataaactggaccatggaggttataattttaatggaatataaatctacaattaaatcaaggccttatttatataaagaaactaagaaggcctcaagtcttataaatagtggattagatactgatagtataaaagaaaaatcgttagaagataatattttccaattagaaagtgaaacaagaaagaaggaaattgcatcaataataattgctagattaaatgggcttgatgaacaggttatttataatattgtaaatagtaacattgaaacatcaaaaattttagttttatatgcaatattaaaaacagatagattattttttgagtttattaatgaggtttataaagaaaagattctattaaaggatttatttataagagataaggattttggagtattctttcaaaataagagagaacaaagtgataaagttgcatcatggtcagaatatacttttaaaaagttgaaacaagtttacataagaattctttttgaaagtggacttatagtaaatcaaaagggagatagagaaatcaaagttcccataattgaaagcgaagtaaaggactacttatatagtattggagataggttatatataaatgctatacttggaatagtggattaattaatgacggtggtgaaaagatgaaagacatatatcaaagattagatgatatactgccaaagataatagagcctgaatttagaaaaaataaaggtctaggaaatgaaataggattctatatatttgattataatcctgaagaagaacttatagttagagatagagttaaatttataaaagaaaaggcccaatcagcatatgggttaaatattgttgaatttgatttatatgaaataataatagaaacattaagtaactttggttatttagatcgttgttttaaaatggagcaagataaaggtagtgaacatgttcttctaaaagcaataaaaacagccttaagaattacagaggatgatgacttgtttttagaatacattagttcgagacttgaaggggcagatatagtatttttaagtggggtaggaaaagcatggcctataattaggtcacatactattttaaataatcttcatagagttgttgaagaacagccattagttatgttttttccaggaacatatgatggaggaacacttatgctatttaatcaattaaaagatgataattactatagagcatttcaactaatagacaaatattaaggtgaggggtatttatacatggatgcgaagttaaaatcaatgttttataaacctattgatagagatattaagggcgtaattaaagtaggtcaagcagatgaggaaaatataaagcaagagttagaagaatatgttgtaacaggagagttaaataaacatattgatagattttttgaaggctataaatccggaattataggtaatacagataaaaatggagtatggatttctggtttctttggaagtggtaaatcacacttcttaaaaatcctttcttatttattaaataatcaaagcattgatgggaaaaatgcaattgactattttgatgataaaggcttagatagttttgttttagataatatgaaaaaagctggtgatgtttcaagtgatgtaattctttttaatatagattctaagtcagactctaaaagtaagttaaataaagatgccatagttaatgtatttaataaagtatttaatgaaatgcaaggcttttgtggaactatgccttggcttgcagatttagaaagacaaatggttaaagatggtgtctatgagaaatttaaaagtaagtttaaagaaattagaggtggggaatgggaagagtttagatctaacttctatttcgaagaagatgctatagtagaagcattatcagaaactactagaatgagtatagatgcagctagaagttggtataacaaggctgaaaataattattcattaagtatagatgattttgcaactaaggtaaaagagtattgtgactcaaaaggggagaatcatcatgtagtattcttagttgatgaaattggtcagtacattggagataacactcagcttatgctaaatcttcaaacagtagtagaagatctaggcactaaatgtcaaggtaagtgttgggttatagtaacttctcaggaaggcttagatgaatttactaagataaaaggaaacgacttctcaaaaattcaaggaagatttaatacaaggctatctttatcatctgctaatgttgatgaagtaattaagaagcgtatacttagaaaaactgatggtgctacaagtcatctaaaggcattatatgagcagaaggaatctataataaagaatcttttgtccttcacttccgatacagcagaaatgaagttatataaaaatagtgaagattttgctgaagtatatccttttattccttatcaatttaacttgcttcaagcagcatttaacggagtaagagaacatggtgcatcagggaagagtttatctagaggagaaagatcattactaggggcttaccaacaagttgcaattgattatatggatatggattcaaatgtattagttccattttcagcattttataaaactatagaaacatttttagattcatcaataagatctgttattattaacgcagaaaaaaatgaaagacttgatgaatttgatgtggaagtattaaagttactgttcttagttaaatatgttaatgaaatgaaatcaaatattaataatttagcaacgttactagttgataatatagatgcatctcatagagatttgacgtttaaagttcaggaatcattaaaaaaactaatcagagaaacattagtacaagaaaatggggaagagtatatattccttactaatgatgagcaagatgttaataaagaaataaagaatatgagtatagatagtggagaagttatacaaaaggttggagaaattgtctttgacgatatatataaagacaacaaatataattacgctaaaaaatatatgtttacatttaacaagatagttgatgatagaacgaggggaccacaaaataatgatataggagttagaataacaactgctaactttgatttagcaggagggggaggaacttctcaaagtgaattaaagcatttatctattagagaaaataatgtaataatcaatgtttcaaaagacattaattatttagatgaaattgaaaatgtattgcagatagatgcctatttaagattgaagggtggatcaagatcaacacctgctatagaggatataaaaagcaaaaaaagtagagagagagaagaaagattaaaaagagcaaaattcttaattgaagaagcaataagaatagcagaaatttatgttaacggaagtcttctagatataaaagaaaaaggtgcagtagatagaattaatgaaggattaagagctttaatagattctaagtacaacaaattaaattatataaaagagtttaaagaaacaacaaaagatttatttgatattatggatgctagattaaatcaaatgtctttattagataatgatccaaatagattagcaatagatgaaataaagactcatatagaaacaagtacagccagaaatcttcaaataactgttaaaagtattataaataaattctctaatgctccatatggatggaaggaagttgatattcaaggagttatagttaccttatttaaaaggcaagacataaaagttgttttaaataatgaagtgctatcgcctaataatagagaagttgttaattatattacaaagagagattatgtagagagagttattttaaaaactagagaaaaagtccaggctaaatatatagatgctttaaaggatttaaataaagacttattcggattttcatcaatgccaagtgatgaggatggaatgatgagtatatttaaggaacaatgtaaattagaattacacaaaatagatataatgttaaataattttagtgtaacaagtaagtatccaggtgaagaaatcttaagaaaaggaatgaaactttttaaagaagtaatagaaataaaagatacattagagttcttcaaaaaggtatatgatttagaagatgagttcttagcttatgttgatgagatagataatatcaaagggtttttctttaaaaaagaaagtggagttattgatacttcttctaagggagagcaaagaataatatttgataatgccatagagaagttaaagagctatgaggataataaggaatatatagtaaatgatgaatttagtgaaatagttgaagaaataaaaactattttaagaatgaaagaaccatattcaaagataccaactattccattattaatagaaaggtataataataaaatcttagaattattagagaaagaaagtatcccagttcttgagtttattcaaattagcaagaaagaagttatagaaactttagaaagctatgatttcaagaataagttccttaatagaataattgaagagtttaacaacttaactaatagaacagaaaaggctaataattttgcagttctttcttcaatgtctgatctttcagagaagttaaagctaaagtggattaaggaaatagttacagaggatgaaagacaaaagagactaaaggctagagaaatagaagcagcaaatagagttgcagaaactaatgcattaaaaggaaatgattcaggttatacagtagaatctgttaatcaagaaccagaaattgtaataaaaactaagactttaagtatgagagaattagttaaaggacaaaaggttattaaaaatgatgacgatatagaagctgtagttgaagcattaagaagaaagttaaaagaggaattagaaaaggatacaataataagtttagtatagacttaaaacttaggagttgattagatgagtggaatattagataaatatgatgaagcaattagtctaacgtataattacacataatgaagagataaaattacaaatagatagcgatggaatagaaatttataataatttaggtagaggttaaatatggataagaataaaatcaaatcttttgcaatttgggcgagaagaagtttaattgcagcagttagtgaaaaagcaaatagaattggtatatacgaagataaaataatagaagcaactgatgtacaaggtggatttaagttagaagggaaggaggaaatattttcacttccaaagaaggatagagatgcacttgtaaaagaggttaaagaaaagggttttgagcaggtgatggaagaagtagcatatacttggttcaatagatttatgggactaagatatatggaggttaataattatcttccatcaggagttagaatactttcatcagagattgagggaaagaaggaacctgacgtattaacaaaagtatcagagataattgatgaattgggacttgatgctaacaaaatttatgaccttttagacacaggtgatacttcagacagagaaaaagcatatagaattattttagttaagcagtgtaatgaacttggaagaataatacctcaaatgtttgaaaaaataagtgattatacagaattactgcttccagataatcttttagaagaaggctctgttataagaaaaatggttgatgacatagaagaatctgattggcttgaagaagtagagatcataggatggatgtatcaatactatatttcagaaaagaaggatgaagtctttgcatcattaaagaaaaatgtaaaaataacaaaagaaaacataccagcagccactcagctatttactccaaagtggatagttaaatatatggtagaaaactcattaggaagactatggcttgaaggacatcctaatgaggagcttcaaaaggaatggaagtattatttagaagaagcagagcaagagccagaggtcgaagaagagttaaagaaaataagagaagaacatgcaatgttaaaaccagaagatataaaggtgttagacccatgtatgggatcaggacatatcctagtttatgcttttgatgttctttatgaaatatataaaacagcaggatattcagaaagagaaatacctagattaatattacaaaataatctttatggactagatatagacgatagagcagcccaattagcatcatttgctttaattatgaaggccagacattacaataggagattgtttagagaaatagaaagagaacatttaggattaaatgtttgttcaattcaggaaagtaatagtataggtaaagaagcaatagattatttctgtgaacatactacaatggacagtgaacaattaaggaatgatgttgagtacttaattgaagtctttaatgatgctaaggaatatgggtctatacttgaagttaacaatgttaattttgatgcattgaggcaaagattatttgaaatagaagaagataataatttaatgtttggtgattatagagcgatacttttagaaaaattacctatgctaattaaacaggcagaggtaatgagtagaaagtatgaggtatgtgttactaatccaccttatatgggaagtaaggggatgagcgcaaaattacaatgttacctaaagagggaatatgtcaattctaaatctgatttatttgcagtatttatggaaatctataagaaaaatattaaaaaaaatggatatctttcaatgataaatcagcattcatggatgtttctaaatagttttgagaagttgagagtggagttattgaaaaataacactataattaatatgattcatttaggatcaaaggcatttgaagaaattggaggagaggtagtacaatcaaccagtttcataattagaaatgggagcaatattaaatatatagcaagatatattagaactatagaagaaaataacagtaagcaaaaagaaaataaggtattaaaagatattaatacaaataagttttatcaaatgattcaaaaaaactatttagaaatgcccaataatattatatcttattgggttagtgacaatacaataaatatctttaaaaatagtcaacatatatatgactttgcagattcatgtattgggatgagaactggtgataattcaagatttttgagattatggtatgaagttaatataaataaacttatttttaatgcaagagataaaaatgatgcgcttaatagtagtggaaagtggtttccttacaataaaggtggaacatttagaaagtggtatggtaataatgaatacgtagtgaattgggaaaatgatgggtttgaaattaaagaaaatactaagaaaaattatccacaattaggcgataacttaggttggaaaattagcaatgagcatcaatattttaaaagaggaattacttggtctggtgtatctactagtaaatttggagtaagatgttttaaagaaggaatgatatttgattcaggtgcaaatggattgtttgaatttgatgaatcaaattatttatatttagcagggtatttaaacactaatttaactgatgagttcttaaaaattatgaatccaacaataaatacaggatgtggaacggttgcacagataccgataatttacaatgatgtgattaaagtaaaggtatctgaattagtaaagggtaatattgtgaattcaactaaggaatgggattcttttgaggtttcatgggactttaaaatccatccattattaaagttaatagataagggagagcagaatagcataagttccatatttaggatatgggaaactgagtgtgaagaaaactttgctcaattaaaatctaatgaagaagaactaaacagaatctttattgatatttatggacttcaagatgaattaactccagaggttgaagataaggatatcaccataagaaaagctgatagggaaagagatattaaatcctttatttcctatgctgttggttgtatgctaggtagatattctatagacacagaaggtcttatctatgctggtggagaatttaaggataagtggaatctttctgataaaaaggttaggaagatagagaaggatgaagaagggaatataatatcagactcatgggttgatgctactttcctacctgatgctgataatattattccaataacagaggatgaatattttgaagatgatatactttcaagatttattgattttgttagaactgtttatggaaatgataccttagaggaaaacttagattttattgctgattctattggtagaaaaccatctgaaactgcaaggcaagctattagaagatactttattaaagatttctataaggaccatttaaaggtttatcaaaagagacctatatattggatgtttgaatcaggaaaaaatgatggctttaaatgtttaatctatatgcatagatataatgaccaaactattgctaaggttaggactgattatcttcatacaatacaaagaaaatatgaagcagagattaatagacttcaattagttatagattcacaagagtatactgcaaaggataaagcagctgctaagaaaaagatagataaaatatctaagcaaattgaagagtgtagagagtatgatcaggtagtagcttacttagcaaatgaaaagatatccattgacttagatgatggagtaaaggtgaattatgacagattccaagatattaaggtaattaattcaaagggtaaagagataaaaatgaatttattaggaaaaatataatactttagttgacaacttgtaaaattatgttattctatatatagaaactagataaatatttatagcatatcgaaagtttactagttactataacaaggcgtaaagccgtaaagtatcccctaggttcgtaagagcttaggggtatctttttaatctcaaatagaaatttattgaataaatgtagaagggtgtaaaaacatgggggatataaattatagtttaggacttgatatagggataacatctgtaggctggtcagttataaatttagataaaaatagaatagaagatttaggtgtgagaatttttaatgctgcggaaaatccaaaggatggagcttctttagctatgccaaggagacttgctagaggaagaagaagattattgagaagaaaggcttatcgtattaaaagagttaaaaatttaatatcagaaactgaaatgctgagtaaagaagaattaaataacttatatactgataattacctattaaatgtatgggaagctagagtaaatgggttagattatttcttaactagagaagaatgggctagagtattgattaatttttgtaaaagacgtggttttaaatctaatagaaaaaatgaatctaaagataaagaaacaggtgaattactagcaagtataaatagtaatttagaaaatatgagagcagttaatgctagaactataggcgaatttatatataaaaaagttaaagaagaagatgaaaagtatggagcatttagaaataaatttggacaatatactaggtgcgtatcgagggatgtagttagggaagagatacatacattatttgaggctcaacgtaaatttaataacgactttgccagcaacgaaatagaagataaatatttaaaaatattcaattcacaaagaccttatgcaaagtttgaggatttagaaaaattagtaggatattgtacatttgaaggcaaaaagtataagagagcacctaaaaactgtattacagctgaagaatttagactatatgaagttatgaacaaattatccattttcaataatggggacaagagaaaacttacagctgaagaaagagaaatgattgtaaatgaagctttttcaaaaagagaaattaagtatggagccttgagaaaaattttaaatttaagtgatgaagagagattttcaactttaacttatagcttgaataatgatgttgataaaactgaaaatactatttttatttctttaagaggctactatgaaattcgtagagctatagaacatggtgtaagtaagaaatactgggaagaaataaaagaagataggaagcttttgaatgatatagcatatgttcttacattaggaaaaactgatgaagatatcattaaacaattaagattaaggaatgttccagattcggtaatagattcggtattagatatatcttttagtaaatttaataatttatcaattaaagcattagagaaaattttgccttacatgaaggaaggatatcaatacgataaagcatgtgaaaaggcaggatataattttaaagcaatatatgaaggaataaaaagtaggaagcttcctgtaatagatattaatgaaattgtaaatccagttgtaataagagcattagcccaaactaggaaagtaataaatgctgttatagatgaatatggatcacctattagaattaatatagaacttgctagagaactatcaaaaaactttaaggatagaaagaagatagagaaagagcagaaagagaatagatataacatagaaaaagttgcagaagatttagaggaattgatgggaaagaaacctactggtgctgaaattctaaagtatcgtttgtgggaacaacaaagaggggaatgtgcttactcatgctcacctataagctttggcagcttgtttagtccaggctattgtgaaattgatcatattattccgtttagtagatcttttgatgatagtatatcaaataaggtattagtattaggaattgaaaatcaaagaaagggaaatagaactccttttgaatattttggggacaatgaagacaggtggcataaattcgaggtatgggtaaatagcggcaacttaaattataaaaagaagatgaatttacttaagagaagatttactgaggaggaacagcgtgattggaaagcaagaaatcttcaagatactaaatatatctgtagatatattgcaaactatgttaatagtagattagagtttaaaaaaagtgatattaaacaaaaggtaattactattaatggtagagccacagcttatttaagagccaaatggggtcttaataaggttagagaagatggtgataagcatcatgcattagatgctacagtagtggctgttgcaactcaaggaatggttcaagagatatctaagtatagtaaagctcatgaactacagtatataaggcaaaatgatgattttgtagacattgagactggtgaaattgtacagcttgaagaatataaatatctaaggaaagatttattacctcgtccatggctagggtttagtgaagaattggtaatgagattgagtgatgatccactagaaatattaaaaaaatcaccttttaagagttacaatgaagagtttattaagtcaactgtaagaccagtgtttgtttctagagttccttatagaaaaattggaggaaaattattcaaagagacagtatattcttctaaggcctttgtggaaaatagttttattgtaaaaaaagatttaaaagatttaactttaaaagatatggataatgtttataactattcttgtgataaaaagttatatgatgctataaaagaaaggctagaagaattcaacgataatggtaagaaagcatttgaaaatgaatttagaaagccaacaaaattaggcaaattagggccaatagtgagaagtataaaaatagttacttctgttccatttaaagatggagttgaaataaataatggattagttgcaaaagaaggtatggttagaatagatatttatgaaaaagataaaaagtattttgcagtaccagtatataggtatcaattactaaacggagtaattccaaagtatgcagcagttgcgaataagccagaagaacaatggatttatatggatgaaacctttaactttaagttctctatatataaaaatgatttaatagaaattaagtatttaaagaaagaaggattctttggatattatgatgggtttgatagagctacagcatctattacaattgaagctcatgataattcacaaaggtatagaagcataggaattaaaaaagatgtattagagtttaaaaagtatgatgtagatgtattaggtaggtatcataaggttaaggagagtgttaaatagtggcatttagaagtgtaattatttcaaatcctgctagtttaggattaaagaataatagtcttgtaatagaaaatgaaaatcactatgaaattcctatagaagatatatcgattctagtaattgaagggatttcagtaaaattaactaataagttaataagtaagttaacggaaaatagtgttgctacaattatttgtgatgataaacatttaccatcttcaatcattctaccattaaatgtacatcatagatcatataaagtattaaagcaacaacttaatcaaagcttacctttttcaaaaagaatttggcaagttattataaaacaaaaactatataatcaaggaaaatgtttagagatattaggattagatggatataattttttgtataatttatctgaggctgttgaaagtggcgataaaggtaatagggaggccattggagcgaaacattattttaagtgtctttttggagaaggttttacccgtgatgatgctaatggaattaattcagcattgaattatggatatactattatgagaggtgctgtagcaagaactttagttatgtatggcttcaatgctacattaggagtaaatcattgtaatgaattaaattcatttaacttagcagatgattttatggaaccttttagacctatagtggatttgtgggtttaccaaaatgttagcgaagatagtattttaactaaagaagatagaattcaattggtggatttagtgaattatcagtgtgttattggagaacaaaatcaatcagtattaaatgccatggataaaatgatagcttcctatacaacagcgtgcagtaagaaagattttagattattaaagactccagaaattaaacaactggaatatcattattatgagtagaaatttcatgagagtaattgtattttttgatttacctgttgtaaaaagagaagagagaaaagaataccagatatttagaaggtttttattaaatgatggttatacaatgattcagtattcggtttattctagaatttgtaatggaactgatggagctaagaagcatataatgaggttagtaaaaaatttaccatcgaagggttctgtaaggtatttgcaaattacagaaaaacaatattctgaaatgaagttcttggtagggtctccaaaaccacaagaagaatgtataaattcttctcaattaaatgttttttaattagttaaaacccattgaattgtattaatatcaatgggttttagctttggtattatagcatatcgaaaaattactaggaactataacggtagacaagttgttgccaatgatgaagatattatagcatatcgaaaaattactaggaactataactaataattcaactaagttactattgtcaagattatagcatatcgaaaaattactaggaactataacggtgattggaaaggaactgaggaattggcgattatagcatatcgaaaaattactaggaactataacaaatcatgttcaagaaatattaaaaaatatattatagcatatcgaaaaattactaggaactataactagatatccagtatggtatatggaaaagacattatagcatatcgaaaaattactaggaactataactgtattaacatcggttatttgcccagttaaattatagcatatcgaaaaattactaggaactataactgaattaggggcagagcttatcttctgtgattatagcatatcgaaaaattactaggaactataacttctactattaatctagctacaaatagataattatagcatatcgaaaaattactaggaactataacataggatatcgtgtcggatacgaagaacaattatagcatatcgaaaaattactaggaactataacataattaccatccatatcaaatccatcacaattatagcatatcgaaaaattactaggaactataacaatcaatgtcggttaggttttatactctatattatagcatatcgaaaaattactacaaactataaaacatattattaataaaatataaactatataatatgataaagtgttaaaatttgttggaaatgatataatgataaatatataatattagacatttatatttaatagtaaattaaattttaaataataagtttttgcatagaggtgaaaaatgaacttacaagaaataagaaattttcttaaggaattattttcaaaaccgttaggtattggaaataagcgccacattgtattttggtatgatgaaaataaagattttatagatgaaatagatggtttcgatttagaggacattaaggttattaagttaactgaaaataatgctttttgggtaaagcattatatagaaaaagaagatgaaactagtaatatattgatatactcaaatatgaaaaagccagatccacaagaagattggctttatgatattttttcttatagtcaggaattctctactgatagagcaactgttataatgagggaattaaaagcatttgattcattactaaagcaagagtttgaaacttatagtgtattttttaagaataaagaaagaatattaggatttaaaaatttaaatatacaagaatataccaaggaaaaaattcatataggtgttcttgcagttttaactaaagttaaagtaatggatattgaagagatagttaaggctatcattaaagattatttagatggatataaaagaatatatgaagatataaagaagtttggaaatattgatgctttgtgggggttacttcaaaagtatttcggatattcctttgaagaaaaaagcatagagcgatttatggctatgctattagtaactactatgaatgaaaatattaaatttgagtttccaaaggcatatactacctacatatcttcaaaggttagaaattgtttagtatttataaatcatttcatgaataacgttaaagatagtcaatattatgatgagatgcaagagttaatagcaactaaattaaagattgcacaattattagaaaaaatagatactgatgaatttataaaatgtgaagtttttgaagaagttgataagttaattttaacaaggattacaacacttttaaaagatggtgtagaagagtatgataagtacttaactatattagcatcaagaagaacattacattattatcaaaagtatgagagtgaatataaggctataaaatgggctataaacttgttaaacaagaagaagtcattaaattctatgataaagacagaaggctcttttgatatggttaagtcttatataaaggattattattatatagataaagcatatagaaaattctattaccattatgacaggtgtcaatggaaagaagaactgattgatttaaaagatacaattgaaaatatctataacaattggtatctacaggagttatcaattaagtggaatgattcaattaaaagttcaagttcttggagaattgaaggcttaaagcaacaggatagcttctatagagagaatataaagtttaaaggcaaagaaagaatatttgtgataatatctgatggattaagatatgaaagtgcagaagaattaaataccttacttactaatgaaagaaaaggtaagagtgaactttattatatgcaaggagtattgccttcttatacaaagcttggaatggcatctcttttacctaatgaaactatagaaattaatgataaatatgatgtcatagtaaatggaataagtagtaacggtacagataatagagactctattttaaaaatggaaaatgagaaatcattagccattacttatgataaagtaatggacatgagagatgctgaaataagaagggcattcgcggggttagaggttgtgtatatctatcataatactatagatgcaaagggtgatcatgctttaacagagagagaagtatttgatgctacagaagaagcatttaaagaaataattactttagtgaataagttagttaatagagtaagtgcttccaatataattattacagcagatcatggatatctttataaaagaagtgctatggaagaaagtaataagttatctgctattaaacttgatgatggtgaagatagtagaagatttttattaacatctagagaaaatttagttgaaggcacaataatgtttagtatggattatttactaggagaaggtcctaataagtatgttataactccaaatgggacttcaaggtttaagatacaaggagcaggcgctaattatgttcatggaggagcaatgctacaagaaatagtagtaccagttattaagtttaaaaatgatagaagtacatcatctgttaatgatataagaaaggttagagtatcattaacaagcattaatagaaagataactaatcctataacatttctagaattcttccaagataaaaagttagagaataaagtaataggaaagaaaattagagcttattttgaggatgaagaaggaaataagatatccaatattaaaactataatagcagattcaaggtcagaaaatccaatagatagaagttataggatagagtttgttttagaaagtagacaatacgataaaactaagcaatatttcttagtaatggaagatgaagaaaatgaaaatggagaatatgagagaataccatttaacatagatattgcaatagttgatgattttagattttaaaaaggcatagctttaagctatgtcttttttaatatgtgcttggtattaaatttagaaatattaaatggtaagagttgtatactagaagttgaagtattttgcttggagcatttttaatagataatttataaatcagattgatattatgatgtaataagagttttttaaaagtataagtaacaccatttttagttgtttttaaagtgccactagacaaattccaagtatataattttaatatattctctagcttttcaatatctttagcggtggttttagaagtattaatattaagagtacatacctttatgtttttacaatgagaagtagaaaaaattaagaatattttgtttgagtcatggtgataaaaataaatcttatttaaaagatttaaaatatttattttcactagtaaggtcttttaatattggcaataaaaatatctccctaaagatataacttctagttgtataatattaagctaattatatttttgttacaattaaattagatatccaagttaatatagtaagaggagaatagacttactaattagagttgtagataacggatttatatgtgatcataaggtggatagtagactatggactaatcaaataaaaaaatataaggaatgtttcattattaagtgaatatggagggatgttaatgtataatccaaaggaaatcagtaaattttataacaattatggtgagagggagtggcagagactagatatgacaccttatgataggattaattattaccttcatatggattttcttaagggctttataggaaaaggaaagaagatactagatgctggctgtggagctggtagatttagtgtggagcttgcaaagttagaaaatagagttactttatttgatatatctaaagagcagttaaatattgcagaagataaattaaaagaaaatgacttaatgagctatgtagatggtatcataaatggagatttagctgacttatcagtttttgaggataacacttttgatacagttatttgttatggtgcaccgcttaattatcttttagataatgcggagaaagctgttaaagaattagttagagtcactaaaccaagaggacaagttttagttagtgtaaatagtaaatggggagtaataagaactcaactaggaagagaagactttgactatgtatctttctttggaaagccggattattggtatataaatgaagttgtagaaactggggatttaccaaagcatgagctagtagctcatcctgaaagacacttctttgaagctgaagaattagaaagcttattactaaagagtggattaggaaatataactttaggtggaagtccatgtatatctagtggctttagaaaagccgtaaatgatattgaaaaggatgaagtagcatggaatactttacttgaaatagagctgaaatcttactgcaaaagaaccctagctgataatggagagtttttactagctagaggaattaagttataaacaaagtaaaagaaattatataaaaatatattattattcttatacaaaccaatagaggatgcacttatattattaaagtacatcctctattggtttatttaaattatttttaagaaaggcaattttatagaattagatttctacttcaaacatccagccttctggtgcttctacatcaccagtttgaattcctactaatgtattataaagtttcttagttacaggaccaacttctgtttcgctgtagaaaacgtgtttttctccgttatgttgaattgcaccgattggagtgattactgcagcagtaccgcaagctccagcttcagtgaattcatctaatttatcaacaagtacatctctttcttcaaccttcatacctaggttatgttcagctaagtataataaagatctcttagttatacttggtaatatagataaagatttaggtgtaataaatttattatctttagtgattccaaagaagtttgcagcacctacttcttcaatttttgtatgagttgctgggtctagatatatacaatctgcaaatccagctttaactgcgtctgcatgaggtaataagcttccagcatagttaccaccaactttagcagcaccagttcccataggagcagctctgtcaaattcagaagtaataaagtttactggagtcattccgcccttgaagtatggtccaacaggcatacagaagattccaaatatatattcgctagcaggacgaacaccgatgttgtctcctactccaattacataaggtctaagatagaatgtagcaccacttccgtatggtggaataagtctttcatttgctttaacaactcttctgcaagcatctaagaaaaactctactggtacttcgggcattaaaattcttctacaactttcatttaatcttttagcgttttggtcaggtctgaataagtaaacttttccatccttgtgagtatatgcttttaatccttcaaagcattgttgtccataatgtaggcaagttgaaccttgactaattgttattttgtcatcatcaactagattgcctccatcccattgtccatctttataatgagaaataaagttaaaatctgcttttaggtaactaaaacctaattcaccccaattgatctctgctttcattataatacctcctacttatacgctttaaacctttacattttaaaaattaaaaatatttagtcaagggttaatgataaatgtttttaaggtttattattatatctatattactatactatcattagttgaaaaaatatgaaaggtcttaaggaaaaatctattgtagaaatttataataattttatattaatagcataaatgaggataatatgaaattgaaattctacttatttacatacaagaaaataagccctataatctataataatggtataattagggggggagtaaatgttagaccaaagaagtttaaaatctttaagaagttttgctacggtgatgctattaattagtatagcaattaatggcttattagtattacagagcttaggctatggctttaactttatattaggaataactatattagactacataaaattttgtagttttgctttattatttgtatcctttgggagcatatataataaagcaaaaaatctatctcaagaagttaaagatggtatgagatccaaaatgagattgatgatattaggaattctgctttttattatctatattgcttttgtggcaatagtaatcaaggatatatattttgttatagctggatttataatgctaggaatatatgtagatatagtaatacttactgagaaaattatagctttaggccttaatgaccataagatgaagtggagagcagcggtggagggaatagaatataatgaagaaggaagtagtatactatggaggtttaagctgtggtttactccttttgaaagagtcccttttgaaaagaggtctattggaggctttaatatttttgctgccatatttttcatgtatgcattaacgcagatgagagaaatacagttaggtagtattataattttactaataacagctaaagcagctttatcaattctagaatatattctaggattatacacatctttaactggagtctgtactggaatagaacatattccaagtgatagaggaaggtctgaatattggagagtatatattacagattttaaaaagaaaagagaagtaacctatagaagttacacctatcctttccttcccgatgatggcaaagttaaagttacccatggcatattctctaagaatgtaattttaattaatgatagaccaatttaattatataaaatattatatgtaagatttagcaaagaaattaatctataatccttattataatctacattaaggggcgatacagatttagaagcttaattgaagtatacagtgttatatataattatataaatataaatagataaacctataaataggagttttgaaaaaaggttttgcaatctgctaatctatagtttaaagatgttataatgtacaagtttaaactttttttagattaggttattttgcaaaacctttattttatgaaattaaaataattttttaaaacagctcttacatatgatggtttttcctttattacaagacattatgttgtcctttgaaacagtctttagacaaacctcacagatttgtttagaatttttactagagttagtaacattatcatcttctttggcctttctgcataggctttgtgtacttacgccatccaaggctttattttttttattgctaggtggttcataatttattacgggttttttatcttctaatttaactattttataatccatggcataggagctttctccaaagagttcaagctcaaagcgaggattttctttatcatagaattcttcaataataagtcttcttacttgggcatcatttataataagtccacttttttcaaccccatctagaatacttttagttatgttgtttgtatctggatgacgcttttcacttttataataaaccttaagaacggctataagagcctctgtaagagttatacttggattctgaatcctacattcataggctatttcttcttcatatagtgcgtatctatcatgatattttccagtattatagggtaaaatagccctattgttggcattgaaaagtttaaagttagatttagaaattggtgatccttttaccacaactttagcatagttaacatccttcattttacttcctctttctatgattgtgtgattaataacaggtctgaggcatcttcaaaaaataaataagtcagaatgctcgtctattttgtattatctgatgactacccgctctaatactcccatctttgacttgctatttattttcagatgcctaaaataactttattgaataaatattattataccataagaacggatgtttgagtaaaataaaatattttaattagggattatattattttatatggttttaaaacaatattcctgcaatacctgagagtatcattgctaccatagggtttagtttaaactttctaagtagaaggagacagagtgcaaaaataattacagattttatttgaaggctcatttctgctaagttccatgttgaagttcctaggaaggaaagcattagtatagtaccagcagaagatgcgataagtcctatggaagctgaacgaagtcctcttaaaatatttgaaatatttttag

SEQ ID NO: 923 - DNA, 23195 bp, synthetic construct
  source 1..23195: mol_type = other DNA
  misc_feature 1..23195: note = Synthetic
tatctttaatgaacaatcaacttgaatcagcagctaagtttaacttaatagctgactcaataaattcaaacaataaagatgaatgggatagagttgtttttaatttgttaaatgatagtgtagatatattatttatatccccagaaagactcggtaataaagattttatagataatgttttatctaaaatagagaaaaatattggattattagttattgatgaagcgcattgtatatcagattggggtcatgactttagacctgactatagaagaatagtaaatataacaaaaagattacctaaaaatataccattaattgcaacaacagcaactgcaaatgatagggttataaaagatatcaaaaaacaattaggtgatgatttggagattattagaggaccattaacaagagaaagtatatctattgatataattaaattaggtaatcaagcagaaagattagcatggatatcagaaaatttgaaaaacattaatggaacaggtattatatatactttaactgtagatgatacgaaattaataacttcttatctaaaaaacaaaggatatgaagttgaagattattatggtggattaacagctgaagaaagatcgataaaggaatcaaaattattaaataatgaaataaaagcactagtagcaacagttgctttaggaatgggatatgataaagcggatatatcttttgtaattcattatcaaaaacctggtaatgtagtagcgtattatcaacaaattggtagagcgggaagagcactaaaagattcaaatgcaatacttttatgtggtgaagaagatgatgaaatttcaaattattttattaattctgcttttcctacagaagatgaaatggttcaggtagttaatacagttaataattatgaaggattaagtcaaaaaagtattttatcacatgtaaatatgaaaagtggaagattagaaaaatgtttaaaatatttagaagttgaaggagcaatatataaagaaaaatcaaagtattatcctacattaaataattggaagcctaatatggagtattcgaaacaaatatcagatataagaagatatgaattaaaaagaatgaacgattatattaatagtgaaacttgtttaatggagtttatagcgaaagagttagatgataatacagctcatagatgtggaaaatgcaaaaattgtactgatagtagatttaaaagtaatgttgaatttaaaaatgtcttagatgcaattgaattcttaaaaagaaatcatttaacaatagaaccaagaaaacaatggccaactggcttagatttaaatggtaatggaaaagtaaatattctttccgaatacagaatggaagaggggcttgtactttgttcatatggagatgctggatggggtactattgttagaaaaggaaagtacttagaaaataaatttaataaagatttaattaatgcaagtgttaatttacttaaagaaaaagtaaaggagtgggatattgataatatattatatgttccatcacttaaaagagtaaatttagtaaaagatttttcttatagtatagcagagatattaaagattccttgccatgatgcaattataaaaataaaagatacagttgaacaaaagactttagaaaatagtttttatcaatgtcaaaatgtaatagatggttttgatattaatgataatattaaatatttaggaaatgttttaatcatagatgatatggtagattcaaaatggacatttacttattgcacgtatttattgagaaagaaggggatagcagataaagtttatccatatgcattagcaaaaacatcaggaaatgaggggagagaataaaaatggttttaaatgacaatcaattagttacattattattaactacttcattaggaataagtgataaaagtgtaaaaccattaagtttaggtaaatggaataaattagtaaaaaaaattgtttcttctaatttaaaagaacctggagctttattaaatttagaagctaatgaaataaaagaaaaattgtcactatcacaagaagagacagatcaaatatataatttattaaaaaaaggagcatatttagctattcaattagaagaacttaatagaagaggaatatatactttatgtagaagtgataaggaatatccaaatttaattaaaaaaaaattgaaggaatatgctcctgcggtaatattttattcggggaatttagatattcttaatagaataggaatcggaatggttggatctagaaaaatagatatagatatattagacaatacaaagtttatttgtgaaaaggctgtaaatgaggggttaacaattatttctggtggagcaaagggagtagatagttcttctgaaacagctgcttttgagtgtggaggagaatatatatcatttatatgtgattctttagtttcaagaattaagaaaaaagatgttagagatagaatctcaacgggaagagcattatatatgactatggatgggcccaattatccattttctccagctagagcaatgaatagaaataaatatatatatagtttatctaaagctactattattatgaatagtgattataatcatggtggaacttgggctggtgcaattgaaaatttaaagaaggatttaagtataccttttgtaattaataataattcaaagggtaatattgaattaattaaactaggttgtaatagcattgaattaaaatcagatttttcaataaaaaaattatgtgaaaatattaagactaagaataatagtgctagtgttgaaaaaaatgaagaaattgtacaaatgaatttattttcggggttgtaaatttaaaattataattctttaaagaggtattagaaataatatctcttttttataacaaaaagtgtctattttttggtgtaagtgatataataataatataataaacaaaaatgaaaggtattttacaataaggtgaataaaatgaaaaaaccatatataccatttagactaccgcttgaagatattattaatataaatgagtttataaatgaattattagaagcaaataaactaattgcaatttatgaagttttattaagtaaatcaaagttagatcccaatttactattagcaccaataacgttaaaagaagctattcaatcaactagaatagagggaactcaaataactttagatgatatgcttgaatatggagttgatgaaactaacagtacagtagatattagagaggtattgaattattcaagagctcttagtgaaggagagaatttaataaaaagattacccatatcttcaagagtaattaaggagttgcataggattttattggaaggtgatgtaagaggaaatagtagaaaccctggggaatttcgtgcaattcaaaatttcatagggccaccaggatgtactattcaaacggcatcatttatccctcctgaaccacagcttgtaccagaatatatgagtaatctagaaaaatatataaatgaacctactgacaatttaaatgatatagttagaattgctataatacatgctcaatttgaaactatacacccatttttagatgggaacggtagaataggaagaatacttgttcctttatatctttatgataaaggtgttataagctcaccaaacttttttgtcagtgaaagcttagaaaaagataaatttaaatattataagttattaaatgatattagagttgaatattcagatgatacaaaagaattagctattcaaagatggaacgaatggattaaattctttattaacgcaacaataatacaatcaaaaaagaatattaaattaattgaagatatagataatttatataataatacagttaataaaagtagagagcttattaattcaaacaaattaatagatataattaaaataatgtttaaaaaacctatatttataaaaaagagtatactagaatgcgttgatattcctagcagtacattaggtgtatatttgaatagattagaggaagcacatataatttattcggatggtagagtaaggaataagaaatattatttttatgatttaataaatatattaagacaacaatagataatgaggtgtacaagtgaatttacaggaaataagaaactttttaaaagagttattttcaaagccattaggtgatggaaaaactcgtcatattgtattttggtatgatgaaaatgaagattttattgaagatatagatacttttgatttagaaggtattaaagtaattaaatcaacagaaaataatgccttttggacaaaatattatatagaaaaagaagatattaaaagtaatatattggtttattctaatatgaaaaagcctattccacaggaagattggctatatgatattttttgttacagtgaggaattctctacagatagagcaactgtaataatgagagaattaaagattcaagattcttcattaaaagaagaatttactctttataatactttctttaaaaataaggatagaattaataactttaaaaatcttaatattcaaggatatacaaaggaaaaggttcatttaggtgttcttgctgttttaactaaggttaagataatggatatggaagaaataataaaggccataattcgtgattatttagatggaagtaataaagtatatgaagatataaaaaaatttggtaatgtggatgcattatggagtttagtagagaaatattatggatattcttttgaagagagaagtttagaaagatttatggctatgcttcttgtaactaatatgaatgaaactatcaagtttgaattaccgaaatcttattcaccttttatatctaaaaaggatacaaattgtattgtatttataaatcacttcatgaataatgaaaaagataatgaaatttatgataagatgcaagaattagttgctgagaagttaaagttagaacagttattagaaaaacgtgattcagaaacttttatacattgtgatgaatttgaaattatggatagattaattttatcaagagtaattaatttattaaaagatggagtagaggaatatgataaatacttaaatcttttatcatcacgtagaacattacattattataagaaatatataagtgaatacaaagctgtaaaatgggctattaatcttttaagtaaaaagaaggaattattaaatactattaaaacagaaaactcttacaatatggttaagtcttatacaaaaaattatttctatatagataaagcttatagaaagttctattatcactatgataattgtgagttaaaagaagaacttaacgagttaaaagatgttattgaaaatgtgtataataattggtatttacaagaattatctattaagtggaatgatgccatattaagtcaaaattcctggagaatagatggattaaaatatcaggatagattttatatggagaatattaaatttaagagtaaggaaagagtatttgtaataatatctgatggtttaagatatgaaagtgctgaagaattaaagacattacttacaaatgaaagaaaaggtaaagtagaattagattatatgcaaggggtattaccttcttatacaaagttaggtatggctgctttattacctaatgataaaatagaaattaatgataaatatgatgtattagttaatggagttaatagtagtggtactgataatagaaattctatattaaagatgcaaaatgaaaaatctttagcaatcacttatgatgatgttatggatatgaaagatgctgagataagaaaagcttttgttggattagatgtagtttatatttatcataatacaatagatgctagaggagatcattctagcactgaaagagaagtgtttaaagcaacagaagaggcatttaaagaaataatacttttagtaaataaacttgttaatagagttagtgctgcaagtattataattacagcagatcatggatatctttataagagaagctatatggaagaaagtggtaagttatctggtataaaacttgaagatggtgaagataatagaagattcctattaacttcagatcaaaaagaagtagaaggaactattacatttagtatggattacttattaggcaatgaagctaataaatatgtaattacaccaaaaggagcatcaagatttaaagtacaaggagcaggcgctaattatgttcatggtggagcaatgccacaagaaattatagttccattaataagatttaaaaatgatagaagtacatcatcaaataatgaaattagaaaagttaagatatcattaacaagtattaatagaaaaataactaatataataacttatttagagttcttccaagatgaaaaaattcaagataaagttattgtacaaaaaattaaatgctattttgaagatgaagaaggaaagagaatatctaacgagaatattattattggagattctagatctgaaaatccacttgaaagaacgtatagagagaaatttgttctaaagagcatgcaatatgataaaacaaaacaatatttcttagtaatgcaagatgaagaagatacaaatggattctatgaaagaataccatttaatatagatatagcaatagtaaatgactttgggttttaaatttaagtaggagtatatttatacccctacttacaaacatttaatagttctttaagtattaattcagatttttcagaagatattgaaaaaatatcaaatatcttaagcgaagtaatctcgcttaaaaacttataagaatattcaaaattgtaatctagaaaattcaaatctatgggaattatggtacgagatattgtattatctttattttcttgtgcaattataataatatcttttttttcagttatattccaaagataaggtattttatatttcaatttatttaaatcaagttttccagaattagtatataaataaacttgattatcaaattttccaagttcatttaaccatatataagggatatgattacaatttaaatttcttagttttaaaattttaggatttgatactttctttaatatttttaagaataaagtggtatctagtgaataaataaagtcagattgcaattttaaaaaaatttgatataaattttttataatacattctttaaagatttcaatttcttcggatgtttttgtatgaccagcagaattaaaaaattcagtataagatttaaatgaacaagattgattacgtttatgagaaaagtgtgttttctcattagaatttttagctctaacaaataactctttgccacaaaaagggcaaaaagtaggactgtagactcctttattttcagattctaagcgataatcgttaatatgaataatacgattattatcagttatactgtaaaacatataattaccttaaaattaatatcaaaatataatattctaaatagtatttaaatagaactagagatggagggatagtgtggaagaattaagcataaaacttaatcaacattttgctggtaaagttgttagaaaagatttaacgcaaaaattaaaacaaggtgcaaatgtacctatatatgtacttgaatatttacttggaatgtattgtgctactgatgatgaagatagtattaatgaaggggtagaaagagtaaaaaatattctagctgataattttgttagaccagatgaagcagagaagattaaatctaaaattagagaaatgacaagatatactgttatagataaaataaaagttaaacttaatgaaaaaaaggatatatatgtagctgaattttctaacttaggtttaaaggaagttgaaatatcagctaattatgttaaagagtttgaaaagttattaggtggaggaatatggtgtattactaaaatacagtattattatgaggaaggtgcaaaaaatcaaaatccttttataatagattcagtaacgccaatacaaatgcctaatatggacatggatgaacttattgaaggtagaaaacaatttacaaaagaggaatggattgatattcttattagaagtataggtatggaaccaactcaacttgattataaagttaagtggcatatgcttttaaggatggtaccattatgtgaaaataattataatatgtgtgaacttggcccaagaggaacagggaaatctcatttatataaagaaatttcacctaattcaatattagtatcaggtggtcaaactacagtagcaaatcttttctataatatgtcccaaagaaaaataggattagttggcatgtgggacacagtagcttttgatgaagtggctggtataacttttaaagataaagatggaattcagataatgaaggattatatggcttctggatcttttgcaagaggtaaagaagaaaaagctgcatctgcatcaatggttttcgtaggaaatataaatcaaagtgtagatgtacttttaaaaacatcacatctttttgaaccatttccagaagcaatggcttacgatagtgcattttttgatagaatgcatttttatcttccaggttgggaaattcctaaaatgagaccagaactaataacaaataattttgggtttattacagattatttggcagaattcttaagacatatgagaaaaacaacctttggcgatgcttttgacaagtatttcaagttaggaaacaatttaaatcaaagagatgtaattgctgttagaaaaacagtatcgggtttagttaaattattatatcctaatggagaatttgaaaaagaagatattgaagaaattttaagatatgctttaataggacgaagaagagtaaaagagcagcttaagaaaataggtggaatggaattttatgatgtacatttctcttatatagataatgaaactatgcaggaagaatttatttcagtaccagaacaaggatcaggttcactaataccagaaggactattaaaatcaggtcaagtttatacaattggagttggaaattctggtatgataggtgtttataaaatagaaacagaggttatatcaggatcaggaaagtttgaaaaaactggtttgggttcagatagagaagcaaaagaaagtatagaaacagcatttagatattttaaagcaaatagtagaaatattagtgcatctatatctacgacaagtaaagattatttaatgcatatccaagatgttaatggtgttggtatgacatcagaattatctttagcagcaataattgcaatgtgttcaggggctttaatgaaaccagtacaaagccaattagctgtattaggttcagtgagcataggtggaacaataaataaagtagaagatttagctaatactttacaagtatgttttgatgctggagcaaagaaaatactattaccaatgataaatgcagcagatatatcagtagttccaccagaattatttgctaaattccaaataatgttttatagtggagcagaagatgcagtttttaaagctttaggtgttcaataatataatttttataataaaaggagaggcttatggcaaaatcaaaatttgttgaagttaaaacaatacaaggagaagtatatcagtataatagtgtttctgaagcaatagataaatctccatttgcattatggtatatactacgaaaaagagaatgtaaaaaatatgagaatcaaataaataaagttaaaagagtaaaagtaaatgatatagtagtatatgaacgttaaaaaaagaatttttattttataaaaacaattaaaaataaaattgacataatatgcaaataatggtataattcatttagaaactaggtaaatatatagcatatcgagagtttaactagttactataacaaggcagtaagccgtgaagtatcccctaggttcagcagagcttaggggtatctttttatataaaataatgagaggtgtatatatttgaaggaaagcataaattataggttaggacttgatattggaataacatcagttggttgggcagtaataaatttagataaagaaagaatagaagatttaggagttagaatatttaatgcagctgaagatccaaaggatggttcatcattagccttacctagaagattagcaagaggaagaagacgattactaagaagaaaagcttatagagttaatagggtaagaaatttaatattaaatgaaaagatattgactaaggaagaattagataatttatttactaaaaattatagtgatgtttggaagtcaagagtagaaggattagatagaggattaagtaatgaggatttttcaaaggttttaattaatttatgcaaaagaagaggctttaaatctaatagaaaagtagataaaagtgataaagaatcaggagaaatattaacaagtataaaacaaaatgaaggaaaaatgaaagagcttggatatagaactattggagaatatatttataaagaagctatgtttgaagaagatacttatacaccacttagaaataaatttggtaaatataaaaattgtgtttcaagagatatgataagagaagaaatacataaaatatttgaagctcaaagaagctttggtaataattttgcaagtgatgaaattgaagataaatatttagatatttttaattcacaaagacctttttctaaatttgatgatttagaaaagatggttggactatgtacttttgaaaaagataaaaagtataaaagagctccaaaaaattcaatatcagcagaagaatttgttttatatgataatttaaatagagtatctataattaataacggagataaaagaaaattaacagatgatgaaagaaatttaattgttgaggaagcttataagaaaaaagaaattaaatattcttcagtacgaaaattgttgaatttaaaagaagaagataagttctcaactttaacatataatggtgataaccaaaaaactgaaaatacaaagtttatttctatgaatggatatcatgaaattagaaaagctgtagagcatggtataggaaaagattattttgaaaatataaaagataatagagaattgttaaataatatagcttacgttttaagtatagctaaaactgatgaagatataataaaacaattaaataaaagaaatgttccggatgaaataatcgatgttgtaagtgacataacttttagtaagtttagcaatttgtctatagaagctttagaaaaaatactgccatttataaagcaaggctatatgtataatgaagcttgtgaaaaagctggatatgattttaaagctatatataatggtgaaaaattatataagttaccagttatagatattgatgaaatagttaatccagtagtaaatagagcattatcacaaacaagaaaggtaataaatgctgttatagatagatatgggtcacctataggaataaatatagagctagctagagaattagctaaaaattttaaagatagaaagcaaatagaaaaagaacaaaaagaaaatagagataaaaatgataaaataagaactgagttgaaatcattaacaggaaaagaacctactggtagtgaagttttaaaatataaactatgggtagatcaaaataatgaatgtgcatatactcaagaaaagatatatatagaaaagttatttgaaccagggtattgtgagatagaccatattataccatttagtagaagttttgatgatagtctaaataataaagttttagttattggatgtgaaaatcaacataagggtaatagaacaccatacgagtattttggagcagatgaagaaagatggaataaatttgagatttgggttaattcaagtagattaaattataaaaagaaaaataatttacttaaaaagaagttctcggaagaagagcaaagagaatggaaagaaagaaatctacaagacactaaatatatttgtagatatatatctaactttataagtaatagattattatttaaagaaagtgaatcaaaaagaaaagtgataaatataaatggtagagcaactgcatatttaagagcaaaatggggtcttattaaagtaagagaagatggagataagcatcatgccttagatgcagcagtagttgcagtagcaactcaaggtatggtaaatgaaatatctaaatatagtaaagctaatgaattaaaatatataagaaataatgatgaattcattgatatagagacaggtgaaattgttgaattagaatcatatagatatttacttaaagataagttaccaagaccatggcttgggtttagtgaagaattaattatgagattaagtaatgatccaatagaagaattgaagaagtctccaataaaatcatatgatgatgaatttacaaagaatacagttaggccaatatttgtatcaagaatgccatttagaaaaattggtggaagattatttaaagaaactatttattcaaagaaaaactttactgaagatggattcataacaaagaaaaacttgaatgaattaactaaaaaagattttgaaaatatatataattataatagtgatagaaaactatatgatgctattaaagaaagattagaagaatttgattggaatgctaaaaaggcatttgaatctgaatttagaaaaccaactaaagatggtaaattaggaccaattgttagaagtataaagattaaatctaaagaaccatttaaggtaaaggatgctataagtttaaatcaaggtacagcagctaaagaaggaatggtaagaatagatatatatgaaaaagatgaaaaattttattcggtaccagtatatagataccaattattaaatagagagattcctaagaaagcagcagtagcagcaaaaacagaagatgaatggatttatatggatgaaagctataaatttaagttttctatttataaaaatgatttaattgaaattaaatacaagaaaaaagcaggatactttggatattatgattcatttgatagatctacagcattattgactattgaagtacatgataattcagaaagatatagaggaattggcataaaagcaggggtttcggagtttaataaatatgaagtagatattttaggtagatattataaggttaaagatggtaaataaatgagttttagaagtgtaataatttcaaatccagccaatttagcattaaaaaataataatttaataataacaaatgaagatgaatttcaaattccagttgaagatatatcagtattattaattgaatcacctgctgttaaagttacagcaagacttattagtaaattatctgaatatagtgtggcaacaatagtatgcgatgataaacatttaccatcatcaatagttttaccattaaaccttcattataaaacatttaaagttcttaaagatcaactttcacaaagtgctgcttttagtaaaagaatttggcaaagtataataaaacaaaaacttaaaaatcaaggattatgtttagagatttctaacaatgatggatataaatttttatataaattatctcaagatgtagaaagtggagataaaggaaatagagaagctataggggcaaagtattatttcaaatcattgtttggagaaaaatttaatagaaatgatataaatggaataaattctgcattaaattatggttatacaataattagaagtgcagtagcaagatctttagtaatgtatggttttaatacatctctaggagtatttcattgcaatgagcttaattcatataatttagtagatgattttatggagccatttagacctatagtagatttatgggtttataagaatataagtatagatgaagatttaacaaaagaaaacagaatagcattagttgatttaataaactgtgattgtattatagaaggaaaaaatcattcagtattaaatgcaatagataaaatggtagcttcttatacaacagcttgtaataaaaaagattatagattaataaaattaccagaaataaaagatatagaataccactattatgagtaatagatatatgagattattagttttctttgatttacctgttgttaaaaaagaagatagaaaagaatatcaaaattttagaagatttttattaaatgatggatatataatgctacaatattcagtttattcaagaatatgtaatggaatagatggaacaaataagcacattaataggcttcaaaagaatattccacctaagggatcggttagatatttacaaataacagaaaagcaatatacagaaatgaaatttcttgtaggttcaccaaaaaagcaagaaaaacaaataaattcaggacaattaaatgttttttaaatagtaaaaaccccttaaaacttagtgttttcaaggggtttaagcatgtgtattatagcatatcgagaatttactaggaactataactaaacttcctaatcctataactttagaaaattatagcatatcgagaatttactaggaactataacacttcaaaaactcaattggatggtggcttaattatagcatatcgagaatttactaggaactataactggaagagtaagaagtgttgaagatggtaaattatagcatatcgagaatttactaggaactataacatgaaataaatgctaaaaaaatagggataaattatagcatatcgagaatttactaggaactataactatttgtatataacttataagacgaaatgaattatagcatatcgagaatttactaggaactataacatctggtgtaatattatcttctggactaaaattatagcatatcgagaatttactaggaactataacacaaatggatgttgtgaaaaagctataggaattatagcatatcgagaatttactaggaactataacacaaatggatgttgtgaaaaagctataggaattatagcatatcgagaatttactaggaactataacatgccatgttgtagtaataacatccttcctattatagcatatcgagaatttactaggaactataacagtttggaggttctttatttgaagagaaaaattatagcatatcgagaatttactaggaactataacagcaggagcagcaatagcaggagctggataattatagcatatcgagaatttactaggaactataacagattagatagaataagtagaaatgttgctattatagcatatcgagaatttactaggaactataactatcttactatagttgatattagatttaaaattatagcatatcgagaatttactaggaactataactattacatcaacttcatatataattcttgtattatagcatatcgagaatttactaggaactataacataaaggagaagggaaaatatgccgttagtattatagcatatcgagaatttactaggaactataacttcttgcgtaagaagataaatcacttgtttattatagcatatcgagaatttactaggaactataaccttataggtgctgcataagacggattttttattatagcatatcgagaatttactaggaactataacaccactatataaagatatgcaaagttgtggattatagcatatcgagaatttactaggaactataactaaaaaaacacgcttaccgtgggacgaattattatagcatatcgagaatttactaggaactataaccatttcaaagaaataaccatctattgttaattatagcatatcgagaatttactaggaactataacaagatacatttaatagattttcaaccaattattatagcatatcgagaatttactaggaactataacggattgcgtagaagctaaagaaggattaaattatagcatatcgagaatttactaggaactataacattacaagttccccctcttcaacatcatcaattatagcatatcgagaatttactaggaactataactcgttattatcttcatatttccatactacaattatagcatatcgagaatttactaggaactataacaataaacttagtactagatattgaggtttcattatagcatatcgagaatttactaggaactataacccatctgataatgttatataacatctgcaaattatagcatatcgagaatttactaggaactataaccttataagggattaattggaaatataggtaattatagcatatcgagaatttactaggaactataacttcatcagcgtaacacccataataagcattattatagcatatcgagaatttactaggaactataactaaaaatgctatcttaccaagtggagtatattatagcatatcgagaatttactaggaactataacgaaaaaacacaagacgattctaaaaagtatattatagcatatcgagaatttactaggaactataacatacaatatacctaaaaaggttagagacctattatagcatatcgagaatttactaggaactataacaagctccagctaatatagcaacggctcccgattatagcatatcgagaatttactaggaactataacccacctttgcgtataatgaatcatcaccatattatagcatatcgagaatttactaggaactataacaagatataaggatgaattaaaagacattgaattatagcatatcgagaatttactaggaactataacgagaaggaactgataaaaaggtatttggggattatagcatatcgagaatttactaggaactataacgtaactaagtgtgctacatccctaactaatattatagcatatcgagaatttactaggaactataacacaaaatactgatataactagggataaaaaattatagcatatcgagaatttactaggaactataacctgggaatatattaatagacgatctatatattatagcatatcgagaatttactaggaactataacctggtgtatttacaaatgtagttgatggttattatagcatatcgagaatttactaggaactataacataggatcattagtagctttgggatttataattatagcatatcgagaatttactaggaactataactaagcaagaactcactaataagaaggggagattatagcatatcgagaatttactaggaactataactagttacttgcagctttaattttttcttgtattatagcatatcgagaatttactaggaactataactctcgaatttaacttttgacatttaaaccaattatagcatatcgagaatttactaggaactataacctaaaggtagattaccattattatattcatattatagcatatcgagaatttactaggaactataacaccttcatttgtagaagttggtaacatcatattatagcatatcgagaatttactaggaactataacagttgttgacggagatgttaaagttgtagaattatagcatatcgagaatttactaggaactataactttgtaaaaatgctttttcgcccttctttaattatagcatatcgagaatttactaggaactataacagttaagtaataactacataaggaggtaatattatagcatatcgagaatttactaggaactataacattagctgaaagtgatgttgaacatagttaattatagcatatcgagaatttactaggaactataacaataatcggtgtagatagtacaaatacaaaattatagcatatcgagaatttactaggaactataactaacatctccggatattacatcagggagaattatagcatatcgagaatttactaggaactataactctatatcttggactaaatatttagattctattatagcatatcgagaatttactaggaactataactaacgtgcaatagtagatataaggttaagattatagcatatcgagaatttactaggaactataacaatataagaaaggggtgattaaatgtttgattatagcatatcgagaatttactaggaactataacgtatttatagtgtggttatgttctatattgattatagcatatcgagaatttactaggaactataacctagaagaagatgactgtccacatcaggtagattatagcatatcgagaatttactaggaactataacgtgggtggctcaatggaatacagaattaaattatagcatatcgagaatttactaggaactataacggtagacaaaagcctacctttttaaactatattatagcatatcgagaatttactaggaactataacagaaggtattgatgcttacaatagtgcattaattatagcatatcgagaatttactaggaactataactgacttaactataggtaatatagctttaaaattatagcatatcgagaatttactaggaactataacataggcgaatatgtagacataatataaatattatagcatatcgagaatttactaggaactataacaaaagaatgtagtttagtttctcaaatgaaattatagcatatcgagaatttactaggaactataacagaaatgagagagttgtgtactgaaaaagaattatagcatatcgagaatttactaggaactataacgttggtatttagtttattgtctatatcctaattatagcatatcgagaatttactaggaactataactgacagagcaatacaacggacagggtttatattatagcatatcgagaatttactaggaactataactgtaactatgaagtatcaactataatagaaattatagcatatcgagaatttactaggaactataacttgcattatctcttgtatgctctctcttccattatagcatatcgagaatttactaggaactataacagtagagagtatatcaactgaaatatataattatagcatatcgagaatttactaggaactataactaaataaactaaagatataagaaaaggagaattatagcatatcgagaatttactaggaactataacttcttgtgctgatacagcattaagtatcttattatagcatatcgagaatttactaggaactataacccatttttattactttcaaatgcatatgaaattatagcatatcgagaatttactaggaactataacctaaagatactccttttggtaggggtgaagattatagcatatcgagaatttactaggaactataacagctttaggtttatatacatttatgaattaattatagcatatcgagaatttactaggaactataacaaagtggagattatactttaataaatctaaattatagcatatcgagaatttactaggaactataacaaaagccttgaaactatctattgagtaagcattatagcatatcgagaatttactaggaactataacgttacgctactaatagaattaaagtgcctaattatagcatatcgagaatttactaggaactataacttgaagagcattactactatatcaatgaaaattatagcatatcgagaatttactaggaactataactactgctcctatgctatctattgatgggaaattatagcatatcgagaatttactaggaactataaccttaatcataccctctggtgttagccttttattatagcatatcgagaatttactaggaactataacacctccaacggtcctaggagagtgataaaaattatagcatatcgagaatttactaggaactataacttaaataagctttaaattacatttaaacacattatagcatatcgagaatttactaggaactataacaaagtggagattatactttaataaatctaaattatagcatatcgagaatttactaggaactataaccaaaacaactcttttaaaaaccttcttaatattatagcatatcgagaatttactaggaactataacaattacttaactggatttagatatttagcgattatagcatatcgagaatttactaggaactataacgctatgtgcattacactataaaaataatttattatagcatatcgagaatttactaggaactataacaacaaattgaattaataaaagaaagtggttattatagcatatcgagaatttactaggaactataacacatgaacatctacaaagaataatggttcaattatagcatatcgagaatttactaggaactataacagcaggagcagcaatagcaggaactggataattatagcatatcgggaatttactaggaactataaaaattatagatattcaatacattaattaatattaaaataaatttctgaaagttgatgaatttttcaatgttataaaatatgaaaaacaaatatatattgaataaagagaaaattttattaatatatttaaatattaatggggtgagaggagaagtaatgtatgggagcagttaatagaacagctcagtgtaaaaaatgtgggagtgttaatttgaaaataaaacaaaacataggatctgtattttattattgcgcggaatgtggtagtagtattgaacaggttatgtatgagaaatatcaaacggcactttctacctgtgaaaaatgtgggaaagatatttttaagggatggattacagttgataagggaaatgagcttcatgaatattgggacgctaaatgtattaattgtaatagtatgcctaaaacagtatatgtagataatgaaggtaatttaattagcaatgtggaacgtgaactattgatcaggatagataagattgaagagttagaagaagaggatgaaaataataagtcaataatcagtagtttaaaatacgaaaaagaagatttgagttatgaaatagaagaaaaagatagtaaaatatatgatctagaaagagagttatattcagctaataaagaaatagagaatttaaagagaaaagtatcacaattagaggatgaagtatattatttagaatatgaaataaatagatattaataatcgagtaggaggaaaataaaataattattttcctcctactcgattattatataaaactttaatattggggtgtcgataaattagaaaaaatatcgaaaacatttcctttaataatattgatggtataattatttagtatgaatataatgtaaaatatgtttaattattatattatataaagtgtaatattaggggattaagataaggagatttaattatgaaagatatagtaaaattaaattatgcaggaactaaaaaagtaaatgaaggtaagaatccaagggttttatatgaacatcaaatagaagctatttctagattaaatgaaattaataagaaagattcttttagttctttattagttttaccaactggtggtggaaagacagcaacagcagtttactggcttttaaaggaagctgtaaataataaaaagaaaattttatgggtagcccatagacatttattattagagcaagcagctgaaacctttaaaaataatgcatattctaatttactttataacataacagaatttagttacagaatagtttctggaaagcatgatagagcaatacatataaaaccatctgatgatattcttataattagcaaagatagtgctattaagaacctagaatatataaataaatggataggtaaagatgaagaagtatatttagtaatagatgaagcacatcattcaattgcaaagtcttatagaaaattaatagataatgtctatgataaagtgaataatgttaaattacttggtttaacagcaactccttttagaacagcagataatgaggaaggtctattagctaagatatataaagatggaatagtatttaaaatagatttaaaggatttaataaagaaagagatattagctagaccaaattttgaagagtgtgaaacagaaataaactttggagataatttaggactaaaggctattaaaagtattgaaaatttagatatacttccagaagatgtagcacaaaaaatagcagaaaataaagaacgtaataggttaatagtaaataagtatttagaaaagaagaatatatatggacaaactattatttttgcagtaaatagggtacatgcatttgctttaagaaaattatttgaagaatcaggagtaaaagcagaagtaatagtttcaggaacttttttagagtttacaggtgttgatatatctaatgaagaaaatataagaaaatacagagatggtaaaattcaagtacttataaatgtaaatatattaactgaaggtattgatttaccacaaactaaaactgtatttttaactagaccaactatttctactatattaatgactcaaatgattggtagagccttaagaggggaaaaagctggtggaactaaggaagcacatgtagttagctttattgatgattggaaagatcgtatagcttgggtaaatccagaacttagtcaagaaaataacgagtttacagataataattatgataatgaaaagaaactattaaggcttatttcaataaaaaagatagaagaatttgctatgttaatggatgaaactgttgatactagtgagttagaaaagattgagtttatgaaaagagtgcctttaggtatgtatgcctttacttttatagatgataatagtatggagaaaaattatcaggtattagtttatgatagtacaaaacctatgtatgaagaatttataaatgatttaccaataatttttgaagctcataatattaatgaagagtatatagaaaatgatgtaatggataaattattagaagaagtagaagagatatatttcaatgaaaacatgttacctaaatacgataaagaagatataaagaatatacttaaatactatgcagaaaaagaatgtaagcctaaatttataacatttgaagatgtggatagacaagctttagatttaaaaacgatagctttaaatataatagataaagatatgagacgttcagaaataaatgattatattgaatctctttggaatgatgaaaatcaaattataaaaatatactttaataaaaaactttactttaaacaacaattacaaaagcaaatagatattttagaaaatccagaagattatcctattgaagattcagaatttatagaagaaactagggaattaga

SEQ ID NO: 924 - DNA, 23192 bp, synthetic construct
  source 1..23192: mol_type = other DNA
  misc_feature 1..23192: note = Synthetic
cgctaaaatggttaataatcgcatggaagtttttaatgaatttacatctaatttaatggtgctagatttaaaaaaagaactgttggagtccaacctagcaaatatacaaaaagtacctagtgccagcgttatattttcagaagtttatatggattattttattgaaaaagatacatttaaaatcaacaaaaaaactgattcaaaagtaactcaaaataatagaaaagttacacttgaaaacttcaaagaaaaactaaaaataagcctttaaattgatgaaaaaaataaagaaataactaacaagaaaaaaattgaatatatagaatataaaattataatttataaatatttgaattaattatagaaaattcaataaatagtattttaaataattaaggacaaatttttgaataaatactttttatttaaaattgaagattcattggaatattctttttcaaataaaagtttatatatatttcttacatgaagaggaggtcttgtttttgaaatcagaggaaaaattcaacaccattttaaagaaactaaagaagggattaaaagctctgggtgaattattaaaacaacctaaagttttactaataatagctttggcttggtatatagaaactcctttagttattttagctgaacaaggaatagtcaacaccaatctaatggacttatatataaatccattaagaacatttatagattttataactagcttttcagttatatgtggattaataaaacttaatttatttttctttataatatttgtaattgcatgtgtagtattacatctatcaggacatgaaactgaaaaattacttgatttaaataaattaaaagtattatcagatttacttcaaaaggaagagggagaagtaacatactctaatagaggtgactatggtacttcaagatgggcagatgaaaaatttatagataagatgaatagagaaagtgtagcttctaaatcagatgtttatattgaaatttctaaagaaggtaaaaatggattagtttatggttattttgaaaatactaagaaaataataactttacctaaaaagacaacacttaatagaaacttcgcagtatttggttcatctggttcaatgaaatctcgttcatttgttattcctaatattcttaatttaatagaaaatgaggaaagcatatttgtaactgaccctaaaggtgaactactagcaaaaacatatgatgttcttgttgaaaatggttataacgtaaaagcttttaatattaataatattccttgttccgatagatggaatgttttaaaggaaataagggatgagcaaactgcatcaatttttgctaaatctataatagataatacaaaaggacaaggagagaaaggtgatccattttgggacaaccactatgttaactttttaaaggcaatagctctttatgtaagatacaatgaacccgaagaaagacaaaacatggcaacagtgtatgagtatattacttacccacaaggtttcacaggattagatgaattaataggctcagttataaagaaagaaaaaaatcacccagcagctcaatcatggattgcatttacaacagccgctggaaatgaaaaagtagctgcaggagttatgtctggactagctataaaacttgatactcttcaaatacctagtttcagagatttacttagtggaaatgatattgaccttacagctccgggtagagaaaaatgtgcatactttgttgtagttccagatactcatggaacatttaacttcctagcaggattattctttacttttgctttcattaaccttatagattttgcagataaattaggagaatctttaccttatcatgtaaacttcctgttagatgaatttcctaacatagcgaagataccagacatagaaaagaaaatatctactgttcgttcaaggggtgtttcaatttgtataatattccaagctttatctcaattagctagtagatattctccagaaatagcagaagaaattcttgccaactgcgataataaaatcttcttaggagcaaatgaaatgactacttcaaaatacatttctgaaatgctaggagatgcaactatagaagttcaaactgaaatgaaagaaagacataagtttttaccaagtagaagtagcaaaggccttgctaagagaaatcttatgacaccagatgaagttttaaagaaaccaaaaaagaattctatcttacttcttacaggtatgagacctattagagcaactaaaatggactatactcaacatagagatggagataagatacatgaacataatatctatgatatgttaaagccttggtccgaaaaatatcatgaacattatttagaagaaatgtgtaagcaattaagaaaagctataaataaagatggagttcttgattatatagatacaagtaatatgggttcaagaactgtagatgaaatggaaaaggaagttgttgctagagctgttccatctgctaaaaatgaagaagaaaaatctaaaatggaaaaaacacttattttattagaagaaaaattaagagttttaagagaagaaaaagagagaaagaaagattttattagtaatgaaataactaattgttatgaaagattaaatgctgatggaaatagtatagagatactagaagaaattaaagctacagtagataagttaagaaaggaaactcttactgaagaggaagaaaaatcacttgatgatttaatgcaagtattaaatgataaatttgataaaatcacagctagtaatatagctgataaagttcaagagataatgaaagacttaaatagttgtaattttgattattcctcagaagaagactttaataagctaacatctattgttcaaaatatggatatccatgaattaaaggatattcaaaaaaataaaatttacaatcttatagaagagataataactaaatatgctataaagggtattaaagctaatataaaatctgaaaattttgatatagcaaataaaagtatccaatgcttatttgaaatattagaaagctcaatagtaatagagtgtactactacagaaaggtcaaaagaaaaagaaatatctgcgttaaaggaaaaaataagagccttagaatttgaatataatgaagctagtgaaaaagctttttataagaaaaaggagcaggaatcacttattaataatttagatgatttagaagataaaataaataaaaacaacccctcttctgttaaattagatattactaaagaagagaaagaagctattataactaatataataaatgattattacgagaaattatctaatagtaaatatgaagatattgagatattagaagatgttcaagaaaatgcagaaaacttaaaaaatagtaataagaatttatcagaagaagataagaggtctattaataacttattagaaatagtcaatattcatttggagagagttcataaagataacaatgaaaatataattgatatagaagatttagaggacataaaagatatagatgatatagaagaaaactctaaagatgaacttccttttgataatgatgaaatggaagggttctctgatgaattattagatgaaaatactagtgaaattaatagtgatatctcttttgatgaatttgatttcattaatgaggaacctactactagcattatagaaaattcagaagaaaatcttaaaaattcagaaaaggaaaatgaagataaaataattgaagagcaaatgaatgttgctgaaaaaaagaataaattaagctataataataatattgaagaggtcaaaaaaaataaattaccaggtactattaagcaaattgataatgcaaagaaaacttcaacagacaaaacaacatccaaagaaaatgattcaacagcggaatcttgctggtaattaacctcaatttagaaaaaatggaggattaatatttatgttaacaaatgaaaacagagaaatttataatgcagaaaaaaagttctttgaggatgctatgagagatgagattgaaatacctttaactattgctcttataaatcctaatataatcaaattaaatccagaagaggaacttaaaaaatatgtaatagaaaaatttgattcaatatttagctctggtttaagtaaggaagctagagaagcagttttcgctaataaatattacgatataatcatggaaaatgaagaaagcacattgtatatacctagattttatagaggggatacagaggggctatctaaaaaacaattatttgagaaaagagaataccttaaaggctatgtaggtgctaaggtgaatgttattataaaagagattatgtataatgaagatggaagcataaaagaaattaaagtttctatgaaggctttaaaggaaaaaatgttagcctcattagaagaattagcagctaaaacaccatttgaagttaatgtaaatgtattggcagctagaagagactatttagtggtggaatggaaagggttagttcaaacaatttctcgtgctaaattaagttatgctgaaataccttcagtaaaagatttttatatttcaaaccaacctaatatatcaagaatgcaaataaagagcatagatgtagaaaaaggcgttatagatatagatagaagaccagtaactgaaaataaatttggtgaaagagtagtaaaccaaaaattctataacgttggtgatgcttgtttaggtaaaattattggggtgactccaaagggacaactattaatagaagttgaacctgaacttgttgcagtaggttatagaccagaaggaattaagttaaaacttaaccaaagagtaaaatgtactgtttcaggtataagagttgataaagaaatttcaaaaaaattaggattcatctctggaaaattaattttaacaagaataactgtataaggaaacaaggttgctagcatagcagccttttcttttacaaagaacagaagaaagtaatagtaggtgaggaaaaaatatgaaaatacaaggcacaagagaattaaaaagcttagtaatagagcttatagatagaatggaagttataactgaaaatgatatttataaaattttaaaggttaatgaagtaaaaccgaataagattctcccatatgatatagctaaacagcttagaaattctgataataaagaattattttctatagctatgaaaacaatagaaagcaaaaatagatattcaatggattttattaaaatggatgatgcttatatatctaatattgctactaagagaattaaggatcatatagatgattataaaaaatttatagatttcttttcagctatcgctaatacaactgaaattgaaaatatagatgatatatgtgttttatcagaaaatgaaataatatttacacacataaataataaaacaattgatttagaaaatgttaaattggttcattataagagaggtatgagagaagatttaatattaaatgaatatgatattaaaaataaagttaaatgtattattctccttattgataatgaagatttagccttctatgaagatataaatgttccattagatataaaaagctttgtttactctaaagtagataacacatatttaatggggcaaaatataaatactctaaagagaaaaatagaagagaaggcaaattaagatgctggtaaaaagagaacttaaaataacaacagatctaattgtaataatgataatttcagatattattgttactctgctagggaaatatgtttatattaataactcaatattaatgctagaaaatttattaagcagattattagtatttatagttttatttggagtatttaaaattaatcctgtgaaaatgataaggaaaattaaaattaaatatataatcttatgtatagttttagctattctatattcaatatttgaattgttaataatgaattctttgttttggtggctaccaacaaagtcaatatatgattactttatgaaaggacctttattaactactaataatctaaggatatatgtatttgtatatagcgtgataatggctcctattttagaggaaattgtatttaggggtattatactggacaacttattaaataagtttaaaaagccgtttttaccagttttaatatcatcatcattatttgcagtatatcatttaagtttcacagctggattaaatgcttggttctttggaattctttcatctgtaatttatattaagtataaaaatattagatataatataacacttcatagaactattaatctaataacatttttacttttattattccattagagattagaggtgaataagagtgttttatttcgcaatattaataacagtattatcaatatttatgttaggacttattataggagctgctgtctattatggaacagctaattaacaaaagaggagggggcttgcaatgagtatcatatcattagcacttattgcatttggaatacttatattactttctgtaattataggtataattaaaaaatcatttgctatagtgaagtttggaatacttatatttgctttttatgtaatatggacttacctaatgtctaagggattccattttaacattgaaaattttttaagcaatattattaaatagatattaggaagaggtgtctttagaagtagagataacctcttctttattatctttttataataaaaataaataattaagaatatatcattttatttttattgcattatttatattaaaaaatacttttaaatatattaaaaagataattagtttgttaaaatccatacattttaaaaatatttttttcttgttttgttatactataaaacaaaaaagattggagtgaatttcatctatgaaagacaaaaatgtatctgaaagaataaatttaacccaaactgtatatgataatgggaaaataaaatctcaagtgaattataaaaataaaaatgaagtcatatatgtagaaaaaactaatgattctgataacgaatattatagtggatttatactaaaatttaatccacaaaataaagagagtagaaaacaagttcatcaagaatgtcgtaagtattcaacttatgaagatgcagctcttataactggatcatcaccttcaactgcatggaatgattgtaataaaaatattcaaaaaacaaagagcttaaagggaaataaagaggaaaataaagaagaaaagagagtatataatatatttagataaaaataataaattgtttttataaagataagaggtatctataaattaatagataacctctttttattatttacaaggatatgattttgaaaaataaattttaaaataaatttaatagtcatatagtctattttaaatgaatatataatataatgaccctttttatgtataaaatatagtataaataacaatagagtataatgttgttgtataaatatagtacacttttgggaagttgctctacaagctggttaacatagttttttttgtaaactatgtcgatagtatttgtaaactatgtcgaccatatttgtaaactatgtcggttataatttgtaaagtatgtcgagtgtatttgtaaatcatgtcgattataatttgtaaactatgtcgattatatcccgatatattctataaaccattcaaaaaatatgtagaaaattttccaaagtatattaaatcaaaatataaaataataatctaaattacatatatttggtaattttggattgtaattagttaattagataaatataaatgattaattattgaaaaaaatatattttgtaaaacatgtcgttgattatttgtaaagcatgtcgatataattatatatatagttataaataatcaagtatagaatgtgggataaagaaaggttaagtattgatatatgaatggtgagaatgataataaggaacttgtgatttatgagaatgaagatttaattgaagtttatgaaaatgaatatgcagttgagatttataataaaaaagatttaaatgaaaatttcataatggatattaatatgattgaaaatccaatgtgtagatatggtaattcgagaaaagttaaaactgttgctaactggcttgatgatccatcattaagtaaaagtgctagagagattatagaaaaagtagcttctgctgacactaaaatggagtttctttcatggactgatagtaaagggaatgatagagaaatcttagcaatatcagctttcaaattgcctggacaatttgctatggatgtttattatgctctaattggtctttatataaaacaaaacagccctattaagcatggtagtgatgataaaggtaataagatatatcatatgcctgaaaatcgtcttagatttaaaatatctgatgtatgcaaatacatgaggttgccaaactctgggacaatatatggtaggataaaagattcaattcaagaacttaaagctgttagtttttatagcttaggaagtggggctttttatgataagaaaaaaagggaatatacagtttctaaaactaaaactatttctttaatagcagattatgaattggctgaagtgaaaaatcataaaggtgtttctcttgcagataaatgtgaagttatctttggaaacttagttatggataatttaacatataattatataaaatttttagatgatgatatatattatagtttgaaaagtggtttaacaagaaggttatactcttatatcacaggaaatatgtatagaaagacacatataaaaagaagcttcgagagattatctcagaagttgccccttgaatatacttatccaagtgagctgaagagaaaacttaaaaatccactaaatgacttagtaaaaaggaatattattagtgattacttctttggaaatgaaatattagtcaatggtattaaagaaaatgcactctatattatctttaagggaactaaaaaagaaattatagatgaattagaaaaggataagaagaaaaagattgaacctccaaaacaagaggatgaatctaatgagaatgagggaataaaattagagtttccaaaggatataaagaaagaattaattgacttaggtattaatgataaaaagatttcttctttaatggcccaacattctaaatatgaattggctaaatatattttatttattaaagataatatccaaaaaggaaagacaaaaaaccctgctggattttttgtttttgcaattacgccaggcgaaaatggaaacatggtaaatgtagaaaagactaatccagaaatagttgagtttatagaggattacaagttgaaggaaggcataaaaactgggattgatgaaaaagttataaaaaaagcttttgataaatatattgaggagcaattaaaagagtttttagaagatgaggaatatgtttataacacaatgagagaatcaattctatctaatatagaattagtttgtgctgataggattaaatctcaaaaaagagtttataatagtgctacttcagataaagataaagaatccatactaaaaagtattgataaatgggaaaagtttcagattgaaagagaagagtctgaaatttttaaagaaatgtttattaaagaaagtagactttatagaaaatttatggaatatcaagaatttaaagtacaatacataaatgggaaaatagaataaaaatataaggaaaatttaaataaaaatataaaaaaatacataaaaagtttacattttattaaaaattggttaaatttggactatttacaccctaaaaatgttattgtataatatagaaaactaataaatgtttatagcatatcgagaaattattagttactataacaagacgtaaagtcgtaaagtagcccctattctctaagatgagatattcttaggagtaggggtatcttttttatatagaggagaaaatgcttatgaaagacataaattataggttagggttagacattgggattacttcagtaggatggtctgtgataaatttagacaaagatagaatagaggatttaggggttagaatttttagcttaggagaaaatccaaaaacaggcgaatccttagcaacacaaagaagaatagcaagaggcaggagaagagttttaagaagaaaaactcatagaataaaaagagtaaggaaactacttattgatacaggagttataagtcaaactgaacttgaaaatctttataatgatagaagtgttacggatgtatgggaagcaagaataaaaggacttgatgaagttttaagtaataaggaattggctaaacttctaattacttttgctaaaagacggggctttaaatcaaataggaaaagtgaacgaagtgacaaagagattagtgttcttttaaatgatataaatagtaataagcagggaatgatcgaaactaatgctagaactataggagaatttatttataataaggttaaatcttcagaagataagtatgctggctttagaaataaagctggtgaacatttaatgtcagtatcaagagatatgattgtagaagaaattgaatttttatttaaaacccaaagggatttgggtaataaattgataagtaatgagttagaagaaaagtatttagagatatttaattctcaaagaccttattctaaatttgagcagctagaaaaattagtaggtaattgcacttttgaaaaggaacttaaaagagcacctaagaattcaatatcagcagaagaatttatattatatgataatgtgaataaattatcaattataaataaaggagcaaaaagaaaactcacagaagatgaaagggaacttataatcaaggaagcctttaataaaaaggaaattaaatattcaagattaagaaagctactggatattaaagataacgaaagattttccacattaacttatagtacagataaggatattaataaaactgaaaacacaaaatttattgctatgaagggctattatgaaataaaaaccggaatagaagaatacggtggtaaggaactttggaactcagtaaaagacaatagagaaatgctaaataatatagcttatgttattaccttgggaaaaagtgataatgaaatttcagagcagctaaaattaagaggtgttccagatgatattattgatgctactttagatttaacatttactaaatttatgaatttatctgtatatgcaatagaaaaaatattgccttttatgaaggatggattacaatacaatgaagcgtgtgaaatagctggatatgactttagaaatatttataaaggtgaaaagtataaaaaacttcctgtgattaatatagatgaaataattaacccagtagttaataggtcattagctcaaagtagaaaagttattaatagcattatagataagtatggctcaccaataggtataaacatagagctttcaagagaattggctaaaagcgttaaagatagagataaaattaaaaagaaacaaataaaaaatagagaaaagagtcaaagtctaaaagaggaaattaaaactttattaaaaaaagaacctacctcttctgaaatactaaaatatagattatgggaagaacaaaaagggaaatgtgcttacactcaaaatgaaataacaattaataatttatttgaagatggattttgtgagattgatcatattattccatttagtaggtcatttgataatagtttatctaataaagttttagttttatgttctgaaaatcgaaataaaagtaatagaattccatatgaatactttggacatgatattgaaaagtggagtaattttgaacagtgggtagtgaatagtggattagattataaaaagaaattaaatcttcttaatagaaaaaattctaaggaagagatgaatattagaaatattcaagatactcaatatatttctaagtttatagctaattatataaataataaattagaatttaaaaaatctgatatttataaaagcaaacaaaaagttataatgataaatggaatggcaacagcttatttaagattaagatggggcttaatgaaggttagagaagagggggacaaacatcatgctttagatgctacagtagtagctgtagctacacgaggattaataaataagatttctaggcatagtaaagctcatgaacttaactggctagctcaacaagttaaatatattgatattgagacaggtaaggaaattaatattgaagaatataaagatgtattgaaagaaaaatttcctaaaccttgggatgaatttaaagaagaacttcttttaagattatccaacaatcccaaagaggaactaaaaaataacaatataaaaacttatgatgaagaatttatagagaaaagtttaagacctatttttgtatcaagagttcctaacaggaaggttaagggggcattgtttgaagaaactatctattcaaaaaaatctttcaaagatggaaaatatataactaaaaagaatttatcagatttaactaagaaagatttagagaatatttataattataaaactgataaaaagctttatgattctataatagctagaatggaagcagctaattatgatggcaagaaagctttcacagaagaatttagaaagccaactaaaaatggagaattaggtcctgttgtaaggtctataaaagtaaaagcaaaacttccatttaaggatgggtttgaattaaaaaaggctaatggaatggtagctaaacaggggcttgttagagttgatatttattataaggatgataaatattatactgtgcctgtttatagatatcagatatcatcaggagagatacctaaaatggcagtagttgctaataaaccagaagaggattgggaattactagatgaaagctataaatttaaattttcaatatatagaaatgatttaatagaggtgaagttcatcaaaaagggaactttttttgggtattttgatggttttgatagatcaactagtgcaattgcaataaaagcccatgattcttctgaaaaatcaagaataggaattaaagtaggagttgctgaattcaataaatatgaagttgatgttttggggaattattataaaataaagttataaaaaatatataaaaaaatatatatttaggttaataaagatatttttaggataaaaaaagcccttgaatctaagtgattacaagggctttcattgttcctattatagcatatcgagaaattaataggaactataactctgatctgtattggtactattcttttatattatagcatatcgagaaattactaggaactataaccacattcccttgtacctatttactcaactattataacataacgttacggtattttcgcaacttttttatatcatattacgtattatattaaaaatattttatgtatttatcaaaaataacattgttttcttaaaaaaggaataaattgaatttcaatattgccctaataaatttatcaataaaaataaaataatttaaataaattccaataaatcattcaaattatttcagaaaaaccttctttttgttctttaatatgaaaaatatacaaaaaaaacaataaattttatatttatggatttttatatatttacttgctataattatatcataaaaaaataaaagcacttagattggaccccaagtactttcgtagaagtatttaatcacctaataataccacttattaagtaattatattgtattatttaatcaattatattctatagtaaaagaaagaaaaatacaatagacaatagctaagttttctaatttttctgagattttagaatatattttgattcaaaatggtaaattttgctttaattataaccttttttgtatagaagatatatcacgtaacctatatatggaagatttaaacaaagtaaacatcaggtgattaatattaatctacttgatgtttatttttttataattccaaagtgtagaggtgtttattatgagcaaaagtttaaaggtagaggagttattattcaataacgaaccaataaccataaatcgtaaattggctaagtgtttaggtcttaaagaggctgtgatttttcaacaaatacattattggttaaagatcaatgagaaaaagaataataattttatagagggaagatactggacttttaatagtgtgaaaaaatggcataaagaagaatttgatttcctttctcttagaacaatagaaagaattcttaaagctctagaaaatgaagggctgcttataagtaatatgttcaataagatgaaaggtgataaaaccaaatggtattctataaattatgataagttactagaagttgctgaaatgagattaagtaaaaaagaaattttatctaagaaaagaagtgaagcagctaaaaaaagtgttttagcaaaaaaagaaaaatctaataaacttgctaaaactagtgataatgccactttagaatgtgtagataccatacaaccaaattggcagaaccaataccagagacttctacaaagacttctacaaagatttctcttagtagtagtaatactgatttgataaaaacttttgaagaaaatatctgtgaattaaaaaagactactagagaaaaatttatgaaatttatatcatcagaaagtaaggagtttgtattagcattaattgaataccaatcatcaatcagaacaaaaagttgggctggttttaataaagctattgaaaattttaaaaataataacatacattctcctgaagatttaaagatgttcttagaggaatatcatgcttctaaaagtaatttaaaaatcacagaggaaaaagaaagtgttgaaatagttagcaatacaatagttaataatgcaattgatgatatgacatattatgatgaaattacagactgtgaatttgatatgacaggagctagaagtttagatttcgttaaggaatatttaaaaaatgaactaggggaattaaaattcaacacctggattgaacctcttcaaatagtagaaaaagatggagctgttattataaaaacattaagatcattccatagagataaaattaaaaaagactatttaaacttaattaaactagctttaattaaaaacgaaataaatggaagaattaagttagtaagtaattgttaattattatgcaataaagtaaagcaggataatatagaagctaaaacaatataaggctagctaaaataagatgtagtataaaaattgtagtattataaaatcgaataagtgttatagctacgaaaaaaatatagttttattaattttaaatttatggaggttacaaaagaaaaaaagtgattaatgatttagaattacaatttgaatttggaattagagagaattatgaatgttatataggtaatttgtatgatggaaatttagataataaagatggaaatttaaatagattaatcgaatatagtaaagaatttgctaggtttattgcatctaattacaatataaaaaatatatcacaaattaatctaaaacattttaaagattttattgatttaaagaaaatagaaaatggagtagaacaagcaactaagataggcatatctttattaagggttgaaaatattataaatataattaccatactaagttgtatttctcatataatttgcatgataatttcactgaaaatcttgaagctttagataaatcttatatatttaatttaaaaacttttttgaatgatgagtatttcaacattttaaattttttatactattgtgaattagaatataagtatatagagtgtttagatgatttaaatataattgttagagagaatacaatttatatttatataaaggattttatttataggatttttgaagttgataatattactaaaaagcattttaaaaatttagcagacttcactttagagagtcgttttatattatctaaacgcaagacaacagtaagaaaatatttcataagaattttaaataaaaataaaatatatagggaaaatttttttaagaagttattaattacaagaattaatgagaggtatgaactgtggaaaaaagcaagaataaattaggagtttatgaaaatattttattagcatttgattttgcaatgataaactcaaaaacatttgaaaagagaactgaaaagaataataggaatttatttcataaaacagaattgtattcagataatacaattagaaatttaagagagaccttcattaattttttaaaatttattttaaataataatgaggaagtaagagttatatctgatattgaattaaaagattttgaaaattatttgggatttaaaagaaatactgtatcagaaataacatataatcacattggagtaagattgggcaaaataataaatattatgcaagttacatatggggatatatttaattttaaatataaagttgattatatttctaagtttgattttacatataatgctaataatattgagcgtatgaaatcagaagactacaccaaaatacttaaagaatgttcacctagatgtagattatacttaaaaatcattaagaatttaaaagttaagatttcagatttacctaaaataaaaatgagtgatatttatataagaaataataatctttttttatttttagatggatatattaaaaaaatagaattaacagatgaaataattaaattacataaagatatgattgaattatttggagaagtagctcccatatgcaatttaaaacctgctagcataagaaggaattttcagagagccttaaacaaatcaaatttagagcagtataaaggttgcttagtaagtttacttaaatctatgtaatatacaagttaagagagtaagaatttaaggagaggaattgaaatgttttttgaaacagaagaaattaagaaagaagataagaaaaaaattgatgtaatttatagtggtaaaaacattgaagaacttatactaaacttagttaaatatagtgatgttaggttagttattgctcatgatgataagcaaagtgagtttattactgagtttaataatcataaaggaaagagtggaagaataaaaaaaagtgtatttgaaatagaagataaaagtgtgaagttaggtaattacgtaactgttcatctaaaaattgcaaggatacttccacttctacaagtgggggaggaattgctcgtagctttagctaaacgataactcttccaattcttcctcaaacatcctttttatttaatatttcttatttactttcactaaaaatagtattataattaatttagtgaaaggggttgagtattatagaaataacaactacttctaaaatacaaattaaacctactgatgaacaaatagagtgtttaatacaaactatggtacaaattagaaaagcacttaattacatctctaaatatgtctatgagaataattgcttaaagcaatctgaattaaataaagcaacttatacttatcttagagagcagtttggccttaaatctcaaatggctcaatcagtaatgaaaactgtaattgctaaatataaaaccaataagtctaatggacatgaatttactttagtacagtttaaaaatttagaatatgaccttgtttttaatagagattattctcttaaacttggtaatttctctataaatagtttaaatggtagattaaaaataccatatgaaactaaaggaatggagaaatattttgatggttcttatagttttggaacagctaaacttgtatataaatataaaaaatactttttgcacattccaatgactaaaggatatcaacaaactacgccatttgaaattaataaaattgtaggaatcgaccttggaattaattttgtggctactgtctatgacagttttggtaagactactttctttagtggaaagcaagttaaacaaaaaagaggacactacaaaatattaagaaaaaacctacaaatgagaggaactaaatctgctaaaagaagaatcaaatcaataggttcaagagaaaaccgttggataagtgatttaaaccactctatcaccaaggcactcgttgaccgatatggtgcaaatacattatttgtacttgaagatttaacaggaattagaaactctactgaaaaagtaaatattaataacagatatgtttctgtttcttgggctttctatcagtttaggcaatatcttgaatataaggcacagatgaataactcaattgttatagctgtaagtccgaagtggacttctcaaatgtgccctaaatgtgggcatattgaaaaagctaacagaaacaaaaaacaacacatattctgttgtaaaaactgctcttatacatctaatgatgataggataggagcaatgaatatttggaataaaggtatacaatatattgaaagccagtccaaagaagtagttgagtaaactcttctacttacgctactgtcaatcagcgtataatgtaacctacgtttgaggagggaggatattatctattggtacctcgtgtagtagagttacaagctcccacttcaagcgaagctaagtggtgagtagttgaccaggatgaatatgaaatgctgaaaaatagttatgaggaattacagaaatttaagaaaaaacataataaaatagtttcaattgaagaacaagaaaaaattaaaaaagtcatggagcaggattaagtcagagacaaattgctaaagaatttaacataagtgttgctactgtaaataaagtgattaataataaatattagtttaaatttaacatgaaacatcatatataccatctattgtcgatttacagcttttatttttcattagaggtgttatttatgttgttatacaaaaatactttttatggagttttagagtggaaagaaagtatctttataaaatattatatttacaaacaataaaagagaattattatcaattgaaatgataatgataataatttaaagagtataacagattctatatttagtagactttatactctttttttattgcaataattaagtgataagtaaaaataagtaagaaaaaataaaatatggtaaaataagtgtgtgaggaaaatattgatattaggtataggaaaaataattatagagttgtatttggacaatacaatttttaagtttttcgtcattaaataaattgttataaatttatacgataaactgctctttgtataaatttaaacaatttaaacatcccatataaaataaattaaaatcctatatttaatattcaaattgatgttttaagcatagaaaagagttaatcatgaggtatttgattagctcttttttattttaaaagaataacttatttgatactaaattatatcctgtgaattacatactagaaattaaagggagggtagctttatgttgaaagtgttaaatgataggagtaattctaaattaaaaaaaattgatacccttaaagagtttgaatacttttttagaaactttgaaaaagatagtttgggagatgaacttcaatataataaagatgcaatggatttagcccaaaaaagttattatgggaatttagaatctggaatacttaatgaatatgaaaaatatcaagggagacattttagtgaaagaaaagcacttttaaaagcctatgaaagatataataactacatagattttagattaaaaaatcctagtgagtttttatgtgttcacagacaagaaaggaaagatgaattaataaatataaaaaattatccaggtatttctgttaaaatagaatggataagcttatttgaattagacgcatatttggacaataatttaatggtttatataattcgagataaaaacaggaagatagaaaaatcggtaaagtacattagcgaaattaattaaaaaggatgaaacaaatgaaaaaattattagatttcttagaagaattaagagataagtataaagaagaatattcgtataatgagaatatagaagatacaagcatagatgaggttgtgagccgagatgataaatataaaatagctcaaataatagtgagtgaaaaaataaagatactccatataataataatgattgattgggtatcaccttatccttatattaatacaataaagtcatataaggaaatgatgaaacctttaaatgttatagtggcagcagcattggaccttttggaatgtatgatttatgctgaagctggagaaacatatgaaaaattccataaggactgtaaagagtctaaaatcttaaaagatgaatatacaatgaatgataaagagtatgaagaatatagtaaaaaacaagaagaaattttgattataatattttgattttggttagttaaaaaaataaaaaagaaaagagctagtagaactgattataaagaagagaaaacctctgttttataatcagtttttttattaatttgaaataggtgaaaatcttagctacttcttagaaataagcaagataaatgatttagagttataatataagtgtagggaaaatatataatattttcctaaaattacattaattcaaaagataaaaagaagtggagaatagatatatggcgagaaataaaaatacaggtaaatatgcagtaatggaaacaatttgtactatgggagaaggtgtagaaactaatctatgtgcaatttgtaatacaagggatgaagctattgaagtggtgagtgaatatagaaagaaacatttacttagcagaatgaatttagtaacaagtgaagaatatgaggaatatacacacactgatttagatactgttttcgattatatggaagatgaatatgagtatcatttattagcttgtacacctcgattataatataaaaataattaaattaagttagtagactaatgagggtattacctattattagtcttttttttatatcttttattatattaaatgaaagatattcacagaaagcaaaagtagtaaaggtatattatactattaatagtatttttagtataagagaagggagttataacaaatatgagcaattcgtatttaaataaatttgcaataggaacagaacataaagatgttgttattcctgtgaaagaaatttatagagatgaaaatggttggagcatatatatagttaaaaatgaaaaaggacatgagtttagaattaaaggtgtttttataactcctttgaatattaagcaccaatataaagttaaaggtattatttctagttttaaaagtgaaaatgactttaaagtaaaagagatagctccaataagacctaaaagtaaaaaagctataatatcatatttaaaaacactaaaaggtcttaaaagtaaagctgatattatatatgaaacatatggagatgaagcaatagatgttttattaaatacacctgataaagtagctaatgatattaaaggtgtaggaataaaaatggcaactaattggagccaacaattacaatcctgttttgaaagccaagatacaatagcaagattgttagaattagaattaacacctagagtagctaaaaaactatatgatgtttataaggaagatataattattaaaattgaaactaatccttattttttaattaatgaggttaaaggatatggattcgataaatgtgataaagttgcaagagaattaggaatatctccagctgataaatttagaattcaagaaggaataatttatatacttaaaaaggctagttctgaaggacactgttatttaccaaaggatatattaatagacagagtaaaagctctattggatataaaacttcaatatacagaaatgaaaagatttgaaagcacttatagaggacaagagagttttgagtatttcattggagaaaaaaataaatatattattcaatatgatgatttattacaacatataaattcatatgaagctgagagtaggaaaaagactaaagaattatatagatatgctatacataatatccctttagaaagactagaaaaggctattgaagaattaaatgagacaaaaagaattgtagtagaggaagatgagtttgtctatttaaaaaaattatataaaagtgaaattgatactgcatattatgttaaagatttagctgattataaagatacttattcaaaagggtatgttgaaaaagtattaaataaaatattaaaaaaagatggaataatcttagaagaaatgcagagaaaagcttgtatagattttaatacatcagagagtggtttttatctattattaggtagtgctggtacaggaaaaacattcaacttaattaaagttttagaggttgctaaggaaattgctagagaaaagcataataaagctttaagtatatctatttttgccccaacagggagagccagtaaaatagcatcacttgctaccaaaatgccttgttctacaatacacaagggattagggtggaaagaagatggatttgagcataatgaatataataaattagatgcagatatagtaatctgtgatgaatcttcaatgctggatataaatttagctaaatcattatttgaagctataagaagaggttcaaaggttatattgatgggagatattaaacaattaccatctgtcgggccgggggctgtgttaaaagatttaatagattctaatacattaagagttgttatattaaatgttataaaaagataagggcttttatctggtacagttaaatatgctaatgcaataatagaagacaaaatgatacctaattcggttgatacagaagatgctttttacttagagagagaaggtattagaagtattcaaaatactgttattcaagcagctaagaatttaattaataataaggggtatgattttaacgatatacagatattaataccacaaaaaactggttcattaggagtttatatgatgaactttttactgcaaaaggaatttaataataaagggaaagataataaaaataaaatattagcaactaagttttcagcaaaaccagatgaatctagtaaatcagtagagtttgaactttacttcacagaaggagataaggttattaatat

SEQ ID NO: 925 - DNA, 23192 bp, synthetic construct
  misc_feature 1..23192: note = Synthetic
  source 1..23192: mol_type = other DNA
taatgaaaaaataataaaagaatttgcactaaaaaagccagtatcaagaatacttgttaatgctccaggggctctaggaggaatcggaggagcaacaaatctagtacctgctctaaccttaggctgtggtgcagttggaggaagtgcaacttcagataacatatcacctatgaatctattaaatgtaaggagagtagcttatggggttagagaattagaagatttaagagaaaatgagcctaaaaatcaatgtgaggataatgactcagtatctgaaaaggatatagagaatatagttaaaagtcttttattaaagttacaaaggtaaatgaggaaattttagaaaatttcattaaaggagcacgaagttatggtcttaggtaaggtggtcgggacagttgtatccactcaaaaaaacgaaaaactcattggaacaaagcttttaatggtaaaacttattgatgacaatgaaaatattattaaggataaatctatagttgctgtagatacagctggatcaggcattggagatactgttcttattgtgaaagggagctctacagggtcaatatataatgatagaaaaatccctactgatgcggctattgtaggtatcgttgacactattgaattagatgaaaaatataaataactaaactagggaagtgtcaaaatcttaagggggaataaaaattatgaaaaagttcagtattaaacctaatatatattttcaaaaatcatcagttgaatacttaaaggagttaaggggcaaaaaggctttaattataactgattctttcatggttcaatcaggatatataaataggatgttaagaattttagagaataagggaattgattatgaagtattttcagatgtaaagccggatcctccaatagaaattgtagctataggagttaaaaaaatgcagataacaaaacctgatgttgtaattgcattaggaggaggctcttcaatagatgcggctaagagcattattatgattgctacagatataatctttaaggaagataacaattatactaagccactatttgttgctattcctactacaagtggtactggctctgaagtaacagatttttcagtaatcacatttggagataaaaaggtgccgttagttgatgaaatgctccttccagatgtagctatattagatgcggattttgttaagtccgtaccatctcaaataacagcagataccgccatagatgctttaactcatgcaatagaagcatatgtttcaatggaagcatgtgactttacagacgctcttgcagaaaaatcaataaaaataatatttgaatatttcttaagagcatatagaaatggagaggatatggaggcaagagaaaaaattcataatgcttcttgtatggcaggagtagcttttgccaatgcttctttaggtattaatcatagcatggctcatgctttaggtggagcttttcatatacctcatggaagagctaatgctatattattaccatatgtaattatgtataatgcaaatctacaaggcaatgaagagacaagagctgcaaagagatattctgaaattgcaaaaatcttaggcttaccttcaccaacagtaaaagatggagtttttagtttgattagtgctataaaaattataatgaaggaaagcaatactcctttgacattaaagcaggcaaaaatagataaaagagaatttattagcaagatagatagtatggcagatacagcaatgaaagatagatgtacagtatacaatccaagagtggttactaaagaagatataagaaaactatttgttgaagtgtatggagaataacaataaaggagctgttgtactaaaaaaagcagtgtgatagttgcttttgcataattgaaatattctacggcgtaaaatattttgagcacgatagtgtaaagttgacttatgaaaaattagacttcgcattacagaaggtaataacatgtaaagacccataaaaaatagttttgtggactttaaaatgcttacgttctttcttagtagctaaagtatgtctacaataaggacaacgaaaaataatagacttattgtgatgaattgtttcgttaaatagctttccgcaaaacttacattgatactgacccttagaaccattattcttatagatgtattggtgcgaaacaccacaacgaggacacacagttttttcaggaacagttgacgcttcagatctacgatttattggcttaactgttttgccatacttatgctcatagcaagcttatccaccttgaatttttgatattctggactatgtgaacccttggaaaaccactgtttaagaggaatatatctggcaataaacagaagtaattgaaagattactcttaaaagatattgattatacgaaattaaataagttatacttgaagtcaagacaatgattgtccttttttgataatgattaatgtgtggcaacttcaattataacaggaaataggggaggcattgtttttttccaaaaaactctataacccttgatatataaaggaaaattcaaaacaaagtgtaaaaaactttacaccaatttgagcattaggtagggaaaaattatgaaaccaaaggtagcatttatatgtgtacacaattcctgcagatcacaaatggcggaagcattaggaaagttatttgcatcagatgtatttgaatcttattcagcaggtacagaaaaaaagccacagataaaccaagatgctgtaaggataataaaagatttatataatgttgatatgaatgaaacccagagttctaaattgcttcaagatataccagaagttgatattgctataaaaatgggctgtaatgtagtgtgcccatacttacctgtaaagcacgtagaggattggggattagatgatccaagtggtaaaagtgatgaagagtttataaaaacagctaaaacaattgaagagaaggttaaagatttagcaaaaagaatccaaaataaggaaatcaaacttgcaccataatccagatattggccaatctctgcaacaagttgcaaatatatagaagagaacttaagatctccatgtactcaagaaataactgtatttagagcctttgcataaatagttaaaaaacataggatcaggttattgttattgacattgtaaaaagtgattgcattacgtatgagtgcaatcacttttttacttatttctaatacatatttacgaaaataagtggaaaacttattagagaaaaattaaaaagaggtgagttatttcatgagtgaaactatattagaaaaagctgaaggacgcgtaagttatcacgattcagttgaggaaatgatgaaaagaattagagaagatggaatgtctaacgtatttgacagatggactaaacaagaaaagatacgttgtaaattctgtcttcaaggtttgagctgtcaattatgttcaaatgggccatgtagaataaatgataaaggtgagcctgaaaaaggcgtatgcggaattggaccagatgctatggcaatgagaaatttcctattaaaaaatataatgggagcaggtacatatagtcatcatgcatatgaagcattccgcacattaaaggcaacaggagaaggaaaaactccatttaagattaaagatgtagataaattaaaatggatgtgtgaaaagcttggcattgatactaatcaagatataaataaaatggctgtacaattagcagaattactacaaagacaacaagagattggtgaagatgatgaaaatcttatggtagaagcttttgctccaagaaaaagaaaagagctttggaaaaaaataaatgtttatcctaaaggcacaattcatgaggaacaaaactgtgtagcaagctgtttaacaaatgtggatggaagctataaatcactggctgcaaaagcacttcgtctaggaattgcaactatttataattctcagattggacttgaaatggttcaagacattttatttggaacacctatgcctcatgaagttgatgtagatttaggtattatggatccagactatgtaaatgtagtgtttaacggacatcaaccttggggtggagccgcaacaattctaaaggcaagaactaaggaagtgcaagaaaaggcaagagcagctggagcaaaaggactaagagtagtaggttctatagaaacaggacaggaattactacaaagatttgaaattgatgatgtttttgtaggattaatgggtaactggttagctatagagccattacttgctacaggtacagtagacgttctagcaatggaagaaaactgttctccaccagctttagaccaatatgctgaaaaatatcaagcaactttagttagcataagcacaattatagatatgccaggaattgagcataaaattccatactatcctgaaaaagtggatgaaatggcagataaattaattgaacttgctatagaaaactttaagaaacgtaaaaataaagttaaacctatggttccaaagattacacaaaaggctattgcaggtttctctactgaagctatattaaaggctcttggaggaaagcttgatccattagtagatgtaatagctgcaggaaagattaagggaatagtagctattgcaaactgttcaactttaagaaatggaccacaggactggaatacagtaaatcttgcaaaggaattaattaaaaaggatattttagtagttgcaggaggatgcggaaaccatgcattagaagttgctggactttgtactcttgaagcagctaataatattgcaggagaaggtttaaaagaagtttgcaaccttttaaagatacctccagtactaagctttggaacttgtacagatacaggaagaatatctatggttgtatctgcactggcagatcatttagatgtagatgtatctgatttaccgatagcagttacagctccagaatggatggaacaaaaggcaacaatagatggaatatttgcattaggatttggtgcatatactcacttatctccaactccatttatgactggtgctcctaaacttgtaaagttattgactgaagaggtagaaggtataacagggggaaagatagctcttggggatgacccagtggaagtagcaaataatatagaagctcatattattgataagagaaagaagatgggattaaattaaattcataaaaaagagaggctaattcttaaaatgacttttaaaatcattttaagatagcctctttttacgtttttgtttatgttaaactaacattcagcatcatcaaaagtactccacttaacaatatagctattcctttaaaatttaattcctcaacagaatgttttttaaagttcttgtggtaatctgttgattgctgctgttgctttacgtcctcaagagtttcatttgcaatatattgaacattatttttatcaaggcctaaaagagaagcttctgaagtattccttctcatcatcaaaaaaagcccaattattataactcctaagcttacataaaataatatatctgtaaattgtttttcaaatgattttgaaattatccatgatataaaaccaaatagtgtagcaattataagagaatatagtaatagatttatatcatgctttggtttggaaactgccagtttaatcacctccataatatttttagtttattaaccttgaagcctaatatagcttatatctggctgtgcaatagaagtttcccaactaacaagataatcattagttgtactttcagcatgaagacttcactataaattagacataaattttaaaaaaaatgtttcaaaaaaatgaaactttttatagatgtttttatcttatatatgaattaacaattcaaagttaatgtaaattttttatatgggactaatatatcaagattaagtaaataaatatagtgacttagttatttgggattgactgtttgccataacagttaatcctgttttagttttttgaagttcaagagtcttttgtttttggtattattttgctaaaatttcgaaatatatgtggcatagaagatacaatatttttaatgcgcattttgttgaaactgccctcaaataaacatataattgtttggggagatgatagcgtggagagtataataaagactttaaaaaatgaagtagtttttactggagctttgatactagctataggaacatcttttatatctattccaaagctagattacatagactttaaggtattgttttctctatttaatctcatgcttatagtaaaggcatttgaggaattaaaaatcatggacaagttggctgttgaaatattaagcaaatataaaaattcaagaatggtttctttaatattaatctctttaacctttataagttctatgtttgttactaatgatgtggcattgataacttttgttccattaacattgattatagggaaaaagactaaaatagaagttatagatataataatatttcaaaccttggctgcaaatataggaagcagtcttacaccaatgggaaatccacagaacttatttttattctcttattacaaattaaaagctggtgctttttttagaataactgttccgttggttgttatgggaactatatggctttttttaataaacttaaggactaaaaatatttctctagattttgaattaaatcctatatcaataaaagataaaaagaaggcatcaatatatggaattctattttttataatcataatgtctgtatttaatgttatagattataagttagcttcagcattaactataattgtagtattttttctggacagagagcttattatgaaagtggattactttttactatttacctttataggtttttttctttttataggtaatgtatctaatagcacaggtgttcattcagttatgaagtatgttttaggtagtgagaaaaaaagttattttgctgctattttgttaagccaaattataagcaatgtgccttgtgcagttttgctagctggatttacggaaaattggagagagattttgcttggagtaaatataggaggaatgggaacgcttatagcttctcttgccagcgtaatatcttataagctctatgttgccgattttccagaaaagtctaagggatatttaaagaaattcaccatatataatttaataagtcttgttgtttttataatcataaattatattatactatagtcgaattatgtatatttgttgtatattataaaatattgtgtctgatatgtggtaataatataattagtttaacaaatatatgattataaaaaatggggtttaaaggagtaatctctactatgaaagaaataaccaaatatgaaagccttagacagcaagttaaagcctacgagagaatttttgatactgtacgagttgtagatccagttacaaaaaaagctactatatataaagatgataaagatatttccgaaaatataacctgctattcaaggtggttagatggtaatgagtgtaaggattgtattattataaaggcactaaatcataaaaaaacctttgtaaaaatacaaaataatgcagataagatgtttttgatgtttgctgtgcctttagagcttaatggagacatatttgccttggaattgattaaggatattacggatatcttggttttcgaaacagtttatcaatgtgaaagtcatgaattacggaatattgtacaagatttgaatactcttataatgaaagatacattgactagtctttacaataggagatacattgatagaatattgccagaagaaattgctagatgtgatgataaaaatcctttatctattgccatgattgatgtagaccattttaagagtataaacgatacctatggccataatgcaggtgatattattataaagaagcttggacagatattatcgaattccattagaaatgatacagattgggctgcaagatatggtggagatgaatttttaatatgcttacctaatacggataataaaaaagcgtataaggttctagaaagaataagaaaaaatgtggaaaagataaacataaaaattgaaaatataaaaataaaagtaactgtttctggaggattatatacattaaataataatatcttagcgcctgttgatttaattaaatatgcagatgataaactatataatgcaaaagaacaaggaagaaataggatagcatcatagaaataataattaagaaaattgcgctgcaattttctttttttgtttcacgtaaataggcattattacatagtatgaaatataaccaattcaatatggagtgtgttttagtgatatatgcactaatattagccggtggaaaagggacaagactttatccattatctcgtgagaaaagtccaaagcagtttttaaaagtcataaatgataaaagctttttacgcaacactgtagataggattactcccatagtaaataaagaaaatatatatgtggttacaaataaagattatatagataaaataaaagaagaattaccagatataaatgcagaaaatatttttacagaacctgcaaataaagagactgctacctgcataggtctttcggcagtaaagcttttaaaaaaggataaggatgcagttatgctagtactgccatcagaccattttattcagaatgaaaaattgtttatagatacattaaatcaagcaatccagattgcagagagaaagagagggcttataaccataggcgtaaatcctacaaggccagaaacaggatatggatacattcaaatgggagatagagttgcgggggatattccaacttttaaggtagctagatttactgagaaacctaacctggaagtggcaaaggattttttgtttgatgggaattacttatggaacagtggtatgttcgcatggagagcagatgtattcttacgggagatggaaaagtatcttcctaaaatgtacaaaagtttaatggaaatatataaaaatgtaggaacggataaagaggaagaaacaatagaggagcagtataatctaatagatggtatctctgtggactttggaataatgcaaaagactagaaaggcatacgttataaaatcagagtttgaatgggatgacattggaagcttctctgctatgtgcagatttttaagcaatcacagaggaaacagtgtatcaggaaatgctttcatggaacaaagcgaaaattgctttgtgtttggaaaagaaaagcttatcataggttttgggattaaagacttgattatagtggatgcaggtgatgtgcttcttgttatggataagaacaaagatcaagaaataaagcatttagtaaatattttgcaggaacaaaaaggatatgaaaaatatctatagattagatttagggccatgatgcaatttgtgtttaatgagaattgtgtcatggccttttttgagttggttttgatatttaatatttttatatattttcatatattaatcagttttatgaatttaagtttaggaaatagacgtcaataaaaatagtattagtagattttgtattacgttatttaaaagctaacttatatatattttaaaatttgtttagcaggaaagatttttgaaaattttcacgtatagttttacaaacaatttttagtgataagtgtatttttattatagcagcgaaatttattaagatggatttataagatagaaattaatatcaatatttttggaatatgttgacatagatgtaggaaatatatataataaactcataggaactaaaaaattatagcatatcgagaatttattagttactatgacaaggcattaagccgtaaggtatcccctgagtattttactcaggggtatccttttttttatataaaattagtgttaatatatgtatataataaataaaaatgttaaaaatcataatatgaggtgattttatggaaaaccatatcaattataggctgggtttagatataggaattgcatcagttggttggtcagtaataaacttagataaaaaaagaattgaggatttaggagttagaatatttaatgctgctgaacatcctaaagatggttcatctttagctttgccaaggagaatagctagaggtagacgtagattgcttaggagaaaggcctatagagttaaaagagtaagaaaattaatagtagattataatattttaacgaaagatcaattgaatgatttatttaaacaaaaatgtcaaaatagtgtatgggagataagagttaaggcattagataataaggtaactaatgaagaatgggcaaggctactaattaatttgtgtaaacgaagagggttcaaatcaaatagaaaaaatgaagctgatgataaagaaactaaaaaggttatcaatagtataaaaagcaatataaaaggcatgaaagagtcaggatcgagaactattggtgagtatatctacactcaaacattatcatctggagacatatctaaaagctttagaaataaagatggacagtataacaattgcgtttctagaaaaatgatagaagaagagataaaaattctttttaaaaaacaaagggaattaggatgtgaatttgcgtcagaagaaattgaagaaaaatatctagctatattcaattctcaaagaccattttcaaaatttgaggatttagagaaaatggttggattttgtacttttgaaaaagcttcaaaagaaagaagagcacctaagtgcagtatatcagctgaggaatttgtcttatatgacaatatgaataagctatctatactaaataaaggtgatactagaaagttaactaatgaagagagaaaaattattgtagagaatgcatttaaaaataaggagataaaatattcaaaactgagaaaaatattaaacttatccaatgatgaaagattctctactttatcttatagcaataagactgaactttcaaagacagaaaattctaagtttgtagctttaaaaggatatcatgaaataaaaagtgccatagaaaaatcgtttggaaaagatacctggaatagagttaaaaacaataggactatgttaaatgatattgcgtatgttttatctatagctaaaacagatgaagacataattaaacaattatcattaagaaatattccgagagaaataattgacgctgttttaggattaagttttagcaagttcagtaatctttcaataaaagcaatagagaaaatattgccatatttaaaagatggacaacaatataatgaagcttgtaaaagtgctggatatgattttaaagcaacttacaatggagagaaaagttataaactgccattaattgatattgatgaaatcgtaaatcctgttgtaaatagggcattatctcaaacgagaaaagttattaatgctgtaattgatagatatggttcacccataggaattaatatagagcttgcaagagatttagctaaaaactttaaagataggagcaaaataaaaaaagaacaagaagaaaacagagctaataaagaaaagataaaaaacgaactgaagatgcttatgaataaggagcctacttcatcagaaattttaaaatataggctatggaaagagcaaagagaggagtgtgcttattctcaagaaagaatatatattgaggatttatttaaagtagggcaatatgaaattgaccacataataccttttagcagaagttttgatgatagtttaaataataaggttttggtaaaggctgcggaaaatcagagaaaggctaatagaataccttatgaatactttggcagtgatgaagatagatggtataggtttgaggtatgggtggaacaaagcagtttaagttttaagaagaaaaataatcttctaaaaaagagattttcaagagaagattcaatagaatttaaggacagaaatttagttgatacgcaatacataagtagatacataagcaattttattaaaagcagattaatattcaaggaaagtgacagtaaacaaaaggttataaccattaatggaagagcaacttcatatcttagagcaaaatggggattgttaaaggtaagagaaaatggagataagcatcatgctttagatgcaacagtaatagctgttgcaactcaaggaatggtgcaggaaatttcaaaatatagcaaggctcatgaattaaagtatataaggcaaggtgatgagtttatagatatagagacaggagaaattgttaaagtaaaagatcataagcatctttcaaaggatagattgccagaaccatggctaggatttagcagcgaattaagattaagactaagtgaaaatccaatagaagaactgaagaaatcaccaatatcaacctatgatgaagaattcataagaaaaacagttagacctatatttgtttcaagagtgccatatagaaaggtaacaggcagattgtttgaggaaacagtatattcaccaaaagctttcatagatgaagggtttattgcaaagaagaaattgcaagatttaacacttaaagattttgaaaatatttataattataatagcgataaaaaattatatgatgcactaagagagagattagaggagtatggcggtaatgcaaaaaaagcttttgctgaagaatttagaaaacctacaaagacaggtaaactaggacctattgtaaagagcatcaaggtaaaaacaaagattcctttcaaagatggtattgatttaaatggaggaaaagttaagaaagatggattagtaagaatagatatttacgaaaaagagggtaaatattatgttgtccctgtttataggctggatattcagcagggtaatatacctaagaaagctgctgtggcaaataaggaagaaaaggattggattcttatggatgaaagttataattttaaattttctttatataaaaatgatctaatatatataaagtatgattctaaaggcgaatattttggttactatgatggttttgatagacatacaggtgctattacattagaaagacatgataattcagaaagatatagaggaataggaataaagacaggtgtaaaggaaatttttaaatataatgttgatgtattaggaagatattataaagttgcaaaataggaggtgaataattgagctttagaagtattataatttcaaatccagcaaatctggctcttagcaatagcagtttagttattaataatgatgaagaatttaagattcctatagatgatatttctattttagttattgatggagtacctgtaagattaaccaatgctttattaagtgaattaggtgaaaacaatgtagcaactattatttgtgataagaagcatctgccatctgctattgtattgcctttaaatgttcactataagtcatttaaagtctttaaaaatcagataaatcagagtttgccatttaagaaaagaatatggcaacaaattgttaaacagaaactatataatcaaggcaaatgcctagaaatattaaagttaaatggtgtgaaatatttagaagagttatctaaaaaagtagatagtggagataaaggcaacagagaagctattggagcaaaatattattttaaatccttgttcggagataattttagaagaggcaatgatgatggaattaatgcagcattaaactatggttatactataattagaagtgctgttgcaaggacattagctgcatatgggtttaatactgcttttggagtaaatcattgtaatgaattaaatgcttttaatttggcagatgattttattgagccatttagacctatagttgatttatgggtttacaagaatataaagatggatgatgttttatctaaagagaatagaatatctttaattgatttagtaaactatgaatgtttaattgatggacaaaagcattcaattttaaatgctatagataaaactatatcatcatatacaacagcatgcagcaaaaaagattttagggtcttaaaattgccagaaattattgatttggagtatcactattatgagtaggaggtttatgagattaatagtattttttgatttaccagtagttaaaaaaagagatagacaagaatatcaaaagtttagaagatttttaattaatgatggatataacatgatacagttttctgtatactcacgaatatgtaatggaattgatggagtaaataaacatatagctagattaaataataatttaccacctagaggctctgtaagatttcttcaagttacagaaaagcagtattcagaaatgaagtttcttgtaggatcacaaaaaccacaagaaaagattataaaggcaactcagttaagtattttttaattgataaaaccccttgaattattgaaaattcaaggggttttacagttcgtattatagcatatcgaaaatttattaggaactataactagcaaatggatgtttctaaacggttcataattatagcatatcgaaaatttattaggaactataacttatcaccgcttattgatattgttttacaaattatagcatatcgaaaatttattaggaactataactaggttttttatttaattttccatttactgattatagcatatcgaaaatttattaggaactataacgtttctaataattcttctgtactgtctatgattatagcatatcgaaaatttattaggaactataacatatgtttgcatttctattgcttaatattaattatagcatatcgaaaatttattaggaactataacccgcctcttaatgccatttcaatgtctatgattatagcatatcgaaaatttactaggaacataagttttgacgaaaatattccggaagaatttaaattatagcgcatcgagaatttaataagccagtcatccaaacttgcctactttctattatatcatatcaacagtttaccagtagctaaaaaagcttgctagtaataaatgtattttaattataatgaaaaaatttgttaaggcggatttagcgattaaaactaggcgataataagaacgtggattttaagtataaatataaaaaattgctatatattcataattgaaaatatatagatgaaaagggagtttttataacctataataagaaatacctaaaaattggtatagtagcagcgatttttggacttgttatattttttagcagcgtggagtaaaaaagacaaggaatctccagtaattactttaataggtgatagtaaaataactttgacttatggtcaacctttcaatgatccaggtgttaatatatttgataatagtgataagacgttaaagcctgttgttggggatgataaagtagacactaataagtttggcatatatgtaatcacctataatgcggcttatagtactggaaacaaagcgacagaggtaaaagagaggttactgttaaagaaggtacttttcataaaacttatagtatagaaggctaatacaaaataaataagatcatagaaagtaatgatcgtggttatcttttagcatattctcagaatgaaaatttgttactaattaaagtggataatagtggaaatgagaaatggagaagaatttatactgacaataagatgttaactgtagatgaaattaaagaaatgcaggatggtagatttattttataagaaggctatattgcagatacaagttattgtaaaagagttgtaatgatgaattataaaggaaacaaaatatgtgaatataatataaaaaacctgatgccagaaattttggatatgttatagaaacaaaaggtggaggatatgcactaattgtatctgatggaagtgatgatgaatcaaaagtaataaagcaagacaaagacagaaaaacacaatgggagcataaattaaagaatggatattatcagcattctattgaacagactttagattgtagatttgtattatatggaaacaattgttttaataataattatgaaaattcaaatgctttgataattaagttaaattctaaaggaaaaaaggagtggacaaaagttcataaaatagataaaaaaagaaatagaaagaatcttcagatgaaatatatagctctacattatctcagttaatacaaacaaaagataatggatatttaataggaaaaaatgttgatgcaggagtttggggttcaggaattaaatcagatgtgtatgtaactaagttatacaagtctgggaacattcaatggaaaagaaattataaaagaaataatgacataggattaattgaagaattagattccagggaatatatattaggcttattaaattattcggaaaattttgaagaaccagggtatcctgaaattttttataatgccatagtaaagttagatgataaaggcaatgaagaatgagtttattatagagataacaataaaatgatagaaggaatatgtggtgtaaaagacggaggctgtattttgctaagaagtagaataacttatgataatgatctgttagagcatatatcaacaataataaagattaataaggaaggtaagaggtagtggattcaaaatgaaaatgaaattgaactcaaattagtatatgtgacaaaaggaggaggatatatattttcaggagaaggttgtgataaaattacgttgtttaagtttgatagcaactataatatagataattatactgatatggacagaaagacaataaaatacgttgaaactaagacttctacaggagatgaatatataggtgaaactgtagacgatttaagagatggaagaggaaattatgtatttagtaatggggatatatattcagaattttggggaaatgataagtttgatggatatggtatttttcaaagtaaagatggtgctgtaaaaagaggtatatggaagaatggtgatttttatgaagaaggaagatttgaaaataaagtatcagaaatgtgtataggagatataaacggagacaatgagttagaattagtagaatttgttgaaaaatatgatattgatgattatacttttccgcaggatgcagacatagttataaaaaatacattaactggattaactttaaatccaatagatctttcataagttggatatttaggatatatgaaaggagaattaaagaattttaataaggataaatatccagatatttttgtttcactatcttttgggagaagtggtggagaaggatcttatgcaatttattcttgtataggtaataagattgaaaacatttttgatgatgaatttattatgcctaaatacctaggaagctataaagtttaactaagtagcagtaaatatcgaaaaaatttaatatacaactttaactacttaagtttaatgtttatctttagcctatagtagataataaaagtgaagcattcaaatatgtttcactttttttatttatgctccataaccatagtcattatcagaatttaagcacattaaatatgaaaaattttacttacattcattaatttttatatgataaaatattaaaagtaatcataaacttaacagttcaaaacaaagtcatatttctaataaatattatagcatttcataatatgcagtcagtttagaattaattctctataaaataagaagtaaaaaagtaaagggatgataaaggatgtttaatgttggagatttgataatttgttcagcacatgatatttgccgtatatgagatatagaagaaaaaacttttttggaagtgcaaagaaaattattctctacattcaatagaagatccaaagctcaaaattagtgctcaagtggatagtgataaagtaattatgcaggaacttttaagtaaaaaggaagcagaagaaattttagaatccttgaagcagccaggagtagattgaatagagattgatagtcagagaagcgaaatatattctgattgtgtaaagaaaagaaatcgcagagacattgctaagatagctaataccttgcttagagaaaagataaaaatacaagctagtggaaagtgtttcatgaagtagatagaagaattttaactactattcaagatgtactattttcaaaattatcatattcattggatacaacttttgaagctatatacgaaaaagtaataagttatataaatcagagtcaatactagttcttattgataagtaagtcaataaatgataaactttttattcaaaaatcatgtgagtttaaaatctatctgattttttgaggattaatattgcatagttttacaagaatctataataaacaatacaattcaataaacacgtctagaaaaataatagaatcagatttaatcccaataaatacagaaatatgataaactacattaatataggaacaaaaataaatgaggaggatatttatgtacaaaatactcatagtagaagatgacttaataatagctaagtcaataaaaaatcatatacagtcttggggatttgaagcggaatgtgtaacagattttaaagatgtgctttgggcgtttgtttcttataatccacagcttgttcttttagatatatctttgcctttttttaatggatatcattggtgcaatgagataagaaagctttctaaggtacctatcatttttatttcttcagcttcagataatatgaacattgttatggctatgaatatgggtggagatgattttattgcaaagccctttgatcttaatgtgttaacagctaaagttcaagcaatgcttaggcgcacctatgattttgctgggcagactcatcttttagagcataaaggagcaatacttaatataagtgattcaactttaagctatcaaggtaaaaagattgagctttctaaaaatgaaaataagatacttggaattcttattgaaaataaaggcaaagctgtatctagagatactattatgacaaggatttgggaaacggataactatattgatgataatactctcaccgtaaatataactagacttcgtaaaaaactgcaggatataggattgtttgattttattgaaaccaaaaagggtataggatatatggtgaagtaatatgaaggaatcaggattttttaaacttataatttcatattttaagttacatcttaaagggattattctctttttcttatttccatcaacctttgcattagtgttttatctttataatttgcctatagaacctgtggcatatgctgctgtactttatgctctcataagtttaattttattttctatagatttatttcaatattataagcgtaataaattattacaggatttaaaaaataacactacattaaatattgataaattgcctgatcctaaagatataatcgaaaaagattatcaggatttggttcatgctatttataaagagaatattcaagctaattataatgcagaaattagtagaagcaaactaatagactattacactttatgggctcatcaaattaaaactcctattgcagcaatgcgcttaattcttcaaggagaggaaagtgagcagaattctgaactttctatggagctttttaaaatagaagagtatgtggaattcgtacttcagtatttaagaattgagagtatatcctcagaccttatacttaaaaaatatagcttagatgatatagtaaaacaggcaattagaaagtatgctaggatatttattagaaagagaataaagcttaattttgatgaattaaactgtgaggttttaacagatgaaaagtggctagtatttgttatagaacaaattttatcaaacgctttaaagtataccaatgagggaatcatttcaatttatatggacaatttatcagaaaagacacttataattgaagatacaggtattggaataagaaaagaagacttagcacgtatatttgaaagaggttttacgggatacaatggacgatggaataaaacctccacaggccttggactatatttatgcaagcagattttatctaaactttctcatggcataactatagaatctgaagtggataaaggtacaaaggtaatgatagatttttctacaattaaagtaaatacggagtaagatttattgtaaccttacaagaacgtaaggttaaaggaagaagtgtaagccaaagttaaggtgaacatttcttccttttgctatactgaagatgatgataatgcaaggaggaatattttatggctatattagaagtaaagaaacttaaaaaaatatatactagccgttttggaggaaatcatgttcaggctttatcggatgtatctttttctgtagaaaaaggagaatacgtagctataatgggggaatctggatcaggaaagaccacattacttaatattgttgcatctctagataagcctacaagtggtgaagtgcttctcaatgggaaaagcatcatagatcttaaagaacacgaaatttctaagttccgacgtgacaacttgggatttgtatttcaggattttaatctacttgatactttttctttacaagataatatatttttaccccttgtcctttctggaaaatcttttgacgagatgaatagccgcctaaagcccattgctaaaaagctcggaattgataatatattgcagaagtatccttatgaagtttctggagggcagaaacaaagagcagctgttgctagagcaataatcacttaccctcagcttattcttgctgatgagcctactggagcgctggattctcattcaagtgacgagttattacatctatttaatgatataaataaggaaggacaaacaataataatggttactcatagtacaaaggcagcaagccatgcaagccgcgtactatttataaaggatggaaaggtatttcatcaactttatagagcatccatgtctcaagaagaaatgtatcaaaagatttctgatacccttactataatcgctacaggtggtgttagaaatgaatagtatgttttatcaaaaattagctttaaccaacattaaaaagaatggaaagacctatttcccttatattataacttgtatatgtactattataatgttttatatcatggattttatatcagtaaataagggcttagaccgtatgtctggaggaaatagtctaaaaacaatactgaatttaggaacctatgtcattgccattttttcggtgatatttttattttacactaatagttttcttattaagagacgtaaaaaggagctcggactgtataatatactaggtatggagaagaagcatattgcaagggttttgctttgggagaccttctttacagtcattataagcatggcagcagggtttttaggtgggattgtactaagcaagcttatgtttttgattcttcttaaaattttaaattttaaagtaccaatgggattttctatatcaattacttctcttattaaaacagctattctttttgtaattatttttgcattaaatcttgcaaataatgtaagacagattcatattgcaaagccgattgaacttcttaatggtggacaggttggtgagaaggagccaaagactaaatgggttcttactttaattggagttatagcccttggagcaggttattatattgccttaactaccgaatctcctttagcagcacttaatatgttcttcgtagcagtaattttagttatgataggaacttatgcattgtttactgctggaagcattgctattttaaagatgcttaggaaaaataaaaaattttattataagactaagaactttataagtgtttctggcatgatttatcgaatgaagcagaatgcagtagggcttgctaatatatgcattctttcaacttgtgttcttgtaatgatttccactacagtgtcactatatattggaatggaagatgtgctgagaacacgatatccacgtgatattttaataagcatagataatgcatctaaagaaaatatacaaactttagataatattataaaagaagaggcagaaaaaaaagatctttctatgaaaaatgtagttaaatatcgttctataccttttgttatggtacgggataaaaattcctttacagaagcccatgatgattctgtttttgtaagcagcgtatgcatattaaattttataacattaagtgagtataatcacatagaaaacaaatctgttaatttagaggaaaatgaggtgctaatatatagtaatagggaaagaatagattataatactattaatattttaaacaatgagtttaaaataaaggaaagattagaggccttaaccatagataatatagtatcttcaaatgtttataataactactatattgtggtgcctgatgagaagataattgaaacaatttatctttctagcaatcagtttaagggcaaaaaggttaatttattttattactattcttttgatactgataatagtgctgaaagcgagattgtcttagtaaatgatattaacaagaaaatggaagatctatctatagctggtcgctgtgaaggattagaagaatctagagaatctttcttctctatatatggtgggcttttcttccttggaattttccttggagtgttgtttattatggcaacggttcttattatatactacaaacagatttcagagggctatgatgatagaggacgttttgaaattatgcaaaaagttggaatgagcaaaaaagaaataaaaaagtctattggaagtcaagttctcatggtattttttataccgcttgtaacagcagttgttcatattgcttttgcctttaaagttattgttaagcttttagaagcgcttaatttaaccaatgttagtctgtttgcattatgcacagcaggaacgattttagtatttgctatcttttatagtgctgtgtatcttttaacgtcacgagtatattacagaattgttagttagcatatgttaaacagttcatatttttaatatttactatagttatatcatgataacactttaaagtaaaaatattataaaaattcccaaaatagtattgacaagctaattttttgatggtatatttcatctaaacaaattttggggcaatataaacgctatgctaaggagtattaagcattt

SEQ ID NO: 926 - DNA, 23189 bp, synthetic construct
  misc_feature 1..23189: note = Synthetic
  source 1..23189: mol_type = other DNA
tataagaattttgtttgaatgtggacttattgagaatcaaaaaggagatagaaagataaaaactcctattttggagagagaagttaaagagcacttatataaaataggagataaaatatatataaatgcaataataggagatagtgagtaggttaggaggaaacatgaaagatatatatcaaagaattgatgaaatattacctaagataatagagcctaactttagacaaaacaaaggactaggcaatgaagttggattttatgtttttgattatgatccagagtatgaaattttagttagagatagagttaagtttataaaagaaaaagctaaaggtgtatatggattaaatatagtagagtttgatctttatgaggttatattggagattttaaattctaagggatatcttaagaagaactttcacatggaagaaaaaaaaggtagtgaatatatactaaatgcaaccaagaaaactttgagattaacacttgaaaatgatttaatagttcagtatataaaaaatagattagaaggaaatgatatagtgtttttaactggtgtaggaaaagcatggccaataattaggtcacatactattttaaataacttacacaggattgtagaagaacaacctttagtaatgtttttcccgggaaattatgatgggggaacacttatgctatttaacagtttaaaagatgataattattatagagcatttccattagtggataagtattaagtagtgaatgatggagggataagataagatggaatttaggttaaaagatatgttttataaagaaattgatagagatataaaaggggttataaaagtaggtcaggcagatgatgaaaatataaagcaagagttagaagaatatgtagtaacaggtgaattaaataaacatattgatagattttttgaggcgtataagacaggtattatgggaaatacagataaaaatggagtttggatttctggtttctttggaagtggtaaatcccattttttaaagatactttcttatcttttagaaaatagggagatagaaggaaagaaggttattaattattttgatgataaagaattagatagtttcactttagcgaatatgaagcaagcaggagatgtggaagctgatgttattctttttaatatagattcaaaatctgattctgattcaaaggctaataaagatgctatagttaatgtatttaacaaggtatttaatgaaatgcaaggattttgtggttccatgccatggattgcagatttagaaagacaaatggttaaggatggagtttatgaagactttaaaaaagtctttgaagagatatcgggtagttcatgggtagatgcaagagatgatttttattatgaagaggattcaattatagaagcattatctaaaaccactaaaatgagtgaggaagcggcaaaaagttggtacaataaatgcgaagagaattattcattaagcatagataagtttgctgctaaggttaaagaatatagtgaatcaaaaggaaaaaatcatcatgtggtattcttagtggatgagatcggacagtacataggagataatacacaacttatgttaaatcttcaaacagttgtagaagatttaggaactaagtgcatgggtaagtgctgggttatagttacatcacaagaaggattagatgaatttacaaaggttaaaggaaatgacttttcaaagatacaaggaagatttaatactagattatctttatcatcagcaaatgttgatgaggtaatcaagaaacgtatacttagaaaaaaagatggagtaactagtcatttaaaagcactttatgagcaaaaagagtctataataaagaaccttttaactttttcagatactgctgagatgaaactatacaaaaatggagatgaatttgcagaagtttacccatttattccttatcaatttaatttacttcaatcagcctttaacggtgttagagagcatggggcatctggtaagagtttatctaagggagaaagaagtttacttggagcataccaacaagttgctgtagattatatggagaaggatactaatatactaataccattttcagcattctataaaactatagaaacttttctagattcatctataaaatcggttattattcatgcagaaaacaatgataaattaaatgaatttgatgttgaagttttaaaactattatttttagttaagtatgtaaaggaaataaaggctaatatagaaaacatcacaacattgctagtaagtgaaatagatgtagataaggtagaaataaagaagaaagttcaagaatctttaaatagattaataagagaaacattagtacaaaaaaatggtaatgaatatgtattcttaactaatgatgagcaagatgtaaataaagaaattaaaaatataacaattgataatggagaaattactcaaaaagtttccgagatgatttttgatgatatatatgaagatactaaattttcatattcaagaaaatatcaatttacctttaataaaattgtagatgatagaactagaggaccacaaacaaatgagataggagttaaggtaataacggcaaactatgatttggtaggtggttcaagtgaaagtgaactaaaattattatctactagagagagtaatgtaattataaatatttcaagggatgttaactatctagaagaaatagagaatgtattaaagattgatgcttacctaagagttaaaggtggatcaaaatctagcactgctatagaagatattaaagcaaagaaaagtagagaaagagaagatagactaaggagagcaaaatttttaatagaagaggcgttaagaattgctgaagtatatgtaaatggtagccttttagatataaaagaaaaaggtggagtagagagaataaatggagggttaagagccttaatagattctaaatataataaaataaactatgtaaaagagtttaaggaaagtgcgaaagatctctatgacataatggatgctagacttaatcaaatggaattagttgatagcaatccaaatagattagcagtagatgaggttaacactcatatacaaactagttctgcaagaaacctgcaagtaacagttaagagcttgctaactaggttttcgagtgcgccttacggatggaaagacgttgatatacaagccataatagtaactttatttaagaaacaggatattaaagtaatattaaatggagaagtaataactcccaataatagagaagttgtaaactatgtaactaagagagactatgttgagagagttatattaaagactagagaaaaagtaaatcaaaaatatatagatgttgttcgtgatttaaacaaagatttatttggattttcatcattaccaactgatgaagatgggataatggggatatttaaagaggaatgtaaaaaggaactttctagaataaatgaaatgcttgttaactttacatttaaaaaaccatatccaggagaaaagattttaaaagatggtaagagcttgtttacacaaatagtagatattaaagatactattgatttctttgaagaagtttacaatttagaagatgattttttagattatgtagataacattgatgaagtaaaaggattcttttacaaaaaagacaatggaaatatagatttttcatcaaagggtgagcaaagagttatatttgatgatgctttggataagttaaataattatgaagataacaaagagtatatagttaatgatgatattaaggcaattatagaagaaataagagaaattataagaatgcctaaaccttactctaagatacctacaatacctcttttaattgaaaaatatagcaataagattattgaattacttgaagaagaaagtgttcctgtaaaaggttttattgaaatgtgtagaaaagaagtttttgaaactttagatggatatgactttaaagataagttcaaggataatgtaattgaggaatttaataacctttataacagagttgagggtgcaagtaattttgctatactatcgtcaatgccagatcttgcagagaaggttaagttgaagtggataaaggaaatagtaacagaagatgaaactcaaaagagaatgaaggctaaaaaaatagaagaagcaaataagatagcagaaggattaggagataatcaaactaaaactgacacatcatcatataaggtagaacctataccagaggtagttattaaaactaaaacactaagtatgagagagttagttaaaggacaaaaaactataaaaaataacgatgatatagatgaagttgtagaaaatttaagaagaaagttaagagcggaattagaaaaggatacaataattagtttggtttaatacttgtaaagaggtgttatttatggagagaaagtttaatactacaggtgtttgtataccacacttgcattacatggttgacataagccgtaagcttaatagaataaaaaatatggtttgcagcggtgattattttgttatgaacagacctaggcaatatggcaaaactactactatgtatatgctagagcaggagctaaaagatgaatatttagttttaagtattagccttgaaggggttggagacagtatatttgaaaatgaatcagagtttggtaaaagttttttaaaacttttatctaaatcagcaaaatttcagaatatagaaatgagtaaatttatacttaattttattgattatataaatggtttcgataatttatcagaagctattacggaaatagtagaaaagagtaataatagtataattttattcatcgatgaggtagataaaagctgcaataatcagttattcttaagctttctcggaatgctcagaaataaatttttattaaggcagcaaggtaaagataaaacattttattcagtaattcttgcaggtgtttatgatattaagaatttaaagcttaaaattaggaaagatgatgagagaaaatataatagtccgtggaatatagcagtaaattttaatgtggatatgagttttaattcagatgaaataggtactatgctaaaagaatattcaaaagataaaaatatacctataaaaataaatgatatttcaaaatatatttatttttatactagtggatatccttttttagtaagtagactttgtcaaattattgatgaaaaagaattagagtggaatgagaataatatcaataaatcagtaaaagaattgcttcgagaaaacaatacactttttgatgacctagtaaaaaacatagaaaataatgatgaacttaaagaatatgtatttgacttaatttttaatggtactgagaaaacttttaatattcataatccattaataaatttgggagttatatttggatactttaaaaatatagatggaagggtcaaaatatccaacagaatatttgagcaaatgctatacaattatttttcttccaaacttgaaaataaaacagatatgtcaaattataatttcaaagaaaattttatacttgaaaatggattagattttgaaaaaatacttttaagatttcagcagtttattaaggaacagtacagctctattgattcaaaatttatagaaagagaaggaagacttctcttcttggcttttataaaaccaatcataaatggtgtgggatttgactttaaagaagttcaaatatcagaagaaaaaagacttgatatagtagttacatacatttcaaacaaatatttagtagagctaaagatatggcgaggtattgaatatcataaaaaaggattaaaacaacttaaagattatttagatattcaaggtttggacatggggtatcttgttatttacaatttcaataaagacaaggaatataaaaaagaaagagtaaattatgagggaaaagaaatatttatagtatatctttagtcagaaataaacaatgaaggagatatggcataagaccataaattagtttagtttgtgtcatatctctaagatgataatatatttagaagggaacaaagagatggataagaacaaaataaaatcctttgctatatgggctagaagaaacctaattgcagcaattagtgataaggcaaatagaataggtatatatgataataaaattgaaaaagtaatggcagtacaaggtggatttaaattagagagtagtgatgagatatttaaactttctaaggaacatagggataagttacttaaagaagttaatgaaaaaggttttgaacaagtaatggaagaggtagcctatacttggttcaatagatttatgggacttagatatatggaagtaaatgagtatcttccaagtggaataagaattctttcatcagaagttgagggaaaaacagagccagatgttttaacaagagtttcagaggtaatagatgaattaggattaaatgcagagtacatatatgaacttttagatagtggaaggacagaagatagagaagaagcttataaacatattttggtaaagcaatgcaatgaattaggtaagattataccgcaaatgtttgaaaagataagcgactacacagaattattattgccagataaccttttagaagaaggttctgtaataagaaaaatggcagaagatattgaagaagtagactggaaagaagaagtagaaataataggttggatgtatcaatattacatatcagaaaagaaggatgaagtatttgcagccttaaagaaaaatgtaaaaataacaaaagaaaacataccagctgcaactcaattatttactccaaagtggatagttaaatacatggtagaaaattcactaggtagactatggcttgaaggacatccaaatgaagaacttcaaaaagagtggaaatactacttggaagaagcagagcaagagccagaagttgaagaagaattaaagaaaataagagaagaacacgcaaaactaacaccagaagatataaaaatactagatccgtgcatgggttcaggacatattttagtttatgcctttgatgtattatatgaaatttataaagtagctggatattcagaaagacaaataccaagaatgatactacaaaacaacctgtacggtctagatatagatgacagagcatcccaactagcattatttgcattaataatgaaggctaggcattataatagaaggctttttagagaaatagaaaaagaagaattagaattaaatctttgttcaatacaagaaagcaatgagatttcaaaagaagctatagattatttttgtagtgtacataaaaatacacagtttaaagatgaagcattattagaagttgcagtagatactgtaagcgttaataacaaattaagagaagatgtagagtatttagttgaaacatttaatgatgctaaggaatatggttctatacttgaagttgaaaaagtaaattttgaagctttaaaagaaagattaaaagaaatagaacaagaagacaactttacgtttggtgattatagaaaaatgcttttagataaacttccaaagatgattaaacaagcagaaataatgagtaggaagtatgaggtttgtgttactaatccgccgtatttaggtagaaaaggtatgactccacagttaattaaatatgtagatgaaaattttgagcaatgtaaaaaagatttatttgcaatttttattaaagtagcgaagagattaacaaaaattaatggaatttactctatgataacacaacaaagttggatgttcttatcaagttatagtgattttagaaaagttataataaatgaaagttcaatagactcattacttcatttaggggctaatacttttgaagaaataaatggtgaggtcgtacaatcttgtacattttctattagaaatagtgtgttaaaagaatatacaggaatttatattaaattaacagaatttgacacaaaagaaaaagaacttaattatataaatcaaaataatttaattagatattgtgttaaaagtaatctgtttaataatattactgatagcataatggcatattgggctggagaaagaatatttgaattactaaaaagtaatgaaaaaataaaagatttaactgtatcggctagtcaaaatattacaggaaataatgataaatatttaaggtttgcttgggaggtaaatgaatcaaatattggtataggacaaaagtggatatattatgctaaaggtgggggatatagaaaatggtatggaaatttaaataatatagttaattggagtttagaagcaagagaaatatataaaactggatatgcttctcaaataataccggaacaattttggtataaaaaaggaataacttggagtttaatttgtactaatataccaagttttagagttttaccatatggatctacttatgataaaggaggatcatccatttttattacggattctgaaaaatataatgttttattgggtatattaaactcaaaaattggagaaacgattttaaagtttttaaataatacattaaattatcaagttaaagatataagaaatataccatataaagaagttgctactaaaagtattaaaataaatgagttagttgataagaatattaaaatatcaaaaaatgattggaatttaagtgaaacttctttaaaatacaaaatacatccgttattaaagtatataaataaaatagaacagtataaattaatttcagtatttaacatatgggaaactgaatgtgaaaagttattcgttcagttaaagcataacgaagaagaattaaatagaatcttcattgatatttatggattgcaagatgaattaactccagaagttgaagataaagatattactattagaaaagcagatagagaaagagatattaagagtctaatttcttatgctgttgggtgtatgttaggaagatactctatagatagccaaggtcttatttacgctggtggaaactttaatgataagtggaatctagaagataagaaggttagaaaaattattaaggatgaagatggaaatataattgaggataattgggttaatgccactttattgccagatagtgataatgttattcctattacagaagatgagtattttgaagatgatatagttgtaagatttattgactttgttagaactgtttatggcgtggaaactttagaggaaaacttagattttattgctgattctattggtagaaagccatctgaaactgctagacaggcgattagaagatactttattaaggatttttataaagaccacttaaagatttaccaaaagagacctatttactggatgtttgactcaggcaaaaataacggatttaaagcattaatttatatgcatagatataatgagcaaactgttgcgagggttagaacggattatcttcatacattacaaagaaagtatgaagcagaaatggaaaggcaacaattaatagtagattcaggggagtatactacaaaagataaaacagtagctaaaaagaagattacaaaaatagcaaaacaaatagaagagtgtagagaatatgatcagattgtagcacatttagctaatgaaaaaatatctattgatttagatgacggtgttaaggttaattatgctaaattccaaggagttaagataattaattctaagggaaaagaagttaagatgaatttgcttgggaaaatataaaaaattcaaatagtttattgattaaaaaacattatattgacaaataatataatattaggtattatattgttaggaactaggtaaatatttatagcatatcgagaatttaactagttactataacaaggcataaagccgtaaagtatcccctatgttcgtatgagcataggggtatctttttatattcgtttataaaaaatacatattatttagaaaagggtgattttatggtaaatgaaattaattattcattagggcttgatattggaactacttcagtagggtggtctgttataaatttagacttaaataggattgaagacttgggagttagaatttttaatgcagctgaaaatccaaaagatggatcgtcattagcattaccaagaagagaagctagaggaagaagacgtttactcagaagaaaagcttatagaataaaacgagttaaaaaacttatattagatagaaaaatattaagtcaaaatgagcttaataacctttttgtaaataaggatgttataagtgtatggaatgcacgaataaaaggattaaatgaaaaactgtcaggtgaagagtgggctaagatattaataaatttatgcaaaagaagaggatttaaatctaatagaaaaaatgagatgaaagataaagaggctggaaaggttttaagtagcataaagtctaattttgaaaaaatgaaagaaacaaatgcaagaactattggagagtttatatataatgaagtaatgacatcaaaagataattataaagctttacgcaataaatcggaacaatataatatgtgtgtttcacgagatatgattagagaagaaattcatacattatttgaaaagcaaagagcatttggaaatgagtttgccaaagacgaaatagaagatgaatatttaaatatttttaattctcaaagaccttattcaaaatttgaagatttagaaaagatggtcggcttttgtacatttgagaagaaaaaatataaaagggctcctaaaaattgtatatcagctgaggagtttgtattatatgaaggattaaataaactttctattgtaaatagtgggaataaaagaaaattaacaaataatgaaagagaaataattataaaggaagcttttaaaaggaaagaagtaaaatatactcatttaagaaagatattaaatttaaaagaagaagatcgttttttaacattaacatatagtattgataaagatatatctaaaacagaaaatacaaaatttgtttcattaaaagggtatcatgaaataagaaagtctattgagcatggtgttagtaaagaatattggcaacaaattaaagataataaaaagatgctaaatgatattgcatatgtgttgacattaggaaaaacagatgaagatattgtaaaacaattaaagttaagaaatattttagatgagaaagttatagagtcacttttagatatatcatttagtaaatttaataatttatctatagaagctattgaaaaaatactacctttcatgaaagagggatatcaatataatgatgcttgtgagaaggcaggatatgattttaaagcaatatataaaggagttaaacttaaaaaattacctgttattgatatagatgaaatagtaaatcctgtagttaatagagctttagcacaaggtagaaaggttattaatgcggttattgataagtacggttctccaacaagaataaatattgaacttgcaagaaatatagctaagaattttaaagatagaaaagccatcgaaagggaacaaaaggaaaatagagataataaagaaaaaataagagaagaaattaaaaatttaatgggaaaagaaccaacaggaagtgaagtattaaagtatcgtttgtgggaacaacaaagatgggaatgtgcatatactcaacaaccaataagtatagatcaattatttactagtggttattgtgaaattgatcatataataccttttagtaggtcttttgatgatagtttatcaaataaagtattagtattaggtgtggaaaatcaaagaaagagaaatagaactccgtatgagtattttggtgaagatactgagaggtggaataagtttgagatttgggttaaaggaagtcatttaaattataagaaaaaaatgaacttgttaaaaaagaagttttcacctgaagaacaaagggaatggaaagctagaagccttcaagataccaaatatatatgtagatatataagtaattatattaacaatagattagagtttagagaaagtgagtcaaaacaaaaagttattactattaatggtagagctacagcttatttaagagcgaagtgggggttaattaaagtaagagaagatggagataagcaccatgctttagatgcaactgtagttgcagttgcaacacaggggatggtacagaaaatatcaaaatatagtaaagctcatgaattaaaatctgttagaagttgtgacggggttgttgatgtagaaacgggaggagtagttgaaacagaagaatttagaaatactttaaaggaaatactcccaagaccgtggaggggatttagtgaagaactagtattaaggttaagtgatgatccgattgctcaattaaagaaatcaccaattaaaagctatgatcaagaatttattaagaatactgtaaaaccaatatttgtatcaagagttccatttagaaaaattaagggtagattatttggagaaactgtgtattctaaaaaagcctttaaagatggatattttattagtaaaaagaaattaattgatttaaaaaaggatgatttagataaattttataattataattgtgataaaaaactttatgatgccatagtagaaagaatgaaaaaatttaattataatgctaaaaaagcttttgaagaagaattcaggaaaccaactaaaagtggagataaaggtcctattgtaagaagtgttaaagtaaaagtaaaaataccttttaaagatggtgtggaatttaatgaaggattagtagcaaaggatggaatggcgagaatagatgtttatgagaaggaaggcaagtatttttcagtaccagtatataaatatcaattagctataggtataattcctaaaaaggcagcattagcaaaaaaaacagaagaagaatggacaataatggatgaaaattataaatttaaattttcgctttatagaaatgatttaatagaaataaaatacaaaaataaaaatgattatttgggatattttgaaggatttgatataaattctgcagttataactattaaaaatcacgatggttctaaaagatatagaggaattggaataaaatcaggagttaaagagtttaataaatatgaagtcgatgtactaggaaattattataaagttaaggctggtgatagataagtgagttttagaagcgtaataatttccaattctgcttcattaaatctaaaaaataataatctaatcattgataatggagaagagtttccaattcccatagaggatatatctgttttagtattagaaagtatttcagttagattaaccaatagattgctaagtaagttggctgaaaatagtgttgcaacaattatttgtgatgaaaaatatttaccatcatctatagtactaccgttaaatgtacattacaaatcctataaagtattaaaacaacaattaaatcaaagtttagcttttagtaaaagaatatggcaaagagttattaaacaaaagttatataatcaaggagaatgtctagagatattaaagctaaaaggtggagagtttttaaagaatttatctaattcagttgaaagtggagacaaaggaaataaagaagctgtaggagctagatattattttaaatatttatttacaaaagaatttatacgtgatgatgacaatggaattaatgcagcattgaactatggatatgcaattatgagaagtgttgttgctagaacattagtaatgtatggatttaatacggcgttaggagttaatcattgtaatgaattaaattcatttaatcttgcagatgattttatggaacctcttagaccaatagtagacttatgggtctatagtaatatggattataatgatatattaacaaaggaaaatagaattgatttagttaacttagttaattatgaatgcattattgatgggaaaagtcattctattttaaatgcaattgataaaatgatatcttcatatacaacagcatgtagtaaaaaagatttccgactattaaaattgcctataataaaaccattagagtatcattattatgagtagaagatttatgagattactagtattttttgatttgcctgttgtaaaaaaagaagatagaaaagagtatcagaattttagaagattcttattaaatgatggatatataatgattcagtattcagtgtattcgaggatatgtaatggaattgatggagctaataaacatattataagattgaaaagaaatttaccacctaaaggttcggttagatatttacaaattactgaaaagcaatattgtgaaatgaagtttttagtaggatcaccaaaaccggaagaaaagaatataaattcaagtcaattaaatgttttttaaagtcatgaaagccgttaaaatcactgtattccaacggctttcatgactaatattatagcatatcgagaatttactaggaactataacagttgtatcagttgtttgaggttcttttttattatagcatatcgagaatttactaggaactataactacttttgccttgttatatttcccttgtaaattatagcatatcgagaatttactaggaactataacaaagtttcttatattaaattcagtagaaaaattatagcatatcgagaatttactaggaactataacttctgataagtccattacgtctgatattttattatagcatatcgagaatttactaggaactataacataaaaattattatctgctacttttcctaaattatagcatatcgagaatttactaggaactataactaaacattttatatcaattaaatcttcttcattatagcatatcgagaatttactaggaactataactctcttatgtaattatctataactacataaattatagcatatcgagaatttactaggaactataactatagtttcgtcataaactacactaacagattatagcatatcgagaatttactaggaactataacttatttgccttccaggtctccaatcctttcattatagcatatcgagaatttactaggaactataacagaaatagaggaagcttatctaaagaagcaattatagcatatcgagaatttactaggaactataacgcccatgatgtaatcttcatcatatcctacattatagcatatcgagaatttactaggaactataactaattcatagggataattgcttaaatgaaattatagcatatcgagaatttactaggaactataacatctaaattcaactctttatgtattttcttattatagcatatcgagaatttactaggaactataacgaatgattcactttcaatttcaataaccttattatagcatatcgagaatttactaggaactataactatttgtataaattctagcacataagttagattatagcatatcgagaatttactaggaactataactactaaggatgtatattctgtttgctatgaattatagcatatcgagaatttactaggaactataactcttctccatgcaataataactgttttgctattatagcatatcgagaatttactaggaactataactcctaactccgccagtggagctttcctattattatagcatatcgagaatttactaggaactataacttttaccaatggcaatatcccaaaagctgtattatagcatatcgagaatttactaggaactataaaaaatataatttaaaaataataaatagctaatagggtgttattataacaagtagttgtttttttgttataatagtacatattaagtaagaggtgatttaatgaatctacatgaaataacaaattttcttaaacagatattttcaaagccattaggtgatggaaagaagcgtcatattgttttttggtatgacagtaatgaagatttcgctcaagatatagatgagtttgatatagaaaatgttaaaattattaagttaacagataaaaatgctttttgggctaaatatcatatagaaaaagaagatacaataagtaatatacttgtgtattcaaatatggaaaagccaataccttctgaagattggctctatgatattttttgttatagtgaggaattttctactgatagagcaactgtaattatgagagaattaaaggttatggatgcttcattaaaagaagaatttaaaatgtataatactttttttaaaaacaaggaaagaatgttagcttttaagaatttaaatatacaggaatatactaaagaaaaagtacatatagcaatacttgctgttttaactaaagttaaaattatggaatttgaagaaatattaaaggctatattgaaggaatatttagatggtagaaataagatatatgaagatataaagaagtttggtcatttagattcattatggaatttaataattaagtattatggctatggatttgaagaaaaaagtttagagagatttatggctatgttattaataactaatatgaatgagacgattaagtttcagttaccaaagcaatatacaccttttatatctactaagtcaactaactgtatagtatttataaaccattttatgaacaatagtaaagatggagaatactatgacaaaatgcaggaacttataggagataaattaaagatagataagttattagaaaaaaatgattcagaaatgtttattaactgtgatatttttgaggtaatggacaaagaagttcttagaagaattacttctcttttaaaggatgaagtaggagagtatagtaagtatttaagtcttattgatgcaagaagaactatgcatttttataaaaagtatcgaaatgaatataaagcactaaaatgggctataaatttattaaataagaagagggagttagattcaagaataaaaacagaatcatcttatgatatgtttaaatcttatcttaaggactattatctaatagataaatcctatagaaagtgctactactactttgataattgtatagaaaaagaacaattaaatgatttaaaagaaagaatagaaaatgtatataacaattggtatttacaagatttatctattaaatggtttaattcattagaagaggtagcatcatggagaatagaaggcttaaagcagcaagatgatttttataaggaatttattaaatttggcaaagagagaacttttgtaataatatctgatggcttaagatatgaaagtgcagaagagctagcaagcaaacttattaatgaaagaaaaggtaaagtagaaattgaggcagtacaaggagtgttgccgacctatacaaaactaggtatggcatcactgctgccaaataagaatatagaaattaatgataaatatgacgtagttgtaaatggaattagtacaaatggaactgaaaatagaaatactatcctaaatatggaaaactctaaatctttagctattacatatgataaggttatggatatgaaagatgctgaaataagaaaggcatttacaggacttgatgtagtatatatctaccataatactatagatgccaggggagatcatgcatctaccgaaagggaagtatttgcagcgacagaacttgcatttaatgaaattattaccctagtaaataaactagtaaatagggtaagtgcagcaagtataattattacatcagatcatggatacatttataagagaaatgctatagaagaaactgataagatatgtggaattaagttagaagatggtgaagatagtagaagatttatactaacatctaatgataatgaagtagagggtacagtaacctttagtatggattatctactgggagaagattgtaataaaaatgttattacaccaaggggaacttctagatttaaagtgcaaggggcaggcgctaactatgttcatggtggagcaatgctacaagaaatagtagttccagtaattaagtttaaaaatgatagaagtgcatcatcaataaatgatataagaaaagttaacatattgttaacaagtataacaaggaagataactaatattataacttaccttgagtttttccaagaagaaaagattcaaaataaggttatagtacaaagaattaaatgttactttgaagatgaagaaggaaatagaatatctaatgagaatattataattggagattctagatcagagaatccattagaacgaacatatagagaaaagtttgtgttaaagagtatggcttatgataagacgaaacaatatttcttagtaatgcaggattatgaagatagtaatgctatgtatgaaagaataccattcactattgatattgctatagttgatgagtttggattttaaaaataatgtgtaggtgttattatataatacttacacattatttttatatgtaaattagtaagatattgctattatgatattaaaaaatttctaaaatcattaaagtaatgaaagaaaatatatattatcatcacttatcataaacagtggaaagcatcattatttaggtagaaatattaataaaatattaccaaagtgttaattgaggttttcaattttaataaaactatattataataattaatgaaagtaaaattcaaaaagaaggaggatgaagtatgaataaaattttcaagaggtcaaaagggaaaagaattgtaagcttttttgtaataatggcaatgatattctcaatgactactcagcttgcatttgcaactagtaattcagaaaatattgttaacactaatatgaatacgttaacaaaagaggtaaatccatctagcgataaaagtgtaaacattatcatgtttaatgattttcatggtaatttagcagaagatgtaagagaaacaggaaaaaatattggtatggctaaaatggtgggatatgcaaaagatgcagttagcaaaaatcctaacactataatagtatctggtggagataactatcaaggtacagctatgtcaaatttaacatatggtgcaccagtatcagctatgatgaaagctatggatgtaacagcttcagcagttggtaatcatgaatttgattggggcgtaagtcatatggaaaagtggcaaaaagatggaggattcaattttttagctgctaatatttatgattcaaaaacaaatgctccagtatcttggtccaagccttataagatagttgaaaagggtggaataaaagtagcatttataggacttgctcacccaaatacaacaactcttactaagagagaaaatgtaacaggacttgaatttagagatccagttaaaacatcagaagaatggataaagtatctaaaagaaggaaaagcaaaagagggaattcctgatgttattgtagcattaactcatattgattcttatcaagatgataatactaaagaaataacaggaaaagcagttgatttaactaaagttaaaggattagatgcaattgtatcagctcatagtcatagaagagttataggaataataaacggcaaaccaataattcaagcttataaatatggtcgtgctattggaataatgtctataaaattggataaggacaataaagtaactaaaattgtacctaagatagatgatgtatgtaatactaaaagtgatattatacaagatgaacaaagtgcagaaacttataataaatatgataaagatttaaaacctattttaggagaaaaaataggacaagcaacaaaagaatttactcatgatagagcttctaaaggaactgtctctttattaggtagatggtcatgtgaagttatgcaaaagaaaacaggtgcacaaatagctatacaaaatggtggtggacttagaagaacactatataaaggcgatattacaatgggtgatatgtatgaaataatgccttttgataatgcacttgtaacatttgattttaaaggttcagatataaagaaagccatagatcatggtatattaaatcctgaagtaacagatggacaattttcaggattaaaggttgaatatgataaaaataaagaatttgagcatagaataacaaaaataactcttactgatggaacaccacttgatatgaataaatattacaaattaactgttccggatttccttttatcgggtggagataaatatgatttttctaatgcaaaaaatgtagtggaaacatttattcctgtaagagatgttcttgttgaagctattaaaaatgcaaaagttataacacctaaagcagtggattatataaaagagtgtgaagttaagccaatgccaaaaccagaagttaaaccagaagttaagccggttccaaaaccagtgccaaagccagaggttaaaccagaagttaaacctgatccaaatgttagagcagtttattttgtaaagggtggagatactttaaaatatattgcaagagcatatggagtttcttggagagaacttgctaaatttaataaattagataatccaaatatgatattcccaggtcaaaagatactaatacctgtacaaggatcaaaagaaaactcaaatattaaagctacttatgtagtgaaaagatatgatacattaaagaagattggtaatatatacggaattagttggagaagaatagctaagtttaataaattaaataatccaaatatgatatttgaaaatcaaaagatattaattccagcataataatagttgtaaataaaaaacgctttgttttattataaaaacaaagcgtttttaaaattaaaaaaaggagaggatatagtgaagaaatataaaagattacatatagtattgattgctatgttcatattttcagcattttttgctttgaattgttttgcagaagagaataatagtaagaatcttcaagagtattattcaaaacaaatggataaacctgattatgtaactgtaaaggctaaaattatggatataacatttgatgatacaaaagaaaataaaaaagatataccaatagaatcagatattagatatcaacatttaaagataaaacttctatcgggaaaacataagggggaagtatatactgttagaaacactgttgagatgatatcaccgtacaaacttatatttgaaaaaggtgataaattacttcttcatttaactgaaggagggggaaataaagtagtaaacctaaaagtgtatgaaagatccagagaagggattatatattttgtagtggcactatttatggttttattaattgctataggtggaaagaaagggttaaaatcagctataacattgatatttatgggagtgcttatagtttttgttttattgccattaataagaagaggatataatcctattttaatatctatatttataagtgttttatcagtggtatttactatgacattagtaagtggatcaaataaaaagacattaactgcaatacttggaaccataggtggagttattatagcgggtattatagctatgatagtagggaatatggctatgttaacgggtgtaggtaatgaagatgcacaaatgcttgcgtatatacctcaaaataaatatatagattttaaaggattgctttatggtggaataataataggtgcactaggagcaataatggatgtaacgatgtctgtatcatcagctatgtgggaaataaaagagataaaacctaatataaagactaatgaactaataaagtctggaatgaatataggtaaggatattatgggatctatgtctaatacgttaattcttgcatatgcagggggttccatttatattatgcttttattttctatgtttaagatggatccacttgaaattataaatttagaacctattgcctcggaaataataagagccatggcaggaagcatagggcttatatgtgcaataccattgacagttataatttctgcaagtttagcaaagaattattacaagaaaaaataaaaattaaaatatatatcacattaaatataagtacatataatgatatatataatgaaatatgtcattatatgcataatgttaaaaggtgatatatatgaatcaagaaagtttaatagataataggattcgttatacttgtaatagcgagtatgaatattttttaagaaagagaaatgtacaaggaataggacttggatataaaaaaattaatggaaaatgtacttttaggaagtgcataagggtttttgtatctaaaaaattaccttccaataatatagctaaggaagatttaattccagcatattttaattatattccaacagatgtagtagaaagtggagtttttactacttgtgcacttagtgcaagaattcgtcctgtgcaatgtggatatagtataggtcctgttggtgttaatatttatggaacattaggatgtttagtgaaaaataaacgggaaaaggcggtttatgtattaagtgcaagtcatgcgttaaatccattaggaaaggtttcttttggaacacctatagtacaacctggagttttagatggtggcagtatacgaaatgatgtaattgcaaatctaataagaagtactactatacaatatataagcttattttcaaaaccagtaaatacagtggatgcagctgtagctaaagtatcagacatttctcttgtaagcactacgatggctatagtgggtaaagatgtaaaacaaatagctccacctaaaattggagaaaaagtgtttaaagtgggtagaactactggatatactgaaggtcatataacagaaactgatgttactcaaattattgattcttctggaaaaaaagctttatttaaagaccagatagctgctgatgtaaaatcagataagggagattcaggaagtgtgcttttaaatgaaaatatgaatcctataggattattaatgggtactagccagtcgacggtatattctgtatttaatgatatgaagaaagttacgtcagcattaaatgtagaaataataacaagagccgaattggacaatatcaagaaaatatataattcgacaaataatatttgtgtttagagtgaactgtaaatataagtaacattaagaagatgtctaacaacatgataaatattgtagataaagcctatatgattaaatttcatataggtattttgttagacatagtaataatcaaaaaaa

SEQ ID NO: 927 - DNA, 22259 bp, synthetic construct
  source 1..22259: mol_type = other DNA
  misc_feature 1..22259: note = Synthetic
aaacctgcttaggagcattttggggatttgtattcaaatttgcattagggtatgataatcaaaaaagtacatcaatattaacaaaaggaataaaaacagcaacatatttttatgataaaaagttagaagtagtgaatgcttaggaagaaaaataattaaaggataataaaatgaatgttaaagtaaaagatgctgagcttagtaggcttggcatcttttttagtcaattttattaaaacaaagcatttggtatacaaaaatatttaattagagtggtgaatataaaatttattaaaaggaaatactttcttaaaatatatagggattaaaattttgatgatatattataatatttttatttaaaaatataacaattcatattttttttactagatggtataataaataataaaaactggaccacggaggaataaattattatggaatataagtctacaattaaatctagaccatatctttacaaacaaacaaaaaaggcatcagctcttataaatcaaggaatggaagttgattgcttaaaagaaaaatctttagaagaaaatatttttcaattagaaagcgaagccagaaagaaagaaattgcatcaataattatttctagattaagtggtgttgataaatatatcatagataaaattgaaaatagtaatatagaaacatcaaaaattttagtattatatacaataataaaaaatgacagattattttttgagtttataaatgaagtatatagagaaaaaattttattaaaagatttatatataagagataaagattttagtaacttttttcaaagtaaaaaagaacaaagtgaaaaagttgcatcttggtcagaatatacttttaaaaaattaaagcaagtatatataaggatactttttgaaagtggacttatagcaaatcaaaaaggtgatagagaaataagaatgcctattatagattatgatgttaaagagtatttatataaaattggtgaaaaagcctatataaatgcaattttagggatagtataataaattttataggtggtaatgaaagatgaaagatatatatcaaagattagatgaaatattacctaaaatagttcaacctgattttagaaaaaataagggattaggaaatgaaatagggttttatgtatttgattataatgcagaacatgagcttttagttagagatagagttaaatttattaaagaaaaggctaaaagtgcttatggtttaaatattatagagtttgatctttatgaagttattttagaaatattagagtcaaaaggatatttaaaaaagaactttgaaatggaacaaaaaaagaatagtgaatatgtttttaatgcgactagaaagacattaaggcttactttagataatgatttagttgttcaatatattaaagaaagattagatggtaatgacatagtttttttaactggtataggtaaagcatggcctatagtaagatcacatactattttaaataatcttcatagagtagttgaagagcaacctcttataatgttttttccaggaacatataatggaggcacattaatgctttttgatcacttaaaagatgataattattatagggcatttgaattaatagataaatattaaatttggggggaatatatatggatattaaattaaaagaaatgttttataaaccaattgatagagatatcaaaggagttattaaggttggtcaggctgataatgaaaatataaaacaagaattagaagagtatgttgtaactggtgagttaaataaacatatagatagattttttgaagcttataaatctggtgtagtaggacatacagataaaaatgcagtatggatatcaggattctttggaagtggtaaatctcactttttaaagattctttcttatttattagaaaatagaattattgatggaaaaaatgctattaattattttgatgataaaggattagatagcgttattttggagaatatgaaacaagctggagatgtatctagtgatgttattctatttaatatagattctaaatcagattctgataataaaaatagtaaaaatgctattgttaatgtatttaataaagtatttaatgaaatgcaaggcttttgtgggtcaatgccttggcttgctgatttagaaagacaaatggctaaagatggtgtatatgaaaactttaaaagagagtttgaagaaatttcaggaaattcatggatagaagcgagagaagacttttattatgaagaagatgcaattattgaagctttagctaaaacaactaaaatgagtgaagaagcagcaaaaaattggtatgaaaaatgccaagataattattcacttagtattgaaaaatttgcaaaaagagtaaaagaatattgtgattcaaaaggtcaaaaccatcatgttatatttttagtagatgaaattggtcaatatattggagatagtagggacttaatgctaaatttacagacagtagtagaagatttaggtactgcttgtggaggaaaatgttttgttatagtaacatctcaagaaggtttagatgagtttgcagttgtaaaaggaagcgatttttcaaaaattcaaggaagattcgatacaagattatctctttcatctgcaaatgttgatgaagttattaaaaagcgtatccttagaaaaaaagaaaatgctacaagtcatctaaaagcattatatgagcaaaaagaatctataataaagaatcttttaacttttacgtcagatacagcagaaatgaagttatataaaaattctgaagattttgctgaggtttatccatttataccatatcaatttaatttactacaagcagcttttaatggagtaagggaacatggagcatcaggtaagagtttatcaaaaggtgaaagatcacttttaggagcttatcaacaagttgctattgaatatatggatagtaattcaaatatattagtaccattctcagcattttataagacaatagaaacattcctagattcatcaataagatcagtaattataaaagcagaaaaaaatgaaaatttagatccttttgatatagaagtattaaagttattattcttggttaaatatgtaaaagaaattaaagctaatataaataatttagcaactttactagtagataatatagatgcatcacaaaaagaattaaaagataaagttaaagagtcattaaagaaattaattagagaaactttagttcaaaaaaatggtgatgaatatatttttctaacaaatgatgagcaagatgttaataaagaaattaaaaatatgtctattgatattggagaaaaaattcaaaaggtttctgaaataatttttgatgatatatatggagaatctaaatttagttattctaaaaaatatatgtttacttttaataaaatagttgatgatagaactagaggacctcaaagcaatgaaattggggttaagattataacggcaaactttgatatagttggagaaacatctcaagtagaattaaaacatctttcagctagagaaaataatatattaattaatatatctaaatatgataattatttagaagaaatagaaaatgcattaaaaatagatgcatatttaagattaaaaggtggtacaaaatctactattgcaatagaagatataaaaagtaaaaaaagtagagaaagagaagaaagaataaaaagagcaaagttcttaatagaagaagcattaagaacagcagaagtgtatgttaatggaagtttacttgatgtaaaagaaaaatcaggtgtagataaaattaatgaagggttaagagcattgatagattctaaatataataaattaaattatataaaagaatttaaggaaagccctaaagatttatatgatattatggactctaaattaaatcaaatgtctttaatagataataatccaaatagattagcaatagatgaaattagaacacatatagaaacaagtacttcaagaaacttacaagtaacagctaaaactgtaattcaaaagttttctaatgctccatatggatggaaagaagttgatattcaaggaattatagtttcattatttaaaaagcaagatataaaagtattattaaataatgaagtagttcaaccaaataatagagaagtagtagcctatgtatcaaagaaagattatatagatagagcaattttaaaaacaagagaaaaagtagctaataaatatatagatgcacttaaagatttaaataaagacctttttggattctcttcaatgccaagtgatgaagatgggatgatgagctcatttaaagactctagtagaaatgaattagttaaaatagaaatgatgctaagagaatttaaattaaaatttaaatatccaggagaagaaacacttaaagagggaacaaagttattcaaaaaaatactagaaataaaagatactttagaattctttaaaactgtatatgatttagaagatgatttcttagactatgttgagaatatagataatataaaaggatttttctttaaagatgaaaatggaaaaagaagcataggtgatcaaagaagaatctttgataacggattaaaaactatagaaaattatgaagaaaataaagaatatttattcaatgaagaaataatagaaataataagagaaataaaagaaatattaagaatggaaaaaccttatagcaaaataccacaaattccaatcttaatagaaaaatataataataaaatcatagaccttttagaagaaaaagcaaaacctgtaaaagagcttatagaaaataataaagcagaagtaatacaggttgcagaagagaataagttaagagacagatttgaaatagaaataacagaaaagtttgatgaactaaaaagaagagcagaaaaagcagataaatttacaatacttccgtccataaaagaaatttcagataatgcaagaataaactggatagaaaatatattaaatgaaaaagaaagacaaaaagagagagaaaagaaagcagaggcaataaaagaaaatcaagcagagtttaaagggaatatagatacaaaagtaaaaactatatctttagaggaaaaaccaaaaataaggaataaagctgtagatgttagaaaattagttcaaggacaaagagtaataaagagtgaagaggatatagaaattgttttaaattcactaagagaaaaattaaaacaagaattagaagaaaatacaattttaaatttagtttaataaagtactaggtgaatatagaaatattcacctagataacttttattttaaatatatgtggaggattttacatgagtggaatattagataaatatgatgaatcaattaacttaacatataattatacttatagaatgcttatgcatttaaaaaacataaaagaaaattacttaaatttaggtaaagtagatgatataacacttgaagtttatagagattctataataaaaaaatatgaaactttagaggatttaacatggaaacttttatctaaaatttttaaagcagatgggttagatataaatagtcctagaggttgttataaacaagcttttaaagaaggtttaatagaagatatggtggtttggaataatattttacttgccagaaattctactgctcatatatatgatgaagaagattatgaaaaaataaaagaggatattttaaattattatgtaaaagcaatagaggaacttttaaataaaatatttatggagagattataatgtttggaatagaaaaaaatgtatataggaatttaatagaatattttaaagaaaaaaactatataaaaaaagttcttatatttgggtcaagagctaaaggaaattataaatataactctgatatagaccttggaattttatgtgaaagaaaatatagaggaacagttaaagaagacatagatgaaattataggagtttactcagctgatattgtatttttagacagcatgaatgaagaaataaagtatcagatagagagagatggaattgaaatatatataagtggtgaataggtaaataggagatgcgaaatggataaaaataagataaaatcatttgctatatgggctagaagaagtttaatagcttcagtaagtgagaaagcaaatagtattggaatatatgaaaatgaaataaaagaagctaaatttgttcaagggggatttatagtagaaggtagagaagatattgtaccagtttcaatagaaaatagaaatgctcttataaatcaaataaaagaaaaaggctttgaacaagtaatggaagaaatagcttatacttggtttaatagattcatgggacttagatacatggaagttaacgattatcttccatcaggagttagaatcctttcatcagaagtagaaggaaaaaaagaaccagacgttttaacaaaagtttctgaaattattgaagaattaaatttaaatgctaatgaaatatatgatttattagatacaggaaatactttagatagagaaaaagcatatagaattattctagttaagcaatgtaatgaattaggtaaaataatacctcaaatgtttgaaaagataagtgattatacagaacttttattaccagataacctattagaagaaggttcagtaataagaaagatggttgaagatatagaagaatctgattggcttgaagaagtagaaataataggatggatgtatcaatactatatttcagaaaagaaagatgaagtatttgcagcattaaagaagaatgtaaaaataacaaaagaaaatataccagcagcaacacagttatttactcctaagtggatagttaagtatatggtggaaaactcactaggaagactatggcttgagggtcatccaaacgaagaattgcaaaaagaatggaaatattacttagaagaagcagagcaagagccagaagttgaagaagagttaaaaaaaataagagaagaacatgcaaaactaaaaccagaagatataaaagttttagatccatgtatgggatcaggacatatattagtctatgcttttgatgtgctttatgaaatctataaaacagcagggtattctgaaagagaaatacctagattaatattgcaaaataatttatatggattagatattgatgatagagcagcacaattagcttcatttgcattgataatgaaggctagacattataataggagattatttagagaaatagaaagagaacatttggagctgaatttatgttcaatacaagaaagtaattctataggaaaagaagagatagactatttctgtagcttaaatacgggattaaataatgaagagttaagaaaagatttagaatatctagtaactacatttacagatgctaaagaatatggttcaatacttgaagttaaaaaggtaaattctgaagcattaaaacaaagattaaaagagatagagaatgatgataatttgatgttttatgattatagaaaaatgcttttagataaacttctaataatgattaaacaggcagatataatgagtagtaaatatgaggtttgtataactaatccaccatatatgagaagaagaaatatgaattcgattttgtctagttatataggaaaacagaattatatggtaaaagatgattttatatctgtcttttttgaaagagtatttaaatatggatataaaaataaatatacatctttagtaacaacccaatcttggttatttatatcatcacatgagaagataagagaatatattttgaataataaacaagttaataacattttacacatgggagaaaatgttatgatatcatttgggacagtttcaggtgtgttcagaaatatagaaagcaatcttggatatattggaacatataatcaaataaactctgaacaagtatatgatgataaacttatagatattaatgatttagtgataaaaaaaagaatcttgaatcaagacatattcaaaaaattacctagttatgttttcgcgtattggataggaaaaaagttggcacttacatttaataagtcaccgttaagagaaaattgtgagattagggctggaatcaagacaggagataataatgagtttgtaagagaatggagcgaagtagatataaatgatataagtttatatcccaaaaatgcagatgatattattaagtataactataagtggtataaatataataaaggaggcggatatagaaagtggtatggaaataactataatataataaacatgaaaaatgaaggggaagacattaaaaataaaatatcaaaggacgtgtatagattaagggatcgtaacttttattttaaggagtgtgcgacttggtcattgattggtatagataaatttagtattaggttttctccaaagggaagtttgtttgatacagcaggttcaagtattttttcagaaaatattatttatttgataggattattgtctagtaaatatgcaaatgaaatattaaaagcaattaatccaacagtgaattattctttagatagtgttggaagtataccttgtattatagatgaaaataaagatagagtaatgaaattatcaaaagtgtgtgttaatatctcaaagaatgattgggattcatttgaaatatcatgggattttaaagttcatccattattaagattattagataaaggagaacaatataatttagaatcagtatttagaatatgggaaacggaacgtgaagaagcatttcagaaattaaaatataatgaagaagaattaaatagaatattcattgacatatacggattacaagatgaattaactccagaagttgaagataaggatattaccataagaaaagcagagagagaaagagatataaaatcatttatttcttacgctgttggatgtatgtttggtagatactctattgatgcagaaggtttaatttatgctggtggagactttaatgacaagtggaattttgaaagtaataaggtcagaaagatagaaaaagatgaagatggtaatataatatctgattcatgggttgattctagattcatgcctgacagagaaaatattattcctattacagaggatgagtattttgaagatgatatagtttcgagatttatagaatttgttagagttgtttatggagaagaaacattagaagaaaacttagattttattgcagattctattggaagaaaagcatctgaaactgctagacaggcaattagaagatattttattaaagatttctataaagatcatttaaaagtttatcaaaagagacctatatactggatgtttgaatcaggtaagaataatggatttaaatgtttgatttatatgcatagatataatgaccaaacaattgctaaggttagaactgattatcttcatatattacaaagaaaatatgaagcagagattaataggcttcaattagttcaagattcagaagaatatactgcaaaagatagaactgcggctaagaaaaaaatagacagaatatctaaacaaatagaagaatgtagagaatatgatggagtagttgcttatttagcaaatgaaaagatatctattgatttagatgatggggttaaagttaattatgctaaattccaagatgttaaagttattaattcaaaagataaagaagttaaaatgaatttattagcaaaaatataactaaaatagtaatatataatgagtttaaataaatttatttaattaaataaaagaaaatattgacaaatatatatttaatatgtaaaatataaataactaggaaaattatatagcatatcaagagttttactagttactataacaaggcattaagccgtaaagtatcccctaagttcattttaatgagcataggggtatctttttattatcgtactgtaaaaaaatgtattttaatatagattggagtgatttcatggataaagaactaaattatgcaattggacttgatattggaataacatcagtaggttgggcagttattaatttagatttaaatcgaattgaagacttaggagtaagaatttttaatgctgctgagaatccaaaagatggggcatctttagcattacagagaagactagcaagaggaagaagacgtttacttaggagaaaagcttatagagttaaaagagttaaaaatttaatattagacaaaaatattcttactaaaaatcaattagataatttatttaaaaataattatatatgtgatgtatgggaagcaagagttaagggattagattcaaggcttactaatgaagaatgggctaaaattttaattaatttatgtaaaagaagaggttttaaatctaacagaaaaaatgaagctaaagaaaaagaggctggagcaataataagtagcataaataaaaatattgagcttatgaaagaaactaattcaaggacaataggtgaatatatatacaaaaaagttaaggaatcagatgatatatataaagctttaagaaataaatctggtgaatataacatgtgtatatcaagaagtattcttagagaagagatacatacattatttgaaaaacaaagaagctttggagcagagtttgcaagtgatgaaattgaagatatgtacttagagatatttgattctcaaagaccatattcagattttgataaattagagaagtttgttggatattgtacatttgaaaaaggagtaaaaagagctcctaaaaagtgtatttcagcagaagagtttatgttatatgataatataaataaactttctatattatgtgatggtgaaaaaagaaaattaaataatgaggaaagagatttaatagtaaaagaagcatataacaaaaaggaaattaaatattcagctttaagaaaattattaaagttagatgaaaatagtagattttctactttaacatatagcatagataaagatgtgtctaaaactgaaaatactaaatttgtatcattaagtggatattatgaaataaaaaaagctatagaaaaaggaattagtaaagaatattggaatgaagttaaaaataataaagatatgctaaatgatatagcttatgtgctcacattaggaaaaactgataaggaaatagaagagcaactaataaaaagaaatatagatgaaaaaataatagaaaatgttatagatatttcttttagtaaatttaatagtttatcagtaaaagcaataaataagatattaccttttatgaaagaaggttttcaatataatgaagcttgtgaaaaggcaggatatgattttaaggcaatttataagggggaaaaatctaaaaaattacctgtaatagatatacaagaaatagttaatccagttgtaaatagagcattggctcaaacaagaaaagttgttaattctataatagataaatatggttctcctataagaataaatatagaactagcaagagagttgtctaaaaattttaaagatagaaaagctattgagaaagaacaaaaacaaaacagagtagatatagaaaagataagaacagaactaaaagatttatttggaaaagaaccgacatatagtgaagtactaaaatatcgtttatggcaaatgcaaaattatgaatgtgcctactcacagcagcaaatagggataaatgaattgtttagtcaagggtattgtgagatagatcatattataccttttagtagatgttttgatgatagtttatcaaataaagttttagttttgagtacagaaaatcaaagaaaaggaaataggacaccttttgaatatttcggagataacgtagagcgttggaatagatttgaagtatgggttaaaggaagtcatttaaattataaaaagaaaactaaccttttaaagaaaaaagtttctaaagaagaagagagagaatggaaagcaagaaatcttcaagatactaaatatatttgtaaatatatagctaactatataaataataaattagagtttaaagaaagtgatagaaaacaaaaggttataactataaatggaagagctacttcaattttaagaggatattggggacttactaaaattcgtgaagatggagataaacatcatgcattagatgcagcagttgttgcagttgcaacacagggattagttcaaaaaatatctaaatatagcaaggcaagagaattacgaggaataagagaatcagattaatttatagatatagaaacagaagaagttgtaaatttagaagaatatagagaggaaagaaaagaacttttcccaaggccatggaaagagtttactgaagaattaaaaataagattaagtaataatccaagagcagaacttataaataataaaatatctacttatgatgaagactttattataaatgagataaagcctatatttgtttcaagagttccatttagaaaaagtaaaggtaaaatttttaaagaaactgtatattcaaaaaaagattttaaagaaaataaatttatatcaaaagtaaatctaactgatttaaaagaaaaagatttaaaaaatttctataattatgaatgcgataaagttttatatgattctatagaaaaaagaatggctgaatttaaatttgatgctaaaaaagcttttgcagatgaatttagaaaaccaactaaatcaggaaaattaggaccaatagttaggagcgtaaaaatagttaaagatgttccatttaaagatggaatagatttcaatgaaggtatagttgcaaaagaaggaatggttagaatagacatatataagaaagagaaaaaatattttatagttccagtttatagatatcatattgcaaacagaatcaaacccaataaagcggcagttgcatcaaaaccagaaagtgaatggattgaaatggatgatagctatgaatttaagttttcattatataaaaatgatttaatagaacttagatatgagaagaaacaaggatattttggatattatgatggatgtaatagatcaacagcttcaataactatagaggaacatgattcttctaataaatatgaaggtataggagttaaaactggagttttagagtttaataaatacgaagtaaatgtattaggaaaattttataaggtaagagaaggaaaaagataaaatgagtttcagaagtattataatttctaattctgctagtctaagtttaaaaaataataatttattaataaataatggaaatgaatttttaattccaatagaagatatttcagttttagttattgagggaatttctgttaatttaacaaatagattattaagtaaattaagtgagtatggagttgcaacaataatatgtgataataagcatttaccaacaaccttagttatgcctttaaatactcattataaatcctttaaagtattaaaggaacagctaaacttaacagcttcatttaataaaaggatttggcaaaaagtaataaaacaaaagatatataatcaaggagaatgtctaaaattattagatttacatggcgatgaattcttaaaaaaattatctgaaagtgtggaaagtggagataaaggaaataaagaagctattggagcaaaatattattttaaaaatatttttggagaaaaatttattcgagaagatgatatgaactgtataaattcagctttaaattatggatatacaatacttagaagtgcaatagctaggacacttgtaatgtatggatttaatccatgtttaggagttcatcattgtaatgaattaaatcaatttaatttggcagatgattttatagaaccttttagaccaatagtagatttatgggtatataaaaatataaaagaagatgatattttatgtaaagaacatagaatagaattagtaaatttattaaattatgaatgtataatagaaaataaaaaccattctattttaaatgcaatagagaaaatgatatcttcctatacaacagcagtaaataataaagactttagattattaaaagttcctattataaaagatttagaatatcatgcttatgagtaataaatttatgagaatattagttttctttgatttgcctgttgttagaaaagaagataggaaagattatcaaagtttcagaagatttttattaaacgatggatatatcatgcttcaatattcagtttatacaagaatatgtaatggaacagatggggtaaataaacatttaaatagattagaaaataatttaccttcaaaaggatcagttagatatttaaagataacagaaaagcaattttcagaaatgaaattcttagtaggtatgccaaaaaaacaagaaaagactataagttcatgttttttagaaagttaaaacccgttgaaactaagtgatttcaacgggtttcatagtttctattatagcatatcaagaatttactaggaactataacaactgcgtttcattccaaaaaattaaataattatagcatatcaagaatttactaggaactataacaactaaagttaattcatcaaatatatttttattatagcatatcaagaatttactaggaactataactttatacattaatacaagaagaagaatgagattatagcatatcaagaatttactaggaactataacctcccctttcaacctaacttctccatacatattatagcatatcaagaatttactaggaactataacactttaagcgctttagcaattttagttaaaattatagcatatcaagaatttactaggaactataacataattgacagtttatttagtaattcactaattatagcatatcaagaatttactaggaactataactattgcttctttcctaaaaactttgcttctattatagcatatcaagaatttactaggaactataacacagtattagtcaactatctcacatccttaattatagcatatcaagaatttactaggaactataacgcattactttcgcttaaatgaattaatgttattatagcatatcaagaatttactaggaactataacttattagcaatagtgtttatatgcaaatatattatagcatatcaagaatttactaggaactataactgtataaactaagtattgaaaaacggaatattatattatgaattagaaagaagatataaaacttttaatgtagtaattttacctgatataaaagaagaaaattttataactaataagaaagatttaaaaaatatattatgtttaaatatgaaatgaataggttagaagataaaataattgatatagttaacaaagcaaaaatagatgctgtagaaagtaaaaatgtattgattttaatatttaaatcagaaataaaaaatataataaagaatgagttgggtgaaataagtaatattgaattatatacaatttataagtttatgcaagaaattacagaagattatgataacgaaacaagtgaactaagaaaaaaattttgtaatgcaaagatagataataaatgggatactatattgatagatgaaacacaaggcatatatggtgaaaaatatatacaaataaataaaaatcaatataatgaattcgtaaagttatattttgtttttaattatatctacaagaaataaaagtatttttaaagttgtagtttctgtaagacaataagagaatcaaaaggaatagaaagagcttgtgttctaatttatgatgaagataatttaataaatagcaattcattaaataaaagcaatgtatatgaaaaaagtattttagcaaggaatatgttatatacagcgtgttcaagaggaataaaagaagtttatatattcttaaataacaagggaaaagtagaaaacgataaaatagcaaagatattagaattagaaataagcgatataacaatattataaaaaaacttagataaaaattgctttatagtgagaatataaagcaattttttatgttaaaatattatatgaaattttaaaattaataggagacatttatgaatttacaagaaataagaaattttcttaaagagttattttcaaagccattgggtgatggtaagaaacgtcatattgtattttggtatgatgaaaaagaagattttattgaagatatagataattttgatttagaaaatgttaaggtagttaagttaactgaaaataatgcattttggataaaatatcacatagaaaaggaagatacagagagtgatatattagtttattctaatatgagaaagccaattccacaggaagattggttatatgatattttgtgttacagtaaagaattctctactgatagagcaacagtaataatgagagaattaaaagttatagattcttcattaaaagaagagtttaatatttataatactttctttaaaaataaggaaagaattaataacttcaaaaatttaaatattaaaaattggaccaaggaaaagattcatcttggagttcttgctgtcttaactaaggtcaaaataatggatattggagagatagtaaaagctattattaaggattacttagatggaaaaaataaaatatatgaggatataaagaagtttggtaatattgatgcattatggagtttgcttcaaaaatattatggatattcttttgaagaaagaagtttagaaagatttatgtctatgcttcttataactaatatgaatgaaactattaagtttgagttacctaaacaatatgcaccatttatttcttctaagacaactaactgcattgtatttataaatcactttatgaataatgaaaaggatagtgaaagctattggaagatgcaagaattagtagcagaaaagttaaaaatagaaaaattacttgaaaagcatgatacagaagaatttgtaaattgtgatgagtttgaagtgatggataaattagttttatggagaatcactaaactattaaatgatggagtagaagaatatgataaatatttaagcttaatatcatcacgtagaactttacattattataaaaaatatataagtgaatataaagctataaaatgggctataaatcttttaaataaaaagaaagaattaaattcaattattaaaacagaagattcttataatatggttaaatcatatgtaaaagaatatttttatatagataaagcttatagaaaattctattatcattatgataattgtactttaaaagaagaattaaatgatttaaaggatagtgttgaaaatgtatataataattggtatttacaagaactatctattaaatggaatgattctatatcaaaaggagattcttggagaatagaaggattaaagtggcaagatagattctatagagaaaatattaagtttaaaggtaaagaaagagtttttgtaattatatcagatggattaagatatgaaagtgcagaagaattaaacacattacttattaatgaaagaaaaggaaagagtgaactagattatatgcaaggtgtattaccttcttatacaaaattaggaatggcatcactacttcctaataattctatagaaattaatgataagtatgatgttttaattaatggagttaattctaatggtactgataatagaaatactatattaaaaatggaaaacgaaaaatctttagcaattacttatgatactattatggatatgaaagatgctgaaataagaaaaacagttactggattagaagtagtttatatttatcataatactattgatgctagaggagatcacgcaagtacagaaagagaagtatttaaagcaacaaaagatgcatttaaagaaattcttactttagtaaataaacttgttaatagagtgagtgcagcgagtattataattacagcagaccacggatatctttataagagaagtcaaatggaagaaagcaataaactatcaggagttaaacttgaagatggagaagataatagaagattcttattaacttcaaataaagaagaggttgaaggaacagtaacatttaatatggattatctattaggtgaaggctctaataaatatgttattacacctaaagggacttcaagatttaaagtacaaggggcaggggctaactatgtacatggtggagcaatgccacaggaaattatagttccagtaataagatttaaaaatgatagaagtgcttcttctgttaatgatattagaaaggttaatatatctttaactagtataactagaaagataacaaatcctgtaacatacttagaatttttccaagatgaaaagattcaggataaagtaatttcaaaaaggattagatgttattttgaagatgaatatggaaatagaatatctaatgaaaatataattattggagattctagatcagaaaatccaatagaaagaacttatagagaaaaatttgtattaaagagtattccatacgataaaagtaagcaatatttcttagtaatgcaagatgaagaaggtggaaatggatattataatagaatatcatttaatatagatatgcctacagcagatgattttgtattttaattattaaggagatgtattaaattgatttattaaatcaatttatatacaactccttttaattttatagtaaatttatttaaaaactatcattaattttacataagcctaatatatctaactatatagatttattagggggaaagacatgtatttaccatatttaagaggaaaggaaaatgagttaagggctttaaaagaattattagaagataatttattatctaaaaagataatacctataattgaaccaataaactttagtagtatatttaaagaagtgttacttgaatttataaaaaaagagagagaaataattgttattcataatcctcaagtaggagatttttttaaactagataagaaaagtattggagaatttgaggcaatacttaaaaataaatttatcattattggacatattttgaataaaaaaagtaatattcaattaaaagaaatacaaacaaaaggattagatgtagataatatagctttaatagaaaataaaaataactctattaataaaaactctttaaaatcatttagaagtagatttatagttttattaaatgatgattataagtgtgataatagagttattttagatgataaatttgataagaagaatagaaatgcagattatttagaaagagaagaatttttttcagatgagcatataaaatatttaaaaagaaatgatttaggattttcagattattcagtaataggcgagaagttttcaaatagtggatggttagctaaagtagtagctatacacattgtatattttgataataatattttaaatattagacattttttatctgatagcaatgattctactgagaatcaatcaaaaaaagttagagaagctaataaaaagttatgtgaatgggctgatttaaataaatttgatagtttagccttacaaaaatttagagaatataacaatgaaaataaatctacaagtttaggaatgttaaaaaggctatcaataatgcatcatttagaaattatgagtaaatatttggataaattaatataacttagggggatttatgaagaacaataatacaacaataagaaaaatgatgaattatataaataatccaattgaacaaggtggcttttggttacctaatattcaaaggaattttgtatggagtgaagctcaaattataaaattatttgattctattatgagagagtatcctataggaacattgatgatttggaaaacagaccaaaaagttaaaataagaagttttataactatatttaaatctgaaatgagcgtattaaataattatcagccaataaataaaaaacaaaaattattagttttagatggtcaacaaaggcttcaaagtttatatatagcatttaagggaacttataataataaagaattatatttaaatgtaattgataataaagagctagaaaatgaccaaaaatatgattttagatttttagaaaatgatgaagttaaagatggaatgataaatgtaaaatcattactagaaactaataaaaaacctatgacatttagtagagagattgtagctaatttaaaaaataagggaattaaacttagtgaagaaaatataatgagaataaatgatatagttgaacaatttatacatgtattttctttacaagaagttatttcgtatcaggagttagatagtgtagataataatgatgtttatgatgaaaatgatattgtagaaatttttataaggtcaaattctggtggaacaaaacttgaaaaaagtgatttattatttgctttgttaactaaaagtattgatgatatagaagaaaaattagaagagcttattaatgagttaaattgcatgggatataaatttagtagagattttatattaaaaacatgtttaactttaattggggcaggagcaaaatatgatgtaaataaatttagaaaagaggacaatgttgaaaagatagatgataactgggaagaaataagtaatgcaataaaatcagttaaggattttatttatgataaaacttatataaaaaataataatactcttactgcatatacacctttaattccaattatatattgtcgatataaatataaagatgaatataataaattaatacaagatggatcattaagttattggataataaaagtaatatttaatggtgtttataatggaagttcagattctcttatagatttaactgttaaggacatagaagaaaataaaggaatgaactttgaatcattgaatatattatttaaaaatcaaaataaatctttagaagtaacagaagataatattttatcagcaggttattataacgaaaactctaagaaaaaattgtatttattatttaatatatggtacaacaagtttgattttaatccgagtttttcagggaataaacttaatatagatcatattttcccacaatctgaaatgaaaaaggttaagataaaaggtgataaaggtagattagtacaaaaatataaagctcatgatattaatcagataggaaactgtatgttactttcttttgaggaaaatagaaatgggtcaaaaggagataaattaccaagtgaatggtttaaagataaatctgatgaatatttagatatgcatttaataccaaaagataaagaactgtggaaaaaagaaaattttgagaaatttatagaagaaagaacaaaacttatagttaagagaatcatggaaagaattaatttcagtaactaatataatcaaaaacaaagtctagattttaatctagactttttattttcttcttccacagattttattaactataaagtgtttaagaaaaatatgttaaaataaatacagaataaatattaacggagaaaacaaatggacgaaataataaacagacttataaaaataagagatgatagggagtggaagcaatttcacactccagaaaatttagcaaaagcaataaatgtagaagcaggagagttattagaacattttatttgggataataaatttgataaagaaaaagtttgtgaagaacttgcagatgtaatgacatattgtctttatatggctgaatctttagaagttgatatagttgaagtattaaacaaaaagatagataaaaatgaaaagaaatatccaatagaaaaggcaaagggaaatagtaagaagtatactgaattttaatattaaagctttgtataatatttaatttaaaatattaggaaatattagatagtatatattttaagctttaagtgaggaaatttagagcaggtatattagcattaaattatttaacaaaatatataattaattctggaggtataagtgaaaaaattaattaaattaagtgatacttttaagataagtataatatatttcattactactattgttagtatgttaactgctggttttattgtgaaatatgaatatgtaaaaagtgatttaagaagttatttatgggttgcaattatatttactagcttatttttaatactaataagattatttaaagtaaaatataaatcaatattaatatttttaggaataattatgtttctacttttatttgtgcctttagattcagatttttttatctcattagggaatacacctgatgagagtatatttccaataat

SEQ ID NO: 928 - DNA, 21087 bp, synthetic construct
  misc_feature 1..21087: note = Synthetic
  source 1..21087: mol_type = other DNA
ttgattatttcttgtaaaggtatagatacaaaggtgtatgagatgattttttaaaaaccagagggggaaattaagatggaatttcagttaaaagaaatgtattataaggaaattgatagagatatcaaaggtgttataaaagtaggtcaagcagacgatgaaaacataaagcaagagctagaggaatatgttgtaactagcgagctaagtgcaaggcttgatagtttttttgaagtttataagaaaagtattataggatatacagaaaaaaacggagtttggatttctggtttctttggaagcggtaagtctcactttttaaaaatactatcttatcttttagataatagggaaatagaaggaaagagagccattgattattttgatgataaaggattagataattttattttagcaaatatgaagttagctggagatgcatcaacagatgttattctttttaacatagattcaaaatccgattctaactccaagtctaataaggatgccatagttaatgtatttaataaagtttttaatgaaatgcagggcttttgtggttccatgccatggattgcagatttagaaaggcaaatggtgaaagatggagtttatgaaagctttaaagaggtctttgaagaaatatctggcaattcatgggttggatcaagagaagacttctattatgaagaagatgcaattattgaagccttatctaagactacaaaaatgagtgaggaagcagcaagaaactggtacaataaatgcgaagaaaattattctttaagcatagataagtttgctacaagagttaaagagtatattgattctaaaggtaataatcatcatgtggtatttttagtggatgagattggtcagtatataggcgatagtagagatcttatgctgaatttacaaacagtggtagaagatttaggcactacctgtggggggaaatgttttgttgtagtaacctcccaagaagatttaggagatatagaagttgcgaaaggaaaagatttttcaaagattcagggaagatttgatactagattgtctttgtcatcagcaaatgttgatgaagtaattaagaagcgtatacttagaaaaaaagactggtccacaagtcatttgaaagcattgtatggacaaaaggaatccataataaagaaccttataacctttaatgctgaaaatgaaatgaagctatataaaagcagtgaagatttttcagaagtttatccctttgtgccatatcaatttaacttgctacaagcaacttttaatggtgtaagagagcatggtgcatcaggtaagagcttatctaaaggagaaagaagcttacttggggcatatcagcaagttgctatagaatatatgaatagcggtactgatataattgttccattttctgcgttttataataccatagaaacatttttagattcttccattagatcggttattattaaggcagataaaaatgaacatttaaataaatttgatgtagaagttttaaaactattatttttaattaaatatgtaaaagaagtaaagtctaatatagaaaatgtttcaacattgctggtaagtgaaattgatgcggataaaatagaattaaagaagaaagttcaagagtctttaaataatcttataagagaaacattagtgcaaaaaaatggggatgagtatgtattcttaacaaatgacgagcaagatgtaaatagagagattaagaacatgcctgtagacctgggagaggttactcaaaaggtaggggaaataatctttgatgatatatatggagatcctaaattttcatattcaagaagatacgcattcacctttaataagattgtagatgatagaaccagaggacctcaaaccaatgacataggggttaaagttataactgcaaactttgatttagtaggagcatccaacgaaagtgaattaaagttactgtctactagagaaaacaacgtgattataaatatagcaaaggatgttaactatttagaggaaatagaaaatgtactaaagattgatgcttacctaagggttaagggtggaacaaaatcaagtatagccatagaagatattaaggcaaagaaaagtagggaaagagaagagagatcaaaaagggcaaaattcttaatagaagatgctttgagaaatgctgaagtatatgtaaacggcagccttttagatataaaagaaaaagctggggtagatagaataaatgaagggttaagggcgttagtagattctaaatataataaaataaattatgtaaaagactttaaagaaagtactaaagacctctatgacatcatggatgctagaataaatcaaatgtcattaatggacaaaaatccaaataggctagcagtagaagaagttaatacacatatccaaactagctctgcaaggaatcttcaagtcacagttaagaatgtgttaactaagttttcaaatgctccttacggatggaaagacattgacatacaagctatagtagtaactttatttaaaaatcaagaaatcaaggttatattaaacggggaagtattaactccttataatagagaaattataaactatgtaacaaaaagagattatatagagagagtaattttaaaaacaagggaaaaggtaaatcaaaagtatattgaagtggttaaggatttaaataaagatttatttggattctcttcattaccatcggatgaggatgggataatgaggacatttaaagatgagtgtaaagaagaactttcaaaagtaaatgaaatgcttgttaactttacatttaaaaattcttatcctggagagcaaatattaaaagatggtaaaaaactatttgctgaagcgattaatattacggatactattgatttttttaagagagtatatgatttagaagatgatttcctagactatgctgataatattgatgaaataaaaggatttttctataagaaagaaaatggaagattggatttttcatcaagaggagagcagagaattatctttgatgatgccttagataaattagcaaattataaagataacaaagaatatatagtaaatgatgatgtaaaagcaattataggagaaataacagagataataagaatgtctaagccttattcaaggatacctgaaataccttttcttatagaaaagtataataataagatagtgtccttgctagaagaggaaagtgtccctgtaaaaggatttatagaaatgtgcagaaatgaagtgtttgaaactttagaggcatatgactttaaggataaatttaaagataatataattgaagaatttaataatctttataatagagttgatggagctagtagttttgctgtactttcatcaatgccagacttggcagaaaagattaagcttaagtggattaaagaaatagttgcggagaatgaaagagaaaagaggataaaagctaaagaaatagaagaggcaaatagagtagctgaagtagcagcaggtagtgtgattaaagattctaaatctcaacataaagtagaacctataccagaggtggttattaagactaaaactcttagcatgagagaattagtgaagggacaaaaaactataaagaataatgatgatatagatgaagtagtagaagcactaagaagtaaattaagagaagaattagagaaggatacaataataagcttggtataaaacttgtggggaggaaactccccactaaattttaacatggaggagtttatatggataagaataagataaaatcctttgcagtatgggccagaagaaaacttataagttcagtgcaagatagggcaaggtatatagggatatttatagataatgaaggaaaatataatgagctaaaagctgagcaggttcaagggggatttaaacttgaaggtgttgagggagtttttaaattatcttataaggatagaaaggttttaactaatagaattaggtcttatgaggataataaaaaaggctttgaacaagtaatggaagaagtggcctatacttggtttaatagatttatggggctaaggtacatggaagttaatgattatcttcctacaagcataagaatactctcatcagaaatagaaggaaaaacagaaccggatgttttaactagagtttcagaggtaatagatgaattagagttaaatgcagattacatatatgaacttttagatagcggaaaaacagaagatagagaagaagcctataagcatatcttagtaaagcaatgtaatgagcttggtaagataatacctcaaatgtttgaaaaaataagcgactatacagaactattactaccagataacctattagaagaaggatctgttattaggaggatggtagatgatattgaggaatcagactggagagaagaggtagaaataataggttggatgtaccaatactacatatctgaaaagaaggatgaagtatttgcagctttaaaaaagaatgtaaaaataacaaaagaaaatattccagcagcaacgcagttattcactccaaagtggatagttaaatacatggtagaaaactccctaggcagactctggcttgaaggacatcccaatgaagaactccaaaaacagtggagatactacctagaagaagcagaacaagacccagaagtggaagaagaactaaagaaaataagagaagaaaacagcaaattaaaaccagaagatataaaagtactggatccatgcatgggttcaggtcatattttagtttatgcttttgacgtgctatatgaaatctacaaatcagcaggatattcagaaagagaaatccccagactaattctgcaaaacaacctctacggcctagacatagacgaccgagcagcccaactagcatccttcgctttaataatgaaggctagacattataatagaagattattcagagaaatagaaaaagaaaatattgatttaaatttatgctcaatacaagaaagcaatgacataactaaagaagttatggattactttgttcaaggaaatgaagaacttaggaaagatactgaatatttagttgctgtatttactgatgccaaggaatatggttctatacttgaagtagaacaagtgaactttcaagcattgaaacaaagattaaaagaaatcgaagaagatcagaactttatgtttggtgattatagaagaattattttagataaactacctattattattaaacaagcagagataatgagtaggaagtatgagatttgtgttactaatccgccttatatgggaaatagaggtatagggaaaaagttgaataaatatttaaaagacaattattctaaatcaaaaagtgatttaagcactgtgtttatggaaaaatgcataagtaagtgcaagaataaggggtatatgtcaatgataaatattcctacttggatgtttataaaaacatataataagtttagagaaaatttattagatgagaatggaatagttaatcttacgcatttaggaagaggtgtatttggttcagattttgggtctacagcgtttattattagaaaagggtttaaagataattataaagggttatataaaaaactatttgataaccaagtagatgttgatagtttagaaaataaagaaaaattattcttagaagggtatcaaacttttataacaaagcaacaaatttttgatgttattccaactagacctattgcatactggataagtaatagggttgttgatatatataacaatagtgcaaatgttggaacatattcagaagtcactaatggtttgtttacttgtaataatgattatttcttaaaaatgtggtatgaagtaaacttaaacaaatgtattttcaattgtgagaatatgaatgaaacagaagaaattaataagaaatggttaccttataataaaggaggagcatttagaaaatggtatggtaatcatgagaacataattaactataaggacagtggtagagaagtaagggaatttagagtgaagcaaggacaatcatcatcttttccgggagaaaaatattatttgaatgaaagtttatcttggtcatttgttagttattcaacatttggagtaaggttttatccaaaaggatttgtatttgatatagcaggatcatcagtttttgcagacagggaaacattgttatacttagcaggatatttatgttctaaagttgcttatgaatttttaaaaattaacccaacaataaattatcaagcgggaaatatagattcattaccaataatttttgtagaagataaaaaagagagaattaaaatattagttaataatagtattgaaatttcaaagttagaatggaactcatttgagacttcatggaattttaaaattcatccattactaaattttttagataaggttaaagattttaagttaagttcttcttttgaggtttggaaaaatgagtgtgatgtgaattttaataagttaaaggctaacgaagaagaattaaacagaatattcattgatatttatggattgcagaatgaattaacaccagaggttgaggataaggatattactattaggaaggctgatagggaaagggatattaagtcatttatttcttatgctattggctgtatgttaggtagatattctattgatgtagaagggcttgtttatgctggaggagattttgaggataagtggagttttggtgataagaaagttagaaagatagtgaaggatgataatggtaatgtggtagaggattcttgggtagatgctactttcttgcctgatgaggataatattattcctattactgaggacgagtattttgaggatgatatagttacaaggtttatagagtttgttagaactgtttatggagaagtgactttagaggaaaatttagatttcattgcggattctattggaagaaaatcttcagagacttctagacaggctattaggagatactttgttaaggatttctataaggatcatttaaaggtttatcagaagagacctatatactggatgtttgattctggtaagaatgatggatttaaggcgttaatttatatgcatagatatgatgggcaaactgttgcaagagttagaactgattatcttcataaactgcagagaaaatatgaagcagagatacaaagacagcagttaatagtagattcagataaatctactgtaaaggataaaactactgctaagaaaaatatagatagaatagcaaaacagatagaagagtgtagagagtatgatcaagtagtagctcacatagccaatgaaagaaaacctattgatttagatgatggagttaaagttaactattcgaaattccaagaggttaaggtaattaactctaaaggaaaagaagttaagatggatttattagcaaagatataaagttaacattagatgaggggaattcctcatctaattgttataagggtgtgtgaattatgatatttagttataataaagatattagaaaaactgcatatatgaattggcgaacagatcctaataatacagaagcaaattttggagttattgctaatggttattttatttcagctaaagttttaacagaaaagtatatagaaaataacattagaaaagatgcagacgttgtgatttaccctatattatttaacactattcatggaatagaattgtatttaaaagcaatatatatgaagttggcttatatactaaaaaaagagcagcaatatgcaggtggtcacaacattaaagggctattaggcatggtatcaaatttagttaaagaacttaaaaataataaagagcagtttaaacaatataaaaatataattaaagatgttgaacagttcattgatgaagtatatttaaaaacggataaaatggattttgcaaggtattcagtagataacaagaaaaaagaaaattatttttatatagataatattgaaaatgagattgtgaatttaccagtcttattagataaaataaataaaatgcatgaagcgttagaacaattattaagtcattttttatatgattatgaagaagaggattatatttagtggtggtatgtaaggaaggtgatatattgtgctaattaattttgataaatgggaagttgatgaggactctccctttggtagtggtgctagtgagaaaaattggcttattaatcctgaaacaaagcaaaagggtatatttaagtttccaaaaggtgtagatacgggaaatcctacgggtgaatattgggcggaaaagcttgcatcacaattggctgtgattttaggtattgaatgcgctaaggttgatattggaacatacagaggtagagttggatctatgagttatatgatattgaattataatgaagaattaatagaaggtattcaatatattaccaatatatacaaagaatatgatcaggataaattcattgactataaaacagaagaaccctattctataaatatgatacttaaatcaattgaggaaactggattagaaaaggattttctaactattcctatatttgatgctttgataggcaatagtgataggcatcacagtaattgggggatagtaaaaaataaaattaacggtgaaataaggatatcacctttatatgataatggctcatcattatgctgtcttattgctacaaaagatgctcctaatattctaaaagataaaatgagatttgagtctttaatattcggtaaatcaaaatctatgataagatgggaaacacaaagaagaataagacattttgaattagttgaacatattaaaagtgaatattatcaagaaacaatttatatagtagataaaataagagaaaaattaagtgaagataaaataaaagaaatagtattaagttatgatgataaaataattcatccagatttaaaagaattgataagtgtttttctaatagaaagaagaaaaagaattatagatatatattatggagaaaaggaggccgagcgatgagtagaattaatggtagagattatatttatttggtttggaaatgtcatagtactagacaaagatatatagtcggggagctatctcaaaatggtaagtatgaatttaaatatagaattagtgatgtaaataaagcaattcagaatgggtttgaaccattaatagcatttccaaatataaatgaagtatatgaaagtaatgacgtgtttcctgcattctcgagtagattgcctgataagagaagaagagatataagagaaatattagctaaatataaactggaaagatatgatacctttgaacttttaaaaaaaagtggaggcaaattgcctacagatagtttagaatttatagacccaatatttttagatgaagctaatattgtaagagaattttatatagcaggtgttaaattccatgattattgtaataaaaaaaataagactattaattttgaattgaaaattaatgaaaaccttattttagaaaaagatcctagtaatgagtatgatgaatatgcaattaaagttaagaataaagagaataaagttattggatttataccaatattttttagtaaaccaataggtaaagcaattgatagtaaaagaaaaattacatgtgttgtaattgctaaagagtgtagtaatacttgcgcagagtgtataaaagtaagattaaatattttgtaaccataaggatatagtataaaagaacatgtttacaaatcattgcagttatggtatatttaacataggaactaggtaaatatgtatagcatatggagagtttaactagttactataacaaggcgtaaagccgtaaagtatcccctatgttcgtatgagcatgggggtatctttttatatccttatgtatacgtttttattagaaataatttattttatcaaataaatttttatatagattttcttaaaatacacttgtaaggtggggttcaaatggaaaatgaaatcaactatgctttggggcttgatattgggattacatctgtgggatggtcggtaattaatttagatgtaaatagaattgaggatttaggggttaggatttttaatgctgctgaaaatccacaggatggttcatcgttagctttgccaaggagaatggctagaggaagaagacgcttgcttagaagaaaagcttataggataaatagagtgaaaaatcttatattaaaaagagaaatattaagtgaggatgaattgaacagtctttttactaataaagaggttattagtgtatgggaagcaagagtaaaaggattggatgaacaattatctagggatgaatgggcaaaaattttaattaacttttgtaaaagaagaggatttaagtctaatagaaaaaatgaatctaaggataaagaagctggacaaattataagcagcataaataataatcttgaaaaaatgaaagagtcaaatgcaagaaccattggagaatttatctatactgatgccatgaattcaggagataaatacatatcattacgtaataaatctggcgagtataatatgtgtgtttcaaggagtatgattagagaagaaatacatatgctctttgaaaagcaaagagaatttggaaataaattcgctacagatgaaatagaagatgaatacttaaacatatttaattctcaaaggccatactctaaatttgaagatttagaaaaattagtagggttttgtacttttgaaaaaaagaagtataaaagagcacctaagaattgtatttcagcagaggagttcgttttatatgacaatatgaataagctttcaattattaagaatggtgataaaagaaagttaaaagaagaggaaagaaatttaattatcagcgaagcctttaaaaagaaagagataaaatatactagtttgagaaatttattaaatttagaggaagatgaatttttttcaaccttaacctatagtcttgataaagataaagctaaaactgaaaatacaaaatttatttcattaaaaggttatcacgaaataagaaagtccatagaaaatggagtaagcaaagagtattgggaagaaattaaaaataatagaaagatgctgaatgatatagcttatgttttgactttagggaagacagatgaggatattattaaacaattaaaacttagaaatatcacagatgaaatagttatacaatcactcttagatatttcttttagcaagttcaataatctatctatagaagctattgaaagaatattaccctttatgaaaaagggatatcaatataatgaagcttgtgaattggctggatatgactttaaagcaatatataaaggaactaggtctaaaaaattaccagtgattgaaatagatgaaatagtaaatcctgtagttaacagagctttagcccaaacaagaaaagttataaatgcagttatagatagatatggctcaccagtaagaataaatatagaacttgccagggagttagctaaaaactttaaagatagaaaagctattgaaaaagagcaaaaagaaaacagagataatgttgataaaataaaagaagaaattaaaattttaatgagaagagaacccacatccagtgaagtgcttaaatatagattatggcagcaacaaaggtgggaatgtgcgtatactcaacaacctatacctatagaaaagctatttcatgaagggtattgtgagatagaccacatattaccctttagtagatcctttgataacagtctatccaataaagtattagtattaggtgtagaaaatcaaagaaaaggtaataggactccttttgagtattttggagatgttgaagagcgatggaacagattccaaatatgggttaatggaagtagtttaaattacaagaaaaaagttaacttgctaaagaagaaattttccaaagaggaacaagatgaatggaaggccagaaacctgcaagatacaaaatatatatgtaaatatatagctaattatattaacaacagattagaatttaaagaaagtgattcaaaacaaaaggttattactattaatggaagagccacagcttacttaagagcaaaatggggattaaataaagttagagaagatggggataaacatcatgctttagatgcaactgtagttgcagttacgacccaaggcatggtacaaaaaatatctagatatagtaaggctaatgaattaagattttttagagataacgatgaatttgtagatatagaaactggagaaatagtaaaatctgcagataatagagaagttttaaaagatatacttcctagatcttggaggggattcagtgaagaacttaagatgagattaagtgaacaacctctttatgaacttgagaaatatccaatagctacttacgatttagagtttatgcaaaacacagtaaaacctatattagtctcaagagttcctttcagaaaaattggagggaaattgtttggtgaaaccatttactcaagtaaagctttcaaagaagattactttattaagaaaaagaaactaacagaattaactaaggaagatttgaaaaatatctataattatagctgtgataaaatactttacgatgccataacagaaagaatggaagagtttaattataatgctaaaaaggccttccaagaggaatttagaaaaccaactaaaagtggtgaaaaagggcctattgtgagaagtattaaaataaaaacaaaagttccttttaaagatggaatagaagtgaagaatgttgatggattagtggctaaggatggaatggtaaggatagatatttatgaaaaagagggtaagtattttgcagtaccggtatatagatatcagttagctaatggaataattcctaaaaaagcagcattgcagtcaaagtcagaagaggattggccaataatgggtgaaagttataaatttaatttttctatctataaaaatgatttaatagaaataagatataagaggaagaaaggatattttggatattatgataaatttaatagacatacagcttcgttggttattaaagagcacgataatgcaaaagagtatgaaggaattggaataaaatcagatgttttagaatttaacaaatatgaggtagacgtactaggaaattattataaagttaaagtaggtggaaacaattgagctttagaagcataataatttctaatgctgctaatttaacacttagaaataataatctaataataaatgttgaagaagaatttcaaattcctatagaggatatatctgtgttagttatagaaggtgtatccgttaaattaactagcagattattaagtaatttagcagaaaacaatgtggcaactattgtttgtgatgagaaacacttaccatcatctatattgctacctttaaattcacaccatagggcatataaagtgctaaaagaccagttgagtcaaagtgctgcttttagcaaaagaatatggcaaagtataattaaacaaaaattatataatcaggggaaatgcctagagcttctatctctggaaggagtggaatttttaaataagctctctacttcagttgagagtggggacagggggaatagggaagctataggagcaaagtattattttaaatctttatttggagaagattttacacgaaatgatgataatggtattaattctgctttaaactatggatatacaattatgagaagtgcagtggcaagaacacttgttatgtatggattcaacactacactgggagtaaatcattgtaatgagctgaactcttttaatcttgcggatgattttatggaaccacttaggcctattgtagatttatgggttcataataatataaagtatgatgatgccttaagcaaagagcacagaatagcattggtggatttagttaatagtgagtgtattattgatgagcaaaatcattccattttaaatgctatagacaagatggttgcctcttatacaacagcttgtagtaaaaaagattttagattattaaagttacctacaataaaacaattggaataccattattatgagtaggcgatttatgagattattagtattttttgatttacctgttgtagagaggaaagataggaaggcgtatcaggagtttaggagatttttattaaacgatggttacataatgattcaattctctgtgtattctaggatttgtaatggaattgatggagcaaataagcatattgcaaggcttaaaaagaatttaccacctaaaggatcagttagatatctccaaataacagaaaaacaatattgtgaaatgacttttttagtaggttcaccaaatccgcaagaaaagaatataaattcaagccaattgaatgttttttaaaaggtaaaaaccccttgaaacctagttgtttcaagggggttgccagttcctattatagcatatggagaatttactaggaactataacccttatgatatcggcgtatttatatatgacattatagcatatggagaatttactaggaactataactcttcgcataagccattgcaatttgcttttattatagcatatggagaatttactaggaactataaccatagctgtggacatacctaatatagccaaattatagcatatggagaatttactaggaactataactaaaaatgtaaaggtaaataaaccaaaggaattatagcatatggagaatttactaggaactataactcattaattcactcatttttaatcctcctaattatagcatatggagaatttactaggaactataaccgcttggcttaagttccaaggttactgttgattatagcatatggagaatttactaggaactataaccaagaaaaagtatcaacctacgaaagacaaattatagcatatggagaatttactaggaactataacttaaattacctaacttccccgtttaacactattatagcatatggagaatttactaggaactataacgagttgctttcccttgtcgcgcgtctacaaattatagcatatggagaatttactaggaactataaccattggctttaaggcctgttaaggcagaaaattatagcatatggagaatttactaggaactataacggtacatcatacttagatgctgattgcataattatagcatatggagaatttactaggaactataacaaatagcatgggataaagaactaagtgaatattatagcatatggagaatttactaggaactataacacattggagaagatatacctcaacagactaattatagcatatggagaatttactaggaactataaccttgtctttctgttatttttagtaaaaatgattatagcatatggagaatttactaggaactataactgtacaaatcttccatctcttgttctgttaattatagcatatggagaatttactaggaactataactaacccttttagcgttatatacttcagttaattatagcatatggagaatttactaggaactataacaaataattgatataattaatatagatataaataatagcatatggagaacttactggaaacaattaccggaattcgtggataacaaacaaaaatattataaaattggtaatataatcaaagagatgtccaaggtagataagattatttataatgattctcagagcgccaagttttcagtatggaaattagcaaagaaagattaatatcaaatgatttttctttgtaaaatgtgattaataaataaatttacaaagagatttacaaagaaaataaagttaatttaaatgtcattttctataagtgacattgcttaaaaaataagcaatgcttcatatagaaaatgacattttcaaagaggtgtacatatgaacttacaggaaataagaaactttctaaaagagttattttcaaagcccttaggtgatggaaaaaagcgtcatattgtattttggtatgatagcaatgaggatttctctcaagatatagacgagtttgatatagaaagtgttaaggttattagattgactgataacaatgccttttgggctaaatatcatatagaaaaggaagatctaactagtaacatacttgtttattccaatatggaaaagccaagaccagaggaagattggctttacgatattttttgttatagtgaagaattttctacggatagagctactgtaattatgagagaattaaaagttatggatgcttcattaaaagaagaatttaaactttataatactttctttaagagtaaagagagaatagcagcctttaaaaatttaaatatacaagaatatacaaaggaaaaggttcatataggtgttcttgcggttttagctaaagttaaaatcatggatatggaagaaatattaaaggctatattaaaagaatacctagatggtagaaataaaatatatgaagatataaagaaatttggggatatagattctttatgggctttaataattaaatattacggttacggatttgaagaaaatagtttagaaagattcatggccatgcttttaataactaatatgaatgaaacaataagcttccagttaccaaaacaatacgatgcctttatatcaaaaaaggcaactaattgtatagtatttattaatcactttatgaataatagtaaagactcagaatattaccacaagatgcaaaaaatcgtaggagaaaagttaaagctagataagctgctagaacagaatggatcagaaacctttattaactgtgatatttttgaggaaatggataaaataatccttagcagaattacaatgctattaaaggatggattagaagaatacagtaaatatttgaattttattgatgctagaagaactatgcatttttataaaaagtatcagaatgagtataaaggattaaaatgggctataaatctactaaataagaaaagagagttaaattcaaacataaaggcagaagcttcttatgatatgtttaaatcttatattaaggaatactatttcatagataaagcctatagaaagttctactattactatgataactgcatagaaaaagacgaattaagtgacttaaaagaaagtatagaaaatttatacaataattggtacttgcaagagttatctattaaatggtttaattccttagaaaaagaaagtacttggagaattaatgacctaaagtatcaggataacttctatgataagtttgttaaatatggaaaagaaaaagtttttgtaataatatcggatggattaaggtatgagagtgcagaagagcttgcaagtaagcttaccaatgaaagaaaaggaaaggtagagcttgatcacatgcaaggggtattaccttcttatacaaaactaggcatggcctctttacttcctcataagagtatagaaattaattctaaatatgatgtattggtaaatggagttagtaccaatggaactgaaaacagaaacactatattaaagatggaaaaccctaattctatggctataatttataataaggttatggatatgaacgagtcagaaataagaaaagcctttgcaggacttgatgtgatttatatttatcataataccattgatgctataggagataacgcatctacagaaagagaagtatttgcagcaacggaatctgcattagatgaaattattgctttagtaaataagttggtgaatagagtaagtgcagcaagtatagttattacagcagatcatggatatctttacaggagaaatgctatggaagaaagtgataagatatcaggagttaaatttgatgatggtgaagataacagaagattcatattaactgctaatacatgtaatgttgaaggtgctgtagcctttagtatgaattatttattagggccaagttctaataaaaatgttgttactcctaggggaacttctaggtttaaagtacagggagcaggtgctaactacgttcatgggggagcgatgttacaggaagtagtaataccagtgattaagtttaagaatgatcgaagtgagtcctctgtaaacaaaccaagagtggtaaaattaacattaacaagcattacaagaaaaataactaacatcataacttatcttgaattcttccaagaagaaaaaatccaagataaggttttagcacaaagagttaaatgttattttgaagatgaagaaggaaatagaatatctaatgagaatatcattattggagactctagatcagaaaatccaatagaaagaacttatagagaaaagtttgtattaaaaagcattccttatgataagagaaaacaatacttcttagtgatacaggatgatgagaatactaatggaacatatgagagaataccatttaatattgatattgctatagtggatgaatttggattttaaaattaaggggattcattaagtgttggtatagggatggaggttaattgagtgttagtatggatgatttaagcataaaattaaacacacatttcgcagggaaagtagttagaaaggatttaacacaaaagttaaagcaaggtgcaaatgttcctacatacgtacttgagtatctattggggatgtattgtgctactgatgataatgatagtataaatgaaggtgtagaaagagttaagaatatattatctgataattttgtaagaccagatgaagctgaaaaaatcaagtctaaaataagagaaatgtctagatatactgtgatagataagcttactgtaaagttaaatgagaaaaaagatatttatgtggcggaattttcaaacttaggattaaaagatgttgaaatagatgctaattatgtaaaggactatgagaaacttctaggcggtgggatatggtgtatcgttaaagttcaatacttatatgatgaaaccgctaaaaattcttctccgtttttaatagatcaagtaacccctattcagatgcctaatatggatatggatgaacttatagaaggaagaaaacaatttaataaggaagaatggatagatatacttattagaagtataggaatggagcccactcaattaaaaaatgatgttaagtggcacttgtttctaagaatggtaccattatgcgaaaataactataatttgtgcgaattgggaccaagaggaacaggtaaatcccatttatataaagaaatatctccaaactccatattagtttcgggcggtcaaactacagttgcgaacctattctataacatgtcccaaagaaaaataggattggtggggttgtgggatactgttgcttttgatgaagttgctggaataacttttaaagataaagatggtatacagataatgaaggactacatggcttcaggttcctttgctagagggaaggaagaaaaagcagcatcagcttctatggtttttgtgggtaacataaatcaaagtgttgatgttttattaaagacatctcacttatttgaaccattcccagaggctatggcctatgactcagctttctttgataggatacatttttacttaccaggttgggaaatacctaaaatgagaccagagttttttacagatagttttgggcttataactgactacctttctgaatatctaaggaacatgagaaaaataacttatggtgatgctatagataagtattttagactgggaaataatttaaatcaaagagatgtgatagcagtcagaaaaaccgtttcaggattagtaaaattgatataccctcatggagaatttaccaaagaagatatagaagaaatattaagatatgctttagttggtagaagaagagtaaaagagcaattaaaaaagataggtggaatggaattttatgatgttcatttctcttacatagatattgaaaatatggaggaagagttcgtatcagtaccggaacaaggtagtggttcacttataccagaaggtgctatgaaatcaggtcaagtatataccataggagtaggaaactctggaatgataggggtatataagatagaaaccgaagtagtaaatggttctggcaagtttgagaaaacaggtttaggatatgatagagaggcaaaagaaagcatagaaactgcatttagattttttagagctaatagcaggaacataagtgcatctatatcaactactcaaaaagattacttaatgcatgtacaagatattaatggagtaggaattacttcaagtttatccttagctgcaattatagcaatgtgttcaggtgctcttatgaaaccagtacaaagtcagttagcaatactaggttctattagtataggaggaacggtaaataaggtagaagaccttgccaataccttacaagtatgttttgattcaggagcaaagaagatcttactgcccatggtcaatgctacagatttaggaacagtaccaccagaattatttgctaaatttcaaataatgttctatagtggagcggaagatgctgtatataaggcattgggcgtgcaataatatagagctatcagatgcggattttaaaaagcttatatgaaaacagtataactacataaagaaaattgcaaaagaagggttttattagaagaaaagcagcttcacatctttgatgtgaagctgcttttctatactatgtgttctatcacttaatatgattcgtgagcatccatagatttgatttatacaaatcttcggatgctttcaattgtaataggtgttgatttacaatgaaaattgacccccttactttaaaattataagcttgtatggtgacaaagtacatcatacaagggaggcataaagtgaaggtgaaagatttgagagactggtatacagttaataacatgtatagtaagggggtaccgataaaacaaatagctagagaactgggaatagccagaaatacagttaagaaattgattaagcatgaggaggaaccgaggtattcaagaaaagtaacttatacaaagattgatgcttataaagataaaataagagtttggtatttggaaagagattatga

SEQ ID NO: 929 - DNA, 16399 bp, synthetic construct
  misc_feature 1..16399: note = Synthetic
  source 1..16399: mol_type = other DNA
agaaacgttaagtaactttggatacttagagcgttgttttaaaatggaggaaggtaagggtagtgagcatgttcttttaaaagcaataaaaacatctttaaggattactgaagatgacgatttgtttttagaatatattagttcaaggcttgaggatgcagatatagtgtttttaagtggtgtaggtaaagcatggcctattattcgatcacatacaatattaaataatcttcatagaattgttgaaaaacaaccattggttatgttttttccaggtacatatgatggaggaacacttatgttatttaataaattaaaggatgataactattatagagcatttaacttagtagataaatattaaagggtgggggagctatatggatattaaattgaaatcaatgttttataagcctattgatagagatattaaaggggtaattaaagtaggtcaagatgatgatgaaaatataaaacaagaactagaagagtatgtgataacaagtgagttaaataagcatatagatagattttttgaaagttataaaagtggtattataggaaatacagacaaaaatggagtttggatatcaggtttctttggaagtggtaagtcacatttcttaaagatactttcttatctattaaataataaaaatattgatggtaaaaatgcaattagttattttgatgataaggggttagatagctttatattagctaatatgaagcaagcgggcgatatttcaagtgatgtaattctttttaatatagattctaagtcagattctaaaagtaagttaaataaagatgcgatagttaacgtatttaataaagtttttaatgaaatgcaagggttttgcggtactatgccatggcttgcagatttagaaggacaaatgcttaaagagggtgtttatgaagaatttaagagtaaattcaaagaaattagtggtggagagtgggaaaagtccagatctaatttttactttgaagaagatgcaatagtagaagcattatcagaaactactaggatgagtattgaggcggctcgaaattggtataacaaggctgaaaataactactcattaagtatcgatgagtttgcatctaaagtaagggagtattgcgattcaaagggaaagaatcatcatgtagtatttttagttgatgaaattggacagtacataggagataacactcaacttatgctaaatcttcaaacagtagttgaagatttagggactaaatgccaaggtagatgttgggttgtagtaacatctcaagaaggactagatgaatttacaaaggttaagggaaatgacttttctaaaattcaaggaagatttaatacaagattatctctatcttcagcaaatgtggatgaggttattaaaaagcgtatacttagaaaaacagaaggatctacaagctatttaaaggcattatatgagcaaaaggagtccataataaagaatcttttaatattcacttcagatacagctgaaatgaaattatataaaaatagtgaagattttgctgagtcatatccatttattccgtatcaatttaatttgcttcaagcagcatttaatggagtaagagaacatggagcttctggaaaaagcttatctaaaggggaaagaagtcttttaggagcatatcagcaggtagccatagaatatatgcacaataattctaatatactgattccattttcggcgttttataaaacgatagaagcattcttagattcatcaataagatctgtaatcataaatgcagagaaaaatgataaattaaatgaatttgatgtcgaggttttaaaattactatttttggtgaaatatgttaaagagatgaaggctaatattaataatctatccaccttattggttgatagcatagatgtatcacatagagaattgatgtttaaagttcaagagtctttaaagaacttaataaaagaaacattggtacaggagaatggagaagaatatatttttcttactaatgatgagcaagatatcaataaagaaataaaaaatatgaacgtagatactggagaaattatacaaaaagttggagaaattatttttgatgatatatataaagatagtaagtataattactctaaaaaatatatgttttcatttaataagatagttgatgatagaacaagaggccctcaaaataatgaaataggcattagaataacaactgctaacttcgatttgataaatggaggaggaacctctcaaagtgaattaaagagagtttctattagagaaaataatgttgtggttaatatctctaaatatgtaaattatctagatgaaatcgaaaatgtattaaagatagattcctacttaaggttaaagggaggatcaaaatcaaccaatacaatagaggatataaaaactaagaaaagtcgagaaagagaagaaaggctaaagagagcaaaactattaatagaagaagccataagaacttcagagatttatgtgaatggaagtcttttagatataaaagaaaaagatccaataaataaaataaatgagggattaaagaccttaatagattctaaatataataaattaaattatataaaagaatttaaagaaacgtctaaagacctatttgatattatggatgttagattaaatcaaatgtccctagttgatagtgaacccaatagattagctatagatgaagtgaagacacatatagaaataagtacatcaagaaaccttcaagttactgttaaaagtgttataaataaattttctaatgcgccttatggatggaaagaaattgatattcaaggagttatagtatcattattcaaaaaacaggatataaaggttgttttaaataatgaaatattaacgcctaataatagagaagtagttaattatgttacaaagagagattatatagatagagttattttaaaaaacagagaaaaagttccaacaaagtatatagacgcactaaaagacttaaacaaggatttgtttggattttcttcacttcctagtgatgaggatggaatgatgagtatattcatagagcattgcaaatcagaactacacaaaattgagctaatgttaagtagctttagtataacaagcagatacccaggtgaggatatattaaaagaagggaggaaactattcaaagatgcaattgatattaatgacacattagaattctttaagaaggtatatgatttagaggaggacttcttggattatgtagataacatagataatataaaaggatttttctttaaaaaacaaaatggagttattgaaactaactctaaaggtgagcaaagagttatatttgacaatgctatagataaacttaaaaactatgaggagaataaggaatatatagtaaatgatgaaattaaaaatatagttgaagaaattaaatctattttgagaatgaaagaaccatatgcaaagataccaactgttccattattagtagaaaagtataataataaaatattatcactactagaagaagaaagcatacctgtgcttggatttatagaaacttgtaagaaggaagttatagaaactttagaatgttatgaatttaaaagcaagcttataaatcaaataattgaggagtttaatagcttaatcaatagaacagaacaggctaatagttttgcagttctttcttcaatgtcagagctttcagataagctgaaattaaagtggattaaagagatagttgcagaggatgaaagacaaaagagagtaaaagctaaagaaatagaaacagcaaacagagttttagaaactcgttctttagagggaagtaatggagaatatagagcactacctattaatcctgagccagaagtagtaataaaaactaaaaccttaagtatgagagaattagttaaagggcaaaaagttattaagaatactactgacataaatgaagttgtagaagctttaagaaagaatttagaagaggaactagaaaaagacacaatcattagtttggtataaaaaagctaataaatagagtttattaaaaatattgaataaatatagtacaggggaatttatttatggataaaaataaaataaaatcttttgctgtttgggcaagaagaagcttaatagcttctgttagtgataaagcaaatagaattggtatatatgaagataggattgataaagcaattgaggtacaaggaggctttaagttagaaggaaaagaagatatttttcctatatcaaaaagtcatagagatgtactagaaaatcaagttagagaaaaaggctttatgcaagtaatggaagaggtagcttatacttggttcaacagatttatgggtcttagatacatggaagttaatgattatctaccatcaggaattagaatactttcatcagaaattgaagagaaaaaagagccagatgtattatcaaaagtatctgaaataatagatgaactgggattagatgggaatgaaatctatgatcttttagatacaggagacaccttagatagagaaaaggcatatagaactattttagttaaacaatgtaatgaattaggtaaaataataccacaaatgtttgaaaagataagtgattatacagaactcttattacctgacaatcttttagaagatggttcagttataagaaaaatggtagaagatatagaagaggcggattggaaggaagaagtagaaataataggctggatgtatcaatactatatttcagaaaagaaggatgaagtatttgcagccttaaagaataatgtgaaaataacaaaagaaaatatcccagcagctactcagctatttacacctaagtggatagttaagtatatggtagaaaactcactgggaagactatggcttgaaggacatccaaatgagcagcttcaaaaagagtggaaatattaccttgaagaagctgagcaagaaccagaagttaaggaagaattaaagaagataagagaagaacacagtaaattaaaaccagaagatataaaggtactagacccatgtatgggatctggccatatactggtttatgcctttgatgtactttatgaaatatataaaatagcagggtattcagagagagaaatcccaagacttatactacagaataatctatatggtttagatatagatgatagagcagcgcaactctcgtcatttgctttaataatgaaggcaagacattataatagaagattatttagagaaatagaaaaagaaaatttagaattaaatgtatgctcaatacaagaaagtaacagtattcacaaagaagcaatagattatttttgcagtctggaaactggattagataatgatgatttagaaaatgatctagaatatttatggtcaatatttatggatgctaaggagtatggttctatacttgaagtagaggaagtaaactttgaagcattaaaacaaagattaaaagaaatagaaaatgacgataacctaatgtttggtgattatagaaatatgcttttagataaacttcctatgctaattaagcagggggagataatgagtatgttgtatgaggtttgtgttacaaatccaccttatatgggaaacagtggaatgaatgcaaaactttcagagtatataaaaaagttttataaagatagcaaatttgatttgtttgctattattattgaaagatgtggtaaaatgctcataagtcatgggtttcaaacaatgataactcaacattcatggatgtttttatcaagttacgaaaacttaagaaaaaagattatgtgtaaggatatagttaatatgactcaccttggatcaagagcatttgaagaaattggcggagaagtagtgcaaacaacatcttttgtactgagaaatagtgatttaggtagatataagggtatctatgcaagattgattgattatagcagtcaacaagaaaaagaaaaaaaatatttgaaatgccttgagaatagaaaaaataatattaattctaatgacttatattttgcaattaaaattaatttttctaaaatagcaggaaggcctatagcatattgggcaagtgataatattattgatatatttagtagagaaaaatcattagaagaatttgctcaaccaagacaaggtatggcaacttctgacaatagtaggtttttaagatcatggtgggaaattagaagtgaaaaaataggatttaatattaaaagtactgatgaagcaattaattgtaaaaagaaatggtttccgtacaataaaggtggagagtttagaaagtggtatggaaataatgaatttcttattaattgggaaagtgatggagaagaagttaaattatatgctgcaaagttatataaaagttatacgagaacaataaaaaacattccatattacttcaaagaaggaataacctatacttttattagttcatcaagttttggtgttagatattctagttcaggattcatatttgatgtagcaggatcaactatttttccagaaagtaaagattttaaatacttattagcatttttatgttccaaattatcttatgagtttttaaaaatgcagaatccaacgttaaatttccaagtggggaatataaagaagttaccactaatagtagaacaaaacgaatttataaaccaattaacagatagtaacattattatttcgaaaaaagaatgggattctttcgaaacctcctgggacttcaaaacacatccactactaaaactattagataaagctgaacaacataaattaagttctatctttactaggtgggaaacagaatgccaagaagctttccagcagttaaaggctaatgaagaagaattaaatagaatatttattgacatctatggactacaagatgaattaactccagaagttgaggataaggatataactattagaaaagcagatagggaacgagatattaagagtttaatttcttatgctgtaggatgtatgtttgggagatactctattgatgcagaaggactaatatttgcagatggagaatggttagataagtggagaattgaaaatggagagtttagagttagaaagatggaaaaagatgaagagggtaatatattagaggatacttgggtggagcctagatttgtacctgatttagataatgttcttcctataacagaggatgagtattttgaagatgacatagtttcacgatttattaattttgtaaaagttgagtatggaaacgatactttagaagaaaatttagattttatttcagattctataggtagaaagccttctgagacagctagacaggcaatacgaagatattttattaaagatttctataaggatcatttaaagatctaccaaaagagacctatttactggatgttcgattcaggtaaaaatgatggatttaaggctttagtttatatgcatagatataatgagcaaacaattgcaaaggttagaactgattatcttcatactctgcaaagaaaatatgaagcagaaataaatagacttgagttagttgttgattcagaagaatatactgcaaaagatagagctactgctaagaagaagattgatagaatatctaaacagatagaagaatgtagagagtatgatcaggtagttggttatttagctaatgaaaagatagctatcgatttagatgatggtgttaaggttaattatgctaagtttcaagatattaagatgattaatactaaaggtaaagaaattaaaatgagtttgctttctaaaatatagaataatgtttaattatagaataaagtatggaggttaacaatgaaaacttatattgaggaaattaatataattaaattaagacatttagaaaatatccatatagatatatctagtaataggagtaaaaatcatctaatactaacaggaaaaaatggagcaggaaaaaccacagtacttaaaagtataaaaaagtacttaaaatcaatagaagataatatgtactatccaataaatatagattataaaaagagtatagaatattataaaaacagaataaatgagatagatcagggtttaaatataaataaagaaaatccatttgaaaaacagcagttacaagataatatgaagtctcttcaagatactattaattcatatgagaatggattaaatataggaattagcaatgattttgaggttggttctaaatataaaaacggagagtttattttagcatactttgatgccaatagggactcaaaggttatagtcccaaactcagtaaatagaatagaactacaaaataattattctattgatgctgatattgatactaaatttttagattatttggtataccttaaaactcaacaatcttttgctagaaatgagaatgatttaaatactgttaattctataggtgcttggtttgataatcttgaagaagccctaaagaatttatttgaagatacttctataaaattaaaatttgactacaggaatttagattttaaaattcaacaagatggtagagaagattatggattaaatgaattatcagatggtttttcagctgtattagatatagtaatgaatcttatattaagaatggaaaaagacagggaaggattgtcttatgataaagaaggcattgttttaatagatgaactggagacacatttgcatattgggcttcaaaaaaagatactacctttcttagtaagtttttttcctaatattcaatttatagttacaacacattcgccatttgttattagctcaatagataacgctgttatttttgatttagaaaagaaaataaaactagaggatttaagtgcttattcttatgatggcatagttgaagggtattttaatatagataaatactcaacagaagcaaaagaaaagttatttagatataaagaactagtaaataaaattgataaaaatgaagaagaagaaagtgaagagtttgaattaaggaattatctaaagggaattccagagactcttgcaagcgaaatagtgtatgaatttaaaaatatagaattatcaaaacttaagaaaagatagacagggggcagaggttatgattagagtagaaagaaaaccagtgccaagtgatctagcaaaactagtaaaggatacaaagaattatagacatcaagttgttgtagaaaaaataaaagaaaactttaataataagtgttatttatgtgaaataaaagaaagtacatcaattaatatagaacattttattccacataggggagatgaaaatctaaagtataaatggagcaatctatattttgcttgttctcattgtaacgggataaaaggtcatagatatgataatatattagacccgttaaatgaggatatagaaagctatattaattgtagaatggatgctgttccaatggcaaaggttattattgaaggaacttctcaggatgaaaaggtaattaatacagtaaatttgttggatgagatatttaataaatgtagtgaattagctggtgttagaactgaagaaagtaggaacctaagaaataagctattaaaagagttaagaagctttcaaaattccttgtttatttattatgatggagatgaactagaagaagatagagaaaaagctaaaaaagaaataagaaagcatttaagaagtaagtctcaatttactgcttttaaaagatgtttaataagagaaaaagatgtcatatatgaagagtttaaggacgagtttatataagggacatgttgaattttataagactatataaattttaatctgaatatggttagtacatattgacagttaaagaataaatatgtaaaatattattagaaactaaataaacatttatagcatatcgagagtttagttagttactataacaaggcattaagccgtaaagtatcccctatgtttatattagcataggggtatctttttatataaagggggagtgattaatgagatacagattaggtctggatatcggcattacatctgtgggttggtcaataattaatttggatgagaatagaatagaagatctaggggttagaatttttaatgctgctgaaaatcctaaagatggagcttcattagcagcaccaagaagggaagcaagaggaagaagacgattagttagaagaaaagcttatagagttaatagagttaaggaaatgcttgtagatgaaaaaatcttatcaaaagatgaactagataatttatttacaaatataaatgtagcatcggtatgggatgttagagttgaagctttagatagaagtgttactaatgaggaatggtcaaaggtattaataaatttttgcaaaagaagaggatttaaatcaaatagaaaaaatgaagtaaatgataaagaggctggagtaataattactagtattaagagtaatgaagataacatgagagcggcaggttcaaggactataggtgaatatatttataataaagctaaaaactgtgatgatagatataaacctctacgtaataaatctggacagtacaatatgtgtatatctagaggcttgatacgtgaggaaattcatacattatttgaaaagcagcgttcatttaataatgattttgcatcagatgcaatagaagatttatatttagaaatatttgattctcaaagacctttctcaaaatttgaagacttggaaaagatggttggattttgtacttttgagaaaggtaagtatagacgagctcctaaaaatagtatttcagcagaggaatttgttttatatgataatctaaataaattatcaattataaaagatggatctaaaagaaaattaacaaaagaagaaagaaatgttgtagtcaacgaagcatatgcaaaaaaagaaattaaatattctagattaagaacattactagaattagatgaaaaagaatttttttctacacttacatataatttaaaagaatcatatttaaaaactgaaaactgtaaatttgtttctcttaaagggtatcatgagataagaaaggcaatagaacatggtattagtaaggattattggaaagataacattaaagagaatagaaaaatgcttaatgatattgcttatgtgttaactttaggaaaaacagatgatgatattagagtacagcttagaaaacgagaaatcccaaaggaaataatagatgtggttatagatatatcttttagtaagtttgggaatttatctattgaagctattgaaagaattcttccttttatgaaggatggttatcagtatagcgattcttgtgaaaaggcagggtatgattttaaagctatttatcaaggagaaaaatcttataagttaccagtaataaaaatagatgaaattgttaatcctgtggtgaatagagcattagcacaaacaagaaaagtaataaatgctgttattgatgattatggctcaccagtaggcataaatgtagagcttgcaagagaactatctaaaaattttaaagatagaaaatctatagaaaaagaacaaaaagaaaatagagataataaagaaaaaattaagcaggagatatcatctctaatgggtaaagagcctactggaacggaaattttgaaatatagattatgggagcagcaaaaaagtgaatgtgtttattcccaggttggcattagtataaatgatttgtttgatacaggtatatgtgagatagatcatattattccctttagtagatcatttgatgatagtttaaataacaaggttcttgtattggctagagaaaatcagaacaaaaagaatagaattccttatgaatatattggggatgatgaggaaagatggcatagatttgaggtttgggtaactaatagcagactaccatataaaaagaaacaaaacttattaaagaaaaagttctcagaagaagagcaaagggattggaaagctagaaacttacaagataccaaatatatttgtaagtatatagctaattacattaataacagattgatttttgcagaaagtgaatcaaagcaaaaagtcattactgtaaatggtagagctacttcttatttaagggctaaatggggtcttataaaggttagagaagaaggggacaaacatcatgctttagatgctacagttgttgctgtaaccacacaaggaatggtaaatgaaatagctaaatacagcaaagctaatgagttaaagtatgttagacaaggggatgattttgttgatatagaaactggtgaaatagtaaaacttgcagactataagtacttattaaaagataaacttcctagaccgtgggaatattttagcgaagaattaaaacttagattaagtgatagtccgatagaggaattgaagaaatggctgatagcgacttatgatcaagaatttatagcaagaaaagtaaaacctatatttgtatcaagagttccttttagaaaaattggcggaaaactatttaaagaaactgtatactctaaaaaagcatttaaagataactattttgttactaagaaaagacttgatgatttaaagatcagcgatatagagaatatacatgattatcactgtgataaaaaactgtatgaagctatagaagttaagttgagagaatttggtggagacggtaaaaaagcttttaaagaagaatttagaaaaccaactaaaagcggtaatttaggtccagtagtaaaaagtattaaagttaaaactaaggttccttttaaggatggcattgaacttaatgaaggtatagttgcaaaaaatagaatagcacgtattgatatctattcaaaagagggtaaatattttgtagtaccagtatacgtccatcaaatagcaagtggaataattcctaagaaagctgttgtggcagcgaaatcagaaaaagactggattaatatagatgaaagctatgagtttgaattttatttacacaaaaatgatttaattgaaatcaagtatggcaataaaaaaggatactttggttattttgattcttttgatgttggaactggagcattgacgattgaagagcatgattcctctaaacaatataggggggttggtgtaaaagttggggttactaaatttaataaatacgatgttactgtgttgggaaaattctataaggtaaaaagaggttagcttatgagttttagaagtataattatatcaaatccagcaaagttaaatgttaagaataataatttaacaattacaaatgaagataagtttgaaatacctatagaagatatatctattttagttattgaaagtaacagtgttactgtaactaacagattattgagtaagttagctgataatagtgtggctacgataatctgcgacgaaaagcatttacctaattcagtggtattaccactaaattctcatcatagatcctataaggtactaaaacaacaattaaatcaaacagcagcttttagtaaaagaatttggcaaagtattattaagcaaaagcttataaatcaagggaaatctttagagattttgaatcaaaatggatatgaatttttatataaactttcagatgcagtggaaagtggagataaaggaaatagagaagctataggagcaaagcactattttaaatgtttatttagtgatgactttacaagagatgatgataatggttataatgctgctttaaattatggatatacaattataagaagtgcagtagcaagaactttagttatgtatggatttaatacaactttgggagttaaccattgcaatgagttaaactcctttaaccttgcagatgattttatggaaccatttagacctatagttgatatgtgggcatcacagaatatgagttatgactgcttattatcaagagaagatagagtagcattagttgatttggtaaactgtgaatgcataataaatggtcaaaatcattctgtactaaatgcaattgataaaatggtttcttcctatacaacagcaattggtaaaaaagattacaggttattaaaattaccaacaattaaacctttagaatatcattattatgaatagaaattttatgagattagttgtattttttgatttaccggttgtggaaagagtagataggaaagcatatcaaaattttagaagatttttactaaatgatggctatgtaatgattcaattctctgtatattcaagaatagtaaatggaacagaaggagcgcttaaacatttaaaaagattaaaagagaatttgcctagcaaaggttcggtaagatctttacaaatcacagaaaaacaatattcagaaatgaagtttttagtaggttcaccaaaaaagcaagaagaaaagataaattcatcccaattaaatgttttttaaaaggcaaaaaccccttgaaacatagatgtttcaaggggtttcctagctcatattatagcatatcgagaatttagtaggaactataaccccttaacaaaaagattgactaacaataaaattatagcatatcgagaatttagtaggaactataactcttgcatcttaggtgttatagaaattttaattatagcatatcgagaatttagtaggaactataaccctatcatatatatatacgaacctctaataattatagcatatcgagaatttagtaggaactataaccacagaactacgaacaatattagaatcaatattatagcatatcgagaatttagtaggaactataactcgtatattcgttaatggtacttatagtctattatagcatatcgagaatttagtaggaactataactcctttaaggctctttatctaattattttaattatagcatatcgagaatttagtaggaactataaccccatctacttataatgcttctaacccttaattatagcatatcgagaatttagtaggaactataacttcttatgtattacattagctttttctgatattatagcatatcgagaatttagtaggaactataactatagaagtaattattctttcctgtatattattatagcatatcgagaatttagtaggaactataactggaaccatatcgcatttaatatgatatttattatagcatatcgagaatttagtaggaactataacagatgtatttatagattcagcagaccaggattatagcatatcgagaatttagtaggaactataacgcccatacctaaactactattcttttcaccattatagcatatcgagaatttagtaggaactataactattaacggagctattactggacttaataaattatagcatatcgagaatttagtaggaactataacgtttcttctttagttaatttttgttccaggattatagcatatcgagaatttagtaggaactataacttatgctgctatacaaagtgaacgtggtcaattatagcatatcgagaatttagtaggaactataacacttttaacactaagtgcatcactctatttattatagcatatcgagaatttagtaggaactataactgcgatgtaggctttagccgtcgcaagagcattatagcatatcgagaatttagtaggaactataacttcaaataatgtaactatgtctttgtttccattatagcatatcgagaatttagtaggaactataacaggatctgcgacacaaccatctgtaaaatattatagcatatcgagaatttagtaggaactataacagttttatgtacgctatttctaacacttttattatagcatatcgagaatttagtaggaactataacgtagcttttgtagcatagagattttctataattatagcatatcgagaatttagtaggaactataacctcaccgataaaattaagtcattattgaagattatagcatatcgagaatttagtaggaactataactttttctgcgatattaacataaccttttatattatagcatatcgagaatttagtaggaactataacaacaaaatatggaatataaaaaggatagatattatagcatatcgagaatttagtaggaactataactctagttttcatatttattacctccaacaaattatagcatatcgagaatttagtaggaactataacagttctacaggaactatagctgaatctataattatagcatatcgagaatttagtaggaactataacatagctgcaataataacctttcttgtagtaattatagcatatcgagaatttagtaggaactataactgctaatgttgatcagactatgtttggtgattatagcatatcgagaatttagtaggaactataactactatatctttatctgacgctttgacgtaattatagcatatcgagaatttagtaggaactataa

SEQ ID NO: 930 - DNA, 16001 bp, synthetic construct
  misc_feature 1..16001: note = Synthetic
  source 1..16001: mol_type = other DNA
tgaatatatataattatttaagtacatattctagattagttgattatagtagccaatcattaaaagaaaaagagtttttgaataaaaaaaatatttttgtttcaaataaagaaaattttaacaaaataccgggaagtccaattgcttattggattagcgataaatatataaataattttacactttcccataaattagggaaaacgtgtgaaactaaaaaggggttagttacaggaaataacaataaatttttaagattatggtttgaggtttctagtagttctatttcatatatgtgtcattctaacaaagaatctaaaacaaataatattaaatggtttcctattaataaaggaggagattttagaagatggtatggaaataaggcgcatgttattaattggcaacatgatggttttgaaattaagaattatagagatttaacaggaaagttattatcacgtcctcaaaacttaaaatataattttaaaaaagccattacatggactaaaataacaagttctttattttcagctaggttaagtcaaggtggtgaattgtttgatgatgcagcagcaatttgttttaatgataattctgaatatttaaattatattatgggttttctaaattcaaagtgttgtcaagaatatataagaatactaaatccaacaatgaatgttcaaattggagatattggaaatttacctgttaatttatttgaggatgttgatattgaagttttgaatatagtaaaagaaaatatacaattatctaaaagtgattgggattcatttgaaacaagttgggatttcgccaagcatccattaattacatataaaacaaatgaagatgatgtagatatatctataaataaatgcaattataaaattgaagatgcttttaactcctggaaagaaaatgctgaaatgaatttttataagttaaaagaaaatgaagaagaattaaatagaatatttatagatatttatggacttcaagatgaattaactcctgaagaagaagataaagacgttactattagaaaagctgatagagaaagggatattaaaagttttatttcttatgcagtaggatgtatgcttggaagatattctatagatgctgaaggacttatatatgctggtggagattttaatgataaatgggatttagaaaataaaaaagtaagaagtataaagaaagacgaagatggcaatatagtaagtgatacatgggttgatgctacatttttacctgaaaaagataacattattccaattacagaagaagaatatttagaaaatgatatagtttctagatttgttgaatttgttaaaactgtatatggagaaggcaccttagaagaaaatcttaagtttattgctgaaagtttaaaaactaaaggtaattcttcaagagaggtaataagaaattatttcttaaaagatttttataaagatcatgtaaaaatatatcaaaaacgtcctatatattggctttttgatagtggaaaagaaaatggatttaaagcacttatttatatgcatagatataatgaagatactgtaggaaaagttcgtacagaatatttgcataaaattcaaggcgctattgaaaattctattttaagagcagaacatataatagaaaatagtgataatgcaagagaaaaagctaaagccactaaagagaaaaataaatatataaagcagcttaaggaaacaagaatatatgatgaagctatggcatataaagctaatgaaagaataaatattgatttagatgatggagtaaaagttaattatgcaaaatttcaggaaatagagattacaaaagaaggacaaaaagcagttacaattaatttattggcaaaaatatagaaatatattggggatgattttaattattaaaatagatacaaattcaattgaaagatgggatgaaataataaataagcatagaaattatattaaagatattcttaattgtaatataaataaaattatgagtaatacagatttaatatatttatttactggaattaacaacaatgaaagtatagaaaatgctatactagaagaattaattaaatgtaatatagttaatgatatagctttaggtaaaaaggaaaattggaaagaatatattaatcgatttgaaaaattatataaagataacagggtgataattgagttcttaaaaagtaaaagtaataaagaaaacataataagtaatttatctaaaaagttaaataaaaaaaagtataaaaatgatataaataaactttctaaattaattgaaaatgaagaattaggtaagattaataaagaacaaaaaatacaaataatatctaaagataatagtcttaacaaaaaatataataattatatagaaataaatgaaatattaagagaagtttttaattatgagaattttcaaaatggtattaaagaatggaacagaaatgaattattatttgagatggatataagagtttgcccatattgtaataggcagtatattactaaatataaagaaaaaagaaataataaatctactgcagatttagatcatttttatccacaatcaaaatatccttttttagcattgtcattatataattttgtacctagttgtcaaatttgtaatagaaattttaaaaacgctagtgataaggaattattatatccttatgaagaagagtttgatgataaagatcttcaatataaatttagaacagaatttgataataattatgattttacatatttgttaggtgaaaatattaattttaatttaaaaatagatacaactattaataatatagattgtgcaaaaaaggaaagagcaaaaaatagtaaagagatttttaagttagaagaagtatatgaagaacataagaataaaataaaagatattattaaagatttttattattacaataatatctggcaatgtgaaattaaaaatttatttgataatataaataataaatcaaatttattatttaatgaatatacaatagaagatttatatttaggaaaatatttaaatattaaaagtaacaatcaagatgtattaagtaaattgattagcgacatagtggatgaaataaaagaaaaggatagtaactatgaaaaataatatcaaattatgttatctttatatatgtgatgaagatggtaaatatgaaataagtttggataatgaattaaattttaaatattgtacaaatacaattaatataagcaaaaaagtaaattatattaagcacttttatggtgaaaatataaataattttaatttatttataggaaaaaatggttctggaaaaactacatatttaaataagataatagatagtatagattatttagaaagcaacatgattaagattataaatataaatgataaatatgttgttttttatgataaaaaatttaaattaaatgaagaattagtagtgcaaaattttaatgatattgactgtaaagatgtgaagcttgaatcttatgaattagaagactatttacttttaaatcctgaaatatatgaaaaatatattgatgatgatagtggttatagttctatatacttttcaaatcaattttctatgtcatcatatttaacttcgagaaatagtaatatgagcaaagaagtatatttcccatataatattggcattaaacatttattaacgtttcctagtaatatgttagaaaataattttaaagataaaaatttttatatgagtgaaagtaaagtggttaactattatgaaaattatttatactataacatatgtaattttataagtaaaaataaattaattattgatttattcaaaattgattcaataaagaaaatagctattacttcaaatcaaaattttaaaaatacttctaatgttcgaaaaattattgcatatttaggaaatgaaaatgataataaaaaaatttatttggactttatagaaaaatgtaagaaaattaatgataaatataaagttttcctagtagcaatgatttcaactttatataatggcatagagtatcttgtatatgaaggacagcataatacagattgtaaattggaattaaaaaaaacattatttaattggatgagacaagtacaagataaactgtcagaaaataatataactttattaaaggaattattaaatatatacaatacttttttgaaaaaacataaaaatgaaatttatgctcctagcatagaaaatattagtataaattgtattcagaaaacaattgaattaatagatttcttagatgaacaaaaaaatagctatgagtttaaaaatgaaaataattctattaagtttatagttgatattagtaatttagagtttcttaataggtttataaattatatttgtgatgcatttgaaaattctattagtttttttacttataaattttatgatataaaaaataagatggtttctttatcatcaggagaagaagaaatattgtctatgttttctaaaatatataaagcacttcaagacatgactacaacttatgctaaagaaaattcgtatgaagatgttaataaaaaattagatactgtattaatttttttagatgagccagatatttatttgcatccagaatggaaaaggatatttttatcttcattttttgaatatataaaggaaatatttaaagaagttaatgttcaattaataataacaactaattcaccaatattagcaggagatgtcccaagacaagatataattaaatttgaaaataaacaaatagaagagtacaatagttcacttaaagatacatttgcaaaaaatttattatctttatttaaagaaacttttggaatgcagtcattattaggtaatttttctacaaagaaaataaataaggtaattgaacaaattcaaaagaataatttagatgagcaggagaaaaataatattcaaaaattaattaatataataggtgagcctgtgattaaacgaaaaatacaagagatatattatgaaaaatataatagtggacttacaaaagaagaaataaatataattaataatgcaaaaagcaaaggatatactattgatcaaatttcagatttaacagggataagtaaggataaaatacaaatagttataggaatacaataaaattattatttaatatagggagtagttatgataaataaagaaatacaagacatagaacaaaaacttaatacagaatttgaaaaagataatataagactaatattttggtatgatgaaaaaaaagagtatgaagaagatattgatacattagaacttaaaaatgctaaaattcataaacttaatggaagaaattttttttatactaagtatttattagaagaattagataatgacagcaagtatttaatatatgctccatttaaaaagggagaagataaaaataatcatttagcagatatgcattattattccctagagttttatacagataagttatctcaattatgtcaggaattaaatataccatctaaatataaaacacatttagaaaagtataataatttttggaagtcaaaagaaagaataagcaggtttaaatctttaagtttagataattataataaagaaaatatagatataggtattttaagtgcattagtaaatattaaaacagctaattttgaagaagtattaactaaaataattatttatgatgattattcagattctaagtatttatttgaatttagtaaaatgaatatacttgatacattctggttattatgtaaaagatattttggatattcttctgaaaagccttttgtttatgattttgttactcatttaataattacatattttgcatttcaagttaaagatggaatgtgcagtgaccttgaaaaatatattttaccaaaggtaaatgatgcagttgtttttataagacacattatggataatatactttattctgaaaaatatgatgaaattgctgataatattagtaatagattaattatctctaaaaaagtaaaaaatatatctttaaactttttaataaaatgtgattcattttctttatttgatgaattaataattaattggattaaagacaagctagaaaatgatttatatgatgaaaaaataaatgatatgaatatatcagaaatatgtgagtatcgtatgaataattcaaagcatttttataaacacttttataatgaatataaaatgttaaatgcagcttataatttaataaagaaaacaagtgaattagagcttggaacttcattaaaggaaatgattaaattatataacaataataattataaaatagattcttattatagatggttttataaaacttttgatgaacttaattatacagataaatatgaaaatttaagaattcttattgaaaatatttatagtaatgattatttatctaaaatagttcctaaatggaatgaatatttattatcagaaggttatgataatggaaataatcctatggcaaaagatttttataaaacttatgttaagccttatgtaaatgctgatgaaagaataattgttataatttcagatgcattaagatatgaatgtgctaaagaacttgttaaaaatttagagtttgatgaaaaatgtgaagctaatatagaaagtgttctttctgttttaccttcttatactcaacttggaatggcagtacttcttcctcacaaagaaattcattacaataataagcttaatgttttagtagatggcaaacaaagtggtgatttaatatcaagagagaaaatactaaatagttatgtaccttctagtgcttgttttaggtttgatgaaatagctaaaagtaaaagagatgttataagggaaaaatttaaaggaaaaaacattatttatatttaccacaatcaaattgatggaagaggagaagaattagttactgaaaatgaagtatttaatgcttgcagtgaagcaataaatgaaattcaaaaatttataagaaaattatcttatgatatttctgctaataaatatataataacatcagatcatggatttatatataaaagagataaacttttagaaagtgataaagttaatataaataaaaatgattatattaagacagataaaagatatatattgtctaatgataaactagatattaatggaactttaaatttttcattaaaatatttaggagataaaaatgctttatttgttacaacacctgtaggtgctgatgtatttaaatcagcttctggaggccaaaattatgtacatggtggttcatcgattcaagaaatgctaatacctgttgttttagtaaaaacttcaagagataaacaaaatgtatctttagtaaatgttgaacttacatcaattactagaaaaataactaatttaattacatatttagattttattcaaacagaaaaggtaacggatataattaaagcaagaaatgttattgcatattttgttacagaaagtggtgaaaagatatcttttgatgttccaatgatggcaaatagtaaagaaacatctgcacaaaagagaatttttcatgagaaatttacatttaaaagcagaaattatttaactagtgaaaaatattatttagttattgtagatgctaatgatgaaaataacatattaaataagtatgaatttgatatagatatagcctttgctaatgattttgggttttaatatatggaggaatatattttatggacgaggagttaactttaaatgaaaaattaaataagtattttcaaggtaaaattgtaagaaaagatttaacaaaaaagataaaggaaggtgctaacgtacctgtttatgtgttagaatatcttcttggaatgtattgctcgtctacggaagaagagcagataaatgagggagttaataatgttaaaactattctttctgataattttgtaaggcctgatgaagcacaaaaaattatttcaaaattaagagagcaagggtgttataccgttattgataggcttacagttaaattaaattataaaaatgatacttatgaagctgaattttcaaatttaggtataaaaaatgttcctcttaattcacaatatgcatctgaatatgacagacttctttgtggaggtatatggtgcatagttcaacttgaatattattttgatgaagaagataaaaatggatgtccttttattataagaaaacttacacctattcagatgcctcatattgatattaatgaaataaaagaaggaagaaaagcattttcaaaggatgaatggattacaattttattacgttctactggaatggaggcagataaattttctgaaagagaaaaatggcttttacttgcaagaatgattcctttagtagaaaataattttaatttatgtgaattaggaccaagaagtacaggaaaatctcacttatataaggaaatatctccaaattctattttggtatcaggtgggcaaactacagtagccaatttattttataatatgggcagaaaaactataggtcttgtaggtttatgggattgtgtagcctttgatgaagtggcaggaattacatttaaagataaagatggaatacaaataatgaaagattatatggcttcaggttcttttgcaagaggaaaggaagaaaaaaatgcatcagcatctatggtttttgtaggtaatattaatcaaagtgttgaatctatgttaaaaacttcaacattatttgagccatttccagatgaaatgggaaaagatactgcatttttagatagaatgcattgttatattcctggatgggaaattcctaaatatagaccagaattttttacaaatgattatggatttataactgactatttatctgaatttatgagggaaatgagaaagacatctttttcagatgcaatagataaatattttaaacttggaaccaacttaaatcaaagagatgttattgctgttagaaaaattacttcaggattaattaagattatatatccagatggaaattttgaaaaagaagatataagagaaatattagaatttgctttagaaatgagaagaagagtaaaagaacagcttaagaaacttggaggaatggagttttatgatgtgaatttttcttatatagataatgaaacatttgaagaattttttatatcattgccagaaattggttacggaaagcttattccagaaggaattttaaaacctggtcagctttatacaatatctcaaggaaaaaatggaatgataggtgtatataagctagaaacagaagtagttcctggaagtggcaaatttgagaaaacaggaataggaactgatagagaaactaaagaatcaattgaaactgcttttagatattttagagctaatagtaaatctataagtgcaggtataagtaccactactaaagattatcttatgaattttcaagatttaaatggtataggaatgacaaatagtctatcattagctacttttatagcattatgttcagcagcacttaacaagcctttagttagtagtattgcagttttaggtgaaataacaataagtggtgcaattataaaaccagaagagctagcaagcatattacaagtagctttagatagtggtgcaaagaaagtgcttatgcctataacatccgccgctgattttccaagtgttccttctgaattaatgggaagttttgatatagtattttatcaaacagctgaaaatgcagtatttaaagcattaggtgtagaataaaatgtttaaattggttgacatattttttatatagtgctatcctataaatagaaactaggtaaaatgttttatagcatatcgagagtttaactagttgctataacaaggcaataagccgtaaagtatcccctgtactcatttcttgagtgtaggggtatctttttatacatatatttttatggaatttaaggtaaaaaatatactgtaaaggatgatgaatatgaataaaaaaattgattatgctttaggtttagacattggaataacatctgttggatggtctataattaatctaaataaaaatagaattgaagacttaggagtaagaatatttaatgcagcagaaaacccaaaggatggttcatcattggcattgccaagaagaatggctagaggtagaagaaggttattaagaagaaaagcttatagagttaaaaaagttaaaagattacttgtaaaagaaaacattttatctcaagatgaacttaatggtctttttgaaaataagaatgttattagtgtatgggaatgtagagttaaagccctaaatgaaaaggtttcaaaagaagaatgggcaaagattctaattaatttttgtaagagaagaggttttaaatcaaataaaaaaagcaatagtgaagataaagaagaaggaataatccttgaaagcataaaggcaaatgaacagaaactagaggaatcaggttatagaacaataggtgaattaatatacaatgaagtgaacaattctaatgataaatataaacctcttagaaataaatatggttcatattcaagatgtgtttcaagaagtatgataaaagatgaaatatattatttatttgaaaagcaaagagaatttaacaatgagtatgcatctaaagaatttgaatcaaaatatatagaaatttttgattcacaaagacctttttctaagtttgaagatttagaaaagatggtaggcaattgtacattggaaaagaatgaaaaaagagcaccaaagcaatgtatttcagcagaagaatttacattatatgataatatgaatagattatctataattaataatggtgacaaaagaaaattatcaaaagaagaaagaaaaattatttgtgatgaagcatttaagaaaaaagaattgaagtatagtacattaagaaaaatattgaaattaaaagatgatgatttgttttcaacattaaattacaatttagagaaagcagacaagtcaaagactgaaaatgcaaaatttgtgtctttaagtggatattatgaaataaagaaagttatttcatatggaattagcaaagaatattttgagtctataaaagatagtagaaagttattaaatgatatagtatatgttttaactgtttctaaaactgatgaagatacaaaaaaacaattgagcataagacaagttccagaagaaataatagattgtgtatgtaataataatatatcatttagcaagtttaataatttatcaataaaagcaattgaaaatatattgccttatgtaaaagaaggttatcaatataatgaagcttgtgaaaaggtaggatacgactttaaaggcatgtttaaaggagaaaagagttataagcttccagtaatacaaatagatgaaatagtcaatccagtagttaatagagctttagctcaaacaagaaaagtaattaacgctgttatagaacaatatgggtcacctgttagaataaatattgaattggcaagagaattagctaagaattttagtgatagaagtaagatagccaaagaacaggaaataaatagggctaataaggaaaaaattatagaagaaataaaagaattgatgaataaagaaccaacaggaagtgaaattctaaaatatagattgtggaaagaacaaaatggagaatgtgcttattctcagcgtggaataacaattgatgaattatttactccagggtactgtgaaattgatcacatattaccatttagtagatcttttgatgatggtttaaataacaaagttttagttttaggaaaagaaaatcaaagaaaaggaaatagaactccatgtgaatatttaggaagcaatgaagaaagatggaatgcttttgagatatgggtaaataatagtacattacgttataaaaagaaaaataatctgttaaaaaagaaatttttaagagatgaacaaaaagattggaaagcaagaaatctacaagatacacaatatatatgcaaatatattgcaacatttgtaaataacaggttaaagtttaatgaagatagtgagttttcaagaccacagaaggttataactgtaaatggaagagctactgcatatctaagagcagtgtggggattaattaaggttagagaaaatggagataagcatcatgcattagatgcaacagttgttgcagtaacaactcaaggaatggtgcaaaaaatatcaaaatttaataaagcaaatgaattaagaagttttaaagaaatagatgaatttgttgatgtagaaacaggagaagtaatagatgtaaatgaatattctgatataagaaaaaataaacttattccaagaccgtggcaaggatttagtgaagaacttaagataagattaagcaatgatcctatatctgaattaaacaaatatccaataagcacatatgacaaagaatttattagagatactgttagacctatatttgtatcaagagtaccttttagaaaagcaaagggaaaattatttaaagaaactgtttattctaaaaaagcatttactcaaaatgggtatgttgctaagaagaaattagttgaccttactttaaaagatatggacaatgtatataattatgaatgtgataaaatcttatatgatgctattaaggaaaaattaatagaagcagatggaaaggctaaaaaagcttttgaagaagaatttagaaagccaactaaaagtggtaaactaggaccagtagttaagagcattaaaattattgcacctaagatgccaattaatgatggaatagatatgaatgaaggaattgttcaaaaagaaggaattgttagaatagatatttatgagaaagataataaatattatgcagttccagtatatagatatcaaatagcaaaaggaattatacctaaaaaggcagcagtagcatctaaaaaagaagaagattggacaataatgaatgaaacatataattttaaattttctatatttaaaaatgacttaatagaaattaggtataaaaataaaaagggatattttggatactttgatggatttgatagatcaacagcttcattaacaatagaagaacatgataattctaatagaaatagaggaattggaattaaaactaatgtaattgtatttaacaagtattttgtagatgttcttggaaaatattatttatcaaataagtaggtgttattatgagttttagaagtgtagtaataactaatccatgcaatttggaattaaaaaataataatttaattataaaaatgggagaagagttcactattcctgttgaggatatttcagtacttttaatagaagatatatctataagaattacaactcgacttcttaataaactatcagaaaataatgttatgactgtaatatgtgatgaaaaacatttaccatctactattgttatgccattaaacactcattataagtcatataaagttatgaaaaatcaactaatgcaaagtctagcctttaataaaagaatatggcagagtattgcaaaacaaaaaatatacaatcaaagtaaatgtttaaatattcttaagattgatggatgtgagttcttgaaaaaattatcagataaagtagaaagtggagataaaggaaataaagaggctattgctgcaaaatattattttcaaaaactatttggagatgatttcaatagaaatgatataaatgggattaattctgctcttaattatggctatacaataatgagaagtgctgttgcaagaactcttgtaatgtatggatttaatactgcctttggtgtacatcattgtaatgaattaaactcttttaatttagctgatgattttatggagccattacgtccaatagtggatatgtgggtatacaataatatgaaaattgatgatgaacttacaaaagaaaaaagagttacattaatagatttggttaatactgaatgtagaataaataatcaaaatcattctattataaatggcatagaaaaaatgatatcttcttatacaacagcatgcaataaaaaagactatagattattaagattaccagagaatattcctatggtgtatcattattatgagtaagtttatgagattattagttttttttgatttaccagttgtaaaaagagaagatagaaaagaatatcaagtatttagaagatttttattaaatgatggttatacaatgattcaatattcagtttattcaagaatatgtaatggaactgagggattaaataagcatttattacgattaaagaaaaatttacctcctaaaggctctgttagatgtttacaagttactgaaaaacagtattcagagatgaagtttttagtaggagaacctaaaaagcaagaattagtaataaattcaggtcaattgaatgttttttaaagacaataaagtccttgaaacctagatgtttcaaggactttattagctcctattatagcatatcgagaatttactaggaactataacagatacacaaatcataagaataagtatcagattatagcatatcgagaatttactaggaactataacttgaaatatagatataatgcgacctctagcattatagcatatcgagaatttactaggaactataacaatctacacttccgttgttgtttgatacatattatagcatatcgagaatttactaggaactataactatgccaaaggaatcaagatatgatttcatattatagcatatcgagaatttactaggaactataacagaaatcttgttagtgctgataatttatttattatagcatatcgagaatttactaggaactataactacttgtagtatatagatatggctctattgattatagcatatcgagaatttactaggaactataacgtataatcttctatgcctcgaacatcagtaattatagcatatcgagaatttactaggaactataactgctggtgcagatgaaaattttgttgaagtattatagcatatcgagaatttactaggaactataacgttcctatgtccctctactcttgctgtattattatagcatatcgagaatttactaggaactataaccttgtgcattcataactaatttaacttttattatagcatatcgagaatttactaggaactataacaaaaattttaatgaggtgattgtatgagaaattatagcatatcgagaatttactaggaactataacagttacagacgaagtaatagttaaagaggtattatagcatatcgagaatttactaggaactataacgtaagaagtagcagtttctcctacatattgattatagcatatcgagaatttactaggaactataacgttataaaaagtatttcagatacttttacaattatagcatatcgagaatttactaggaactataactttaaggattagtccctaaccttgattacattatagcatatcgagaatttactaggaactataacaatattgtcagagtatcccaatattccagcattatagcatatcgagaatttactaggaactataaccgttgcgttttcccatatcttaaattcataattatagcatatcgagaatttactaggaactataaccgttacaattaactattcttcttttcctttattatagcatatcgagaatttactaggaactataactgtaaaactttgttttaggtggtgatgtgtattatagcatatcgagaatttactaggaactataacctattgtatatagggggtatctcaagtcaattatagcatatcgagaatttactaggaactataacctagagagcagtgtattgatgaaaattccgattatagcatatcgagaatttactaggaactataactaaatatcaaaagaaactacattaccaaaaattatagcatatcgagaatttactaggaaatataaataaaaatattatgagggtgtttaat

SEQ ID NO: 931 - DNA, 13760 bp, synthetic construct
  source 1..13760: mol_type = other DNA
  misc_feature 1..13760: note = Synthetic
aactcaattataacatgaaattaagggggtcattgtttttttatacaaaaaaatggtcggaacccttgaaatataaaaaaaaattaaaaagcgtagtgtaaacaactttacactatcactttgataaagggtgtagtggaatgaaaaatccagtacagatgacgttggaagaagcacaaggaaaaggattaagagcttgtaagaagtgtggaaaataattggagcgttaagttcaagaagtaaagggaagtttcattactattatgatattaatgtttaatttgataaattaaacgattaagagtgttttgttatgctattattgcaatttatttaaaaaggtatttacaataaatgtaataatggtataatgataagtataggaactggttgtagcatatcgagattttactagttactataataaggcaaaaagccgtaaggtatccccaaattcatttttgagtttggggtatccttttttttatataaaatttgaataatattatgtaaagtgtatataaattaaatgaaatgaaaggggacttttactgtgaaagatattaattatagacttggtttagatattggaatagcatctgttggatgggcagtaataaacttagataaagaaagaatagaagatttaggggtgagaatttttcaggcagcagaacatcctaaagatggctcatcattggcccttccaagaaggcttgcaagaggtagaagaagactcttaaggcgtaaggcttatagaatcaaaagagtaagaaaattaattagtgattgtggaattttatcaaaagaagaaatggataatttgtacaataaacatgaagatatctggcatttaagagtaaaagcattaaatcaaagagttacagctacagaatgggctaagattttaattaatttatgtaaaagaagagggtttaaatctaatagaaaaaatgaagcaaaagataaagaaactggacagcttattttaagtataaaaaataataaaaagcatatgattgatttaaatgctagaactgtagctgaatatatgtgcaagttaaaagaagaatctatggataagtatatgcctattagaaataaaaatggcaattataatatgtgtgtatctagaaccatgattgaagatgaagtaaaactattatttaagagtcaaagagatttcggattagatttcgcagatgagcaaattgagaaagaatatttaaatatttttaatgcacaaagaccatattcaaagtttgaagatttggaaaaaatgattggatactgtacttttgaaaaagataagaaagaacttagagcacctaaaaactgtatttcagttgaagaatttatcttatacgataatatgaacaggctgtcaattataaataatggaaataagcgaggtcttacaaaagaagaacgtaatataataattgataatgcatataaaaaaagtgaaataaaatataaggatttaagaaagcttttattattaaataatgatgatagattttcaggacttacttatagtaataaaattgatatatctaaaactgaaaattcaaaatttgtatctatgaaaggatatcatgaaattaagaaatcaatagaaaaaaatcttggaaaagaaaaatgggataatatcaaaaatgatagaaagcttcttaatgatatggcatatgttcttacaattgcaaaaacagatgaagatatcataaaacaactaaaaataagaaatgtagaacaaaacattataaatgcagttattgagatatcatttacaaagtttaataatttatctataaaagcaatagaaaaaatattaccatatgtgaaagaaggctatcagtatagtgaagcatgtgagaaagcaggatatgattttaaagcagtttttaaaggaacaaaagaattaaaacttcctctaataaatacagaggaaattgttaatcctgttgtaatccgttcattaactcagactagaaaagttgttaatgcagttatagataagtatggttcgcctagagggataaatatagaactcgctagagatttagctaaaaactttaaggatagaaaaagtattgaaaaggagcagaaagaaaacagagataataaagaaaaaattagaaatgaacttaaagaacttatgagaaaagaacctacaggaggagaattattaaaatataggctttggaaggaacaaaaagaagaatgtgcatattctcaagaacatatttatatagatgatttatttaaaccaggcttatatgaaattgatcatattataccttttagcagatgttttgatgatagtttaagtaataaagttcttgttaaggggatagagaatcagaataaaaaaaataggataccttatgagtattttggaagtgatatagatagatggcatagatttgaggtttgggtagaacagagcagccttggatttaaaaagaaaactaacctacttaaaaagaaactttcagaagaagaacaaaaagcatttaaatcgagaaatttaaatgatacaagatatatatcaaaatatattgctaactatatagaaaatagactgatatttaaagaggataatgtaaaaagtaatagtaagaaagtaatttcaatcaatgggagagctacatcatttttaagagcaaaatggggattgattaaagtaagagaagatggggataagcatcatgcactagatgctgcagtgatagcagtaactactcaaaaaatgattaatgaaatatcaagatatagcaaagctaatgaattaaaatacattaaacgtaatgaagaatatatagatatagaaactggtgaggtagtagatgaaaatataattaaagaaaacaaagtattattggaagaggtacttccaagaccatggagaggttttacacaggaattaaaccttagattaagtgataatccaaaagaagaacttaaaaaatcatcatttgattcttatgatgatgaattcattaaaaatattgtaagacctatatttgtgtctagagttcctgatagaaaagctggtgggatattatttaaagaaactgtatattcagccaatgcatttaaaaataataaatctattgtaaaaaagaacttatgtgatttaaagttatctgatatggataatgtatataattatattagtgataaaaatttatatgattcaataaaagcacaattagttagttatgatggtaatgcaaaaaaggcatttgaaaatggatttagaaaacctactaaaagtggaaaattaggtcctgtcgtaaaaagtatcaaaatagtcaccaatttaattgctaaagatatgcttgatttaaataaaggaaaggtacagaaagatgggatcgtaagagtagatatctatgaaaaagaaggaatatattattcagtaccagtatatagaatagatatagcaaaaggagttagacctaaaaaagcagcattagctggaaagagtgaaaaagattggactgatattactgaagaatataattttaaattttcagtatataaaaatgacttaatagaaataaagtataaaaagaaaaaaggattctttggatactttaatagttttgatagagctacagcatcatttacaattgaagctcatgataattcatcacgatctagagggattggtataaagtctggagtagaggaattaaataaatatgaagttaatgtgcttggagaatattataaagtaaaaggtggtaagtaaaaattgagctttagaagcatagtaatttcgcattctgcaaatcttgcagttaaaaataatagtataactataactactgatgaaagttataaggtaccaattgaagatatttcaacgttagtcattgacgccattggaattagattaaccaataaattactttcaaatcttgcagaaaataatgtggctacaatattgtgtaatgaaaaacatttgccaaatgcaatagttttaccaattaattcgcactataaaacttacaaaataatgaaagaacagttaaattcaagtgcagcgtttagaaaaaggatatggcagaaaatagttatgagaaagctgtataatcaaggaaagtgccttgaactacttggattaaatggatttgaatatttatataaattattagaaaaagttgaaagtggagataaaaataatagagaagcagttggagcaaaattttattttacatgcttatttggagaagaatttaaaagaagaaattctgatataatcaatgctggacttaattatggatatacaataatgagaagtgctattgctagatcgttagttgcatatggattcaactgcgcattaggagttaaccactgtagtgagttaaacagctttaatttagctgatgattttattgaacctttcagacctatagttgatttatgggtttatgaaaatatgagagatagtgatgattttacaaaggaaaatagaattgaattaatagatcttctaaactatgagtgtattatagatggacaaaatcaatcaattttgaacgcaatagatatagttatagcttcttattcagcttgttgtaataaaaagaattatgaattattgaaattgccctatataaaaaaattggaatatcatttatatgagtagtagatttatgagattattagtattttttgatttgcctgtagtaaagtatgaagatagaaaagaatatcagaagtttagaagatttctaattaatgatggatataatatggtgcaactttcagtgtattctagaatatgtaatggtaatgaaggaacaaataagcatatatcaagacttattcataatttgccacaaaagggatcagtaagatatcttcagataacagaaaaacaatatacacagatgaaatttcttgtgggtaaacaaaaaccacaagaaaaaaaggtaaaagcaacacaattaagtattttttaaatgataaaatcccctgtaatcaagtaaattacatgggatttcatagttccattatagcatatcgagattttactaggaactataacatcagcaacgatactataatctttagaatcattatagcatatcgagattttactaggaactataacccaggttttcctcctgttgcagttccttttattatagcatatcgagattttactaggaactataactatcactaataataaatatcctgcttttttattatagcatatcgagattttactaggaactataacatcataatatctatcttttaacattattatattatagcatatcgagattttactaggaactataacaaatccaaattcaataggagaataagttgattatagcatatcgagattttactaggaactataactgttttgaaagacctaatgttaagtatgcaattatagcatatcgagattttactaggaactataactacataacgtgcattttcaatcgctcttttattatagcatatcgagattttactaggaactataactgttgtttatttctaaatgtattacatgagattatagcatatcgagattttactaggaactataactatcctgttaacacctattcagccatcaaaattatagcatatcgagattttactaggaactataaccaaaatagtaccactaattgttactttcatattatatcatatcgagattttactaggaactataactttaaagtcaatgaatatttttctgtatatattatagcatatcgagattttactaggaactataactatcactaataataaatatcctgcttttttattatagcatatcgagattttactaggaactataacataaatttctattatacctttatacttttcattatagcatatcgagattttactaggaactataaccaaatattaattcacctataagaattgactattatagcatatcgagattttactaggaactataacattacatgaagatcttgtgctattagattcattatagcatatcgagattttactaggaactataacataaatttctattatacctttatacttttcattatagcatatcgagattttactaggaactataactcctattattggcgatatattaaatatattattatagcatatcgagattttactaggaactataacttctacgttttccttaattattgccaatgtattatagcatatcgagattttactaggaactataactaaatataataaggtatgttgtctatagttattatagcatatcgagattttactaggaactataacagggatagtaattgatcctacgacagcaggattatagcatatcgagattttactaggaactataactcagctatataagaaacagtttcttgttcgattatagcatatcgagattttactaggaactataacgcatcgcagataggagcgttagcgtgccaaattatagcatatcgagattttactaggaactataacaatacttatacacatatcaacgttgtagtaattatagcatatcgagattttactaggaactataactactgtagataatttataatcttttttcaaattatagcatatcgagattttactaggaactataactcttattctaatggtgatgtagaagtaattattatagcatatcgagattttactaggaactataactactgtagataatttataatcttttttcaaattatagcatatcgagattttactaggaactataacaaagaaaacagaatttaatccattatacaaattatagcatatcgagattttactaggaactataacataattcagcagttttgtattatgaacttaattatagcatatcgagattttactaggaactataacacttgaacttttatacattatttcttgcggattatagcatatcgagattttactaggaactataacctgtattttttcatctagaactttatttttattatagcatatcgagattttactaggaactataacaaaatcattaaaatcatctttgttgtttaaattatagcatatcgagattttactaggaactataactcgtcctttacataatttcctgtagtaatcattatagcatatcgagattttactaggaactataactaagctcagagcatgctaggcttatgtataattataacatgttctaatcttattgttattattaaactatgaaaaatattattagttagttagagtgatgtactttatatagagataaatagtaaaatatattaaacaaaaaagcagcaaatagttttataaatatttactgctttttttcttatgcaacctttccagtatcatcccctggatcattatcaataacaactccaagtttagcagaaattatggtattaagtttattaatagaacctgaaagagaattaatctgtttctctaagcgtataagcagatatgctgctacagctacaggaaaaccattattaactattaagttcattaattcattaacttccatgatactcacctcctggagtatatatatggaggtgagtaaataaatctaaagtaaattattaattctttgaagataaaatcgtattatagtaatagtctattgcttgatctacaatagtacttacacatatactaatatcattatccatcattttaagttcattaatttttcttatagtagattctctaagtatatagcatcttctaacactaggagtttctccatcaatagcaggggcagcaccatttgctataggagttctacgattatcaaaaatttcagtgttatagttatttgttttggctctagtattattaatatttctattagtatctagagtttttgcatcagtaaatgaaatttctttattattataatcttgtgaaatattaatcgcttcattattatctgtatcatcaaatgaaaatgatgaaagacaggtaccagtaattacaggctcatcactaaatcctgatatatcattattatcctcttcaactggacatccaaaagtatctatagaatttttcttttttcttgccatgccaacagctccttaatattttatttttattatatgggtggagaataaatattcttaaaaatatgagaataaatgaatatagaaatataagtatatgtattcttttgaatataagaataaaaatataaatgaatatatattcttatatatttgcttgtagaatgagtgctttagagaatttatgaatttaggattaactattctttgggatttaaataatctttagtgaattttattatagtactttaatctctatagagttagaattaactttattacaagaatttaatagtatataatgtttatataaaaatatttaaattaattttttaatcacatctgtatttaagtttataaaaatagaaattataatagataatcaactatctaacttataaggcttagatagtcaacttttagtctactctaaggagactacatagttaaaatatatataaatgaagtacttaaaatatactatttatcctagaggtataaaattttacataagcgctgattaaaggaagtgatatagtgataaataaaattgacctaaagagagatgcatataatgacttactcaattggaaaaataatcataataataaagttttgttagttgaaggggcaagacaagttggtaagacttatttagtaaagaagtttgcagaagagaattataaaaatataatttatataaatcttttagaagaaagtggagaagaccttcttgatattaatgaacagattaggaaagaacgtttgaatggaacattagatagagagtctactaattctttaaaagaaatgtttaagagatattctaataagtttgaagataatgaaggctgtgttgttataatagatgaaatacaggaatcttataagatttataatatgataaggcagtttgcgagagaatttgatactcattttattatgactggaagctatcttggaagagttgtaatgagaaaagaattctggtcgcctatgggagatatagattttctagagataaaaccattatcttttactgaatttataaatgcattaaatttaactgatgagtataattctttgaatctatttggttcatccccaagtgaacaatatgatttaatgtataacaagtataaagattatactgttgttggaggctatccagaagttgtatgcgaatatatagaaaatggtatggataatatagatggattatttgaaaaactattgcgtgttttctgtgaagaatctgcaagatattttgatggagatattctttcagccaaaatgtttgaagattgtgtaggagcaataatgcaaatacttatcagcgggaagaaaggccttaaagaagcaagctatggtgaagaattgcagaagataataactaaacagtattcaagcaatataactaaggaaaatactaatagagtattacaatggttctatacatctaaatttataaaagactgtgacaaacttgtagattttgattttaccaatataaaaagaagacagagatatttcataagtgatattggaatggcaaattacattatgaaaaaagaaaacatattaaagtctgaagctgatggagctattaatgaaacatttgtttatcattgtttatgcgaaaaaataaatgttacacctatgtttgctgtatatggtagtggagaattagattttgtatacagaaatagagataatggaactatatatggaatagaagttaaagcaggtaagaatgtaggtaaaacaataacaaagtgtcttgaaaagggaaaaataaattttgcaatatatcttaagggtatgactaaaggcggagcggctaataaagtctatacaattcctatatatcttttccctagattacagtttgaaagtatagtttaatagtaataagctgagaaaaataatatttaaagtatgaattaatgaataattcaaggagttcacacaactaagtgagctccttatttctttaatttattatttttataatagaaagatattcaaatctaaaattagttttcatgtgttttgtttgttttatccatatataaataataaatactgaattaaagattgattggagtgtttattatggttaatgatgaaattaaaatgaagaattataattctgatacatttgataagaagcagatagctcttgcaattagaaattcaactttaggtgatgagcttgagtgttctattagacgtgaaggcataataggaagttgtgacaattgtaacttaaaaagtatatgtactggaattgataaaattggggaagattatattaaaagtacaagtactgttgtaaaggaatttaatttttaatagaagaggaattttagtataaaaataacgccagagaataatctcaggcgttatttttgccataaaatttaaattttaaaagtacttaagtataaaataaattaatttattagatgatattaaatggagaagaagaaaagctaatacttaattttactaaatgtaagtttataaacgctgctgttgcagtaattattggaacattgtgcgtgtatgctagaacggtaaataaatatgtgaaatttaaatttgagaacaagcccaataatcctatttttaaattcatgaaacaagttggaatttatgaatatttctataaagatcatgtgaaatattcaacggatagggcaattacatttgatagaatttccgatgaagatgctatggagacttatacagataagataatgtctttagcacctattaacataactaatgatgcgaaggatatattatcatcatatttttatgaagtatatcaaaattctttagtgcattccaagagccctattgaagtattttcttcaggatattggatggatacaaaaaaacaattgattttttcaatatacgatatgggaattggaatacctgataacgtaagagaccatcttggaaagtgcatgacatcaagagaatgtgttgaatgggctatgactgaaggaaaatctactattgaagatgaatttgttaaaagaggtctaggattaagtagacttgaaagttttataaagatgaacaatggcacaatgtctatatatacagataatgtttgttgtataattactaataaagaaagaaaatttatagatttagattatactataatgggaacattaataataattaatattattgcagatagtgatcacatatacatagtaggagaaagtcaggaggagtaatgatgaaaactattgttgttaatgaattgtttaagagtgcattttcacaagagaaagctcttatattaagaggaaagattgaagagtgtttgaaaaatgaagataagattattctagacttttcaggcataagcaagtttactacattattctttaattttagtactgggtatattatttctacccttggtcctaaaaaatacgatgaattcatatcagtaactaatttatctcctttaggtaaaagtacatatgaaagttcgtataagaatgcagttgaaaaatataagccaaataaggaagttgaagagaagatactaaatatcataaaaaatcctgaagattagtatgaatggagttaccaaatatccaaactttgttgaagctctacttgagaatggaaataagcttgttactactatatttaatgtgactgagcttatgcatgttgtagaaaatagtgaatttaaaatatataaggctactaataatactagaataaagaaaaaggcttttagaaatatagaacaagaaagagaaaaatataaaaacgaaatagaaacaatactcttgcagattaatgagtcatatgatgggcagattgaattaatacaacttactgagagtgatattaatgattttgtaagtaatatcaaaaataatagctgtgatatatttgattatattgttattgaatatttaaagagtaaaggggtaaagaattttattactgatgatagggattttaaaacaatagatgatataaatgtatattatgcaactgaatagtagtaagaaagaaatatatataaataaaaagtagtttatttattttttaacttataatataactaaagttaatcctcaataattatctatataggattataaaaataacgcaagagaaaaatctcaggcgttattttttgtgcaaaggcttatattaataagcataaatattttatcaagaataaagtcctttttggttataacagtactataagggattttctttaaagtagcatatttttttacaggatgttcttgaaaaaacacatagtttataagttcatgttcctcttcagtaagtttactaagagcattgtataaaagagaaatatcaaattcttttaaaagattatagtctattggtagattattagattcaatagtattttcaacattttctaatacaagagttgaagatccttcaagatgatttcttgaaatattcttttctataaggtcattgatactgtttttgattccattagtagcataagcaacgaatctatgagattcaggtttatagtaagaaacacatttgaaaagaattctgtaacattcattcacaatatcttcaaattcatatccatgaataaatgtccttttagagaggtttattataaaaggtttaaattcattggatagtttttcttttgattcttcatcgccatctttagattttttaactaggttttcaatgtagtcataattcattgcatcacctcaaaacatattcttatgttatgtatatggttgaaatgaagaaattctaagaagttatattatttttagtaagcatccatatatctattttacataaataaagagagtgtatggaggtcatttttatggggaattttattattgcagcaggtcatactgctagtggaaatgttggatgtggagtagtagataggttaaatgaaagtaattgtacaagagaaattgcattattagtcgtatcttatttagagcagttaggtcattatgctaaattgcttagaattgataaaagtaatacttataattgtcaggattgttatgaaagagcagaagaggctaatgatatagcagggagtattaatattaatttgtatatggaaattcatattaatgcagggggaggtactggaagtgaagtatttactataagtaaatcagaaattgctaagagtgcagcaaaaagaatatcaaagtcattatctcaaaaacttggaatacctaataggggagttaaaagaaataacttaatagtacttagaaaaacagtaatgccagcaatacttgtagaatgtttatttgcagatagttcagatgcagataaatataatcctgatgttattgcaagagctatagtagatggattacttggagaaagcagctgtgaaaataatatatggaagcttggatggaataaaaatgataaagggtggtggtattgtactgatgcaataaataagtgctactatacctcaaaagatggatggaagttaattgatggtgattggtttaaatttaatgatgaaggatatgctttaagaaatacttggtaccatgatgagaatgatgggaaggattattattttggggatgattgcaggatagttaaaaataaata

SEQ ID NO: 932 - DNA, 13333 bp, synthetic construct
  source 1..13333: mol_type = other DNA
  misc_feature 1..13333: note = Synthetic
ataatgaatataaaatgttaaatgcagcttataatttaataaagaaaacaagtgaattagagcttggaacttcattaaaggaaatgattaaattatataacaataataattataaaatagattcttattatagatggttttataaaacttttgatgaacttaattatacagataaatatgaaaatttaagaattcttattgaaaatatttatagtaatgattatttatctaaaatagttcctaaatggaatgaatatttattatcagaaggttatgataatggaaataatcctatggcaaaagatttttataaaacttatgttaagccttatgtaaatgctgatgaaagaataattgttataatttcagatgcattaagatatgaatgtgctaaagaacttgttaaaaatttagagtttgatgaaaaatgtgaagctaatatagaaagtgttctttctgttttaccttcttatactcaacttggaatggcagtacttcttcctcacaaagaaattcattacaataataagcttaatgttttagtagatggcaaacaaagtggtgatttaatatcaagagagaaaatactaaatagttatgtaccttctagtgcttgttttaggtttgatgaaatagctaaaagtaaaagagatgttataagggaaaaatttaaaggaaaaaacattatttatatttaccacaatcaaattgatggaagaggagaagaattagttactgaaaatgaagtatttaatgcttgcagtgaagcaataaatgaaattcaaaaatttataagaaaattatcttatgatatttctgctaataaatatataataacatcagatcatggatttatatataaaagagataaacttttagaaagtgataaagttaatataaataaaaatgattatattaagacagataaaagatatatattgtctaatgataaactagatattaatggaactttaaatttttcattaaaatatttaggagataaaaatgctttatttgttacaacacctgtaggtgctgatgtatttaaatcagcttctggaggccaaaattatgtacatggtggttcatcgattcaagaaatgctaatacctgttgttttagtaaaaacttcaagagataaacaaaatgtatctttagtaaatgttgaacttacatcaattactagaaaaataactaatttaattacatatttagattttattcaaacagaaaaggtaacggatataattaaagcaagaaatgttattgcatattttgttacagaaagtggtgaaaagatatcttttgatgttccaatgatggcaaatagtaaagaaacatctgcacaaaagagaatttttcatgagaaatttacatttaaaagcagaaattatttaactagtgaaaaatattatttagttattgtagatgctaatgatgaaaataacatattaaataagtatgaatttgatatagatatagcctttgctaatgattttgggttttaatatatggaggaatatattttatggacgaggagttaactttaaatgaaaaattaaataagtattttcaaggtaaaattgtaagaaaagatttaacaaaaaagataaaggaaggtgctaacgtacctgtttatgtgttagaatatcttcttggaatgtattgctcgtctacggaagaagagcagataaatgagggagttaataatgttaaaactattctttctgataattttgtaaggcctgatgaagcacaaaaaattatttcaaaattaagagagcaagggtgttataccgttattgataggcttacagttaaattaaattataaaaatgatacttatgaagctgaattttcaaatttaggtataaaaaatgttcctcttaattcacaatatgcatctgaatatgacagacttctttgtggaggtatatggtgcatagttcaacttgaatattattttgatgaagaagataaaaatggatgtccttttattataagaaaacttacacctattcagatgcctcatattgatattaatgaaataaaagaaggaagaaaagcattttcaaaggatgaatggattacaattttattacgttctactggaatggaggcagataaattttctgaaagagaaaaatggcttttacttgcaagaatgattcctttagtagaaaataattttaatttatgtgaattaggaccaagaagtacaggaaaatctcacttatataaggaaatatctccaaattctattttggtatcaggtgggcaaactacagtagccaatttattttataatatgggcagaaaaactataggtcttgtaggtttatgggattgtgtagcctttgatgaagtggcaggaattacatttaaagataaagatggaatacaaataatgaaagattatatggcttcaggttcttttgcaagaggaaaggaagaaaaaaatgcatcagcatctatggtttttgtaggtaatattaatcaaagtgttgaatctatgttaaaaacttcaacattatttgagccatttccagatgaaatgggaaaagatactgcatttttagatagaatgcattgttatattcctggatgggaaattcctaaatatagaccagaattttttacaaatgattatggatttataactgactatttatctgaatttatgagggaaatgagaaagacatctttttcagatgcaatagataaatattttaaacttggaaccaacttaaatcaaagagatgttattgctgttagaaaaattacttcaggattaattaagattatatatccagatggaaattttgaaaaagaagatataagagaaatattagaatttgctttagaaatgagaagaagagtaaaagaacagcttaagaaacttggaggaatggagttttatgatgtgaatttttcttatatagataatgaaacatttgaagaattttttatatcattgccagaaattggttacggaaagcttattccagaaggaattttaaaacctggtcagctttatacaatatctcaaggaaaaaatggaatgataggtgtatataagctagaaacagaagtagttcctggaagtggcaaatttgagaaaacaggaataggaactgatagagaaactaaagaatcaattgaaactgcttttagatattttagagctaatagtaaatctataagtgcaggtataagtaccactactaaagattatcttatgaattttcaagatttaaatggtataggaatgacaaatagtctatcattagctacttttatagcattatgttcagcagcacttaacaagcctttagttagtagtattgcagttttaggtgaaataacaataagtggtgcaattataaaaccagaagagctagcaagcatattacaagtagctttagatagtggtgcaaagaaagtgcttatgcctataacatccgccgctgattttccaagtgttccttctgaattaatgggaagttttgatatagtattttatcaaacagctgaaaatgcagtatttaaagcattaggtgtagaataaaatgtttaaattggttgacatattttttatatagtgctatcctataaataggaactaggtaaaatgttttatagcatatcgagagtttaactagttgctataacaaggcaataagccgtaaagtatcccctgtactcatttcttgagtgtaggggtatctttttatacatatatttttatggaatttaaggtaaaaaatatactgtaaaggatgatgaatatgaataaaaaaattgattatgctttaggtttagacattggaataacatctgttggatggtctataattaatctaaataaaaatagaattgaagacttaggagtaagaatatttaatgcagcagaaaacccaaaggatggttcatcattggcattgccaagaagaatggctagaggtagaagaaggttattaagaagaaaagcttatagagttaaaaaagttaaaagattacttgtaaaagaaaacattttatctcaagatgaacttaatggtctttttgaaaataagaatgttattagtgtatgggaatgtagagttaaagccctaaatgaaaaggtttcaaaagaagaatgggcaaagattctaattaatttttgtaagagaagaggttttaaatcaaataaaaaaagcaatagtgaagataaagaagaaggaataatccttgaaagcataaaggcaaatgaacagaaactagaggaatcaggttatagaacaataggtgaattaatatacaatgaagtgaacaattctaatgataaatataaacctcttagaaataaatatggttcatattcaagatgtgtttcaagaagtatgataaaagatgaaatatattatttatttgaaaagcaaagagaatttaacaatgagtatgcatctaaagaatttgaatcaaaatatatagaaatttttgattcacaaagacctttttctaagtttgaagatttagaaaagatggtaggcaattgtacattggaaaagaatgaaaaaagagcaccaaagcaatgtatttcagcagaagaatttacattatatgataatatgaatagattatctataattaataatggtgacaaaagaaaattatcaaaagaagaaagaaaaattatttgtgatgaagcatttaagaaaaaagaattgaagtatagtacattaagaaaaatattgaaattaaaagatgatgatttgttttcaacattaaattacaatttagagaaagcagacaagtcaaagactgaaaatgcaaaatttgtgtctttaagtggatattatgaaataaagaagttatttcatatggaattagcaaagaatattttgagtctataaaagatagtagaaagttattaaatgatatagtatatgttttaactgtttctaaaactgatgaagatacaaaaaaacaattgagcataagacaagttccagaagaaataatagattgtgtatgtaataataatatatcatttagcaagtttaataatttatcaataaaagcaattgaaaatatattgccttatgtaaaagaaggttatcaatataatgaagcttgtgaaaaggtaggatacgactttaaaggcatgtttaaaggagaaaagagttataagcttccagtaatacaaatagatgaaatagtcaatccagtagttaatagagctttagctcaaacaagaaaagtaattaacgctgttatagaacaatatgggtcacctgttagaataaatattgaattggcaagagaattagctaagaattttagtgatagaagtaagatagccaaagaacaggaaataaatagggctaataaggaaaaaattatagaagaaataaaagaattgatgaataaagaaccaacaggaagtgaaattctaaaatatagattgtggaaagaacaaaatggagaatgtgcttattctcagcgtggaataacaattgatgaattatttactccagggtactgtgaaattgatcacatattaccatttagtagatcttttgatgatggtttaaataacaaagttttagttttaggaaaagaaaatcaaagaaaaggaaatagaactccatgtgaatatttaggaagcaatgaagaaagatggaatgcttttgagatatgggtaaataatagtacattacgttataaaaagaaaaataatctgttaaaaaagaaatttttaagagatgaacaaaaagattggaaagcaagaaatctacaagatacacaatatatatgcaaatatattgcaacatttgtaaataacaggttaaagtttaatgaagatagtgagttttcaagaccacagaaggttataactgtaaatggaagagctactgcatatctaagagcagtgtggggattaattaaggttagagaaaatggagataagcatcatgcattagatgcaacagttgttgcagtaacaactcaaggaatggtgcaaaaaatatcaaaatttaataaagcaaatgaattaagaagttttaaagaaatagatgaatttgttgatgtagaaacaggagaagtaatagatgtaaatgaatattctgatataagaaaaaataaacttattccaagaccgtggcaaggatttagtgaagaacttaagataagattaagcaatgatcctatatctgaattaaacaaatatccaataagcacatatgacaaagaatttattagagatactgttagacctatatttgtatcaagagtaccttttagaaaagcaaagggaaaattatttaaagaaactgtttattctaaaaaagcatttactcaaaatgggtatgttgctaagaagaaattagttgaccttactttaaaagatatggacaatgtatataattatgaatgtgataaaatcttatatgatgctattaaggaaaaattaatagaagcagatggaaaggctaaaaaagcttttgaagaagaatttagaaagccaactaaaagtggtaaactaggaccagtagttaagagcattaaaattattgcacctaagatgccaattaatgatggaatagatatgaatgaaggaattgttcaaaaagaaggaattgttagaatagatatttatgagaaagataataaatattatgcagttccagtatatagatatcaaatagcaaaaggaattatacctaaaaaggcagcagtagcatctaaaaaagaagaagattggacaataatgaatgaaacatataattttaaattttctatatttaaaaatgacttaatagaaattaggtataaaaataaaaagggatattttggatactttgatggatttgatagatcaacagcttcattaacaatagaagaacatgataattctaatagaaatagaggaattggaattaaaactaatgtaattgtatttaacaagtattttgtagatgttcttggaaaatattatttatcaaataagtaggtgttattatgagttttagaagtgtagtaataactaatccatgcaatttggaattaaaaaataataatttaattataaaaatgggagaagagttcactattcctgttgaggatatttcagtacttttaatagaagatatatctataagaattacaactcgacttcttaataaactatcagaaaataatgttatgactgtaatatgtgatgaaaaacatttaccatctactattgttatgccattaaacactcattataagtcatataaagttatgaaaaatcaactaatgcaaagtctagcctttaataaaagaatatggcagagtattgcaaaacaaaaaatatacaatcaaagtaaatgtttaaatattcttaagattgatggatgtgagttcttgaaaaaattatcagataaagtagaaagtggagataaaggaaataaagaggctattgctgcaaaatattattttcaaaaactatttggagatgatttcaatagaaatgatataaatgggattaattctgctcttaattatggctatacaataatgagaagtgctgttgcaagaactcttgtaatgtatggatttaatactgcctttggtgtacatcattgtaatgaattaaactcttttaatttagctgatgattttatggagccattacgtccaatagtggatatgtgggtatacaataatatgaaaattgatgatgaacttacaaaagaaaaaagagttacattaatagatttggttaatactgaatgtagaataaataatcaaaatcattctattataaatggcatagaaaaaatgatatcttcttatacaacagcatgcaataaaaaagactatagattattaagattaccagagaatattcctatggtgtatcattattatgagtaagtttatgagattattagttttttttgatttaccagttgtaaaaagagaagatagaaaagaatatcaagtatttagaagatttttattaaatgatggttatacaatgattcaatattcagtttattcaagaatatgtaatggaactgagggattaaataagcatttattacgattaaagaaaaatttacctcctaaaggctctgttagatgtttacaagttactgaaaaacagtattcagagatgaagtttttagtaggagaacctaaaaagcaagaattagtaataaattcaggtcaattgaatgttttttaaagacaataaagtccttgaaacctagatgtttcaaggactttattagctcctattatagcatatcgagaatttactaggaactataacgctgcttatgttcttgttaagcgaattgaattatagcatatcgagaatttactaggaactataaccttatttccacaacaactacataacttacattatagcatatcgagaatttactaggaactataaccacaagaaataaatatagagcccaaatagaattatagcatatcgagaatttactaggaactataacgaaagtaaaaatgtaaatgattttgttaaaattatagcatatcgagaatttactaggaactataactttaaggttgcaaccctttatttatgctatattatagcatatcgagaatttactaggaactataacattaataaagtattataggacactagaagattatagcatatcgagaatttactaggaactataactagctcttttacctttgttatgttattttattatagcatatcgagaatttactaggaactataactacaataatattcttttgctcgttgctcgattatagcatatcgagaatttactaggaactataacttagtgtgctcacttcaccctcaagctctattatagcatatcgagaatttactaggaactataaccgagcgaaaaggaaagagcccaaaccaattatagcatatcgagaatttactaggaactataaccaaaggaagaagaggaaatagttaatgaaattatagcatatcgagaatttactaggaactataacttgcagaggaatatacagtcgcaagttcatattatagcatatcgagaatttactaggaactataactgctggtgcagatgaaaattttgttgaagtattatagcatatcgagaatttactaggaactataacgttcctatgtccctctactcttgctgtattattatagcatatcgagaatttactaggaactataaccttgtgcattcataactaatttaacttttattatagcatatcgagaatttactaggaactataacaaaaattttaatgaggtgattgtatgagaaattatagcatatcgagaatttactaggaactataacagttacagacgaagtaatagttaaagaggtattatagcatatcgagaatttactaggaactataacagtataatataactaaagatgaatcaggatattatagcatatcgagaatttactaggaactataacctatttccgaagttacctccaccagtaggattatagcatatcgagaatttactaggaactataaccatagaacaaaagcttgtttgtctagttgtattatagcatatcgagaatttactaggaactataacggataaatgcaatagtaatgcagggagataattatagcatatcgagaatttactaggaactataaccattttgaaaagttcttcatcaattatcttattatagcatatcgagaatttactaggaactataactggtgagaaagcagcctatcagcacctaaattatagcatatcgagaatttactaggaactataacttcaaaataactataatgatatatatgcagattatagcatatcgagaatttactaggaactataacttttcatattttatttcctccttttagtaaattatagcatatcgagaatttactaggaactataacatatccaacgtcaaagaatatacagtggacattatagcatatcgagaatttactaggaactataacgttataaaaagtatttcagatacttttacaattatagcatatcgagaatttactaggaactataactttaaggattagtccctaaccttgattacattatagcatatcgagaatttactaggaactataacaatattgtcagagtatcccaatattccagcattatagcatatcgagaatttactaggaactataaccgttgcgttttcccatatcttaaattcataattatagcatatcgagaatttactaggaactataaccgttacaattaactattcttcttttcctttattatagcatatcgagaatttactaggaactataactgtaaaactttgttttaggtggtgatgtgtattatagcatatcgagaatttactaggaactataacctattgtatatagggggtatctcaagtcaattatagcatatcgagaatttactaggaactataacctagagagcagtgtattgatgaaaattccgattatagcatatcgagaatttactaggaactataactatcttgcaataggatctacattaccagatattatagcatatcgagaatttactaggaactataactccagtgtttatgactaggtttaataaggattatagcatatcgagaatttactaggaactataactctttgcaatatctcttgtaaaatatcattattatagcatatcgagaatttactaggaactataaaagtagcaaatactaatgaaaaaagtattgcaacaagaatcctttagaaatgtaggaagtattgtagaattatttaaagataatatgaattgtgcaagaaaaattatgaataaggttgatagtattagtgaaaaattaaatattgtttagtttatactttaagcatttaaaatagtgagttataagtttgtattaaaaaatggcttaaataatataataacctaagattttttgaataaaaatatgattttagggaagtaattacatagaggtgttttttatggagttattcaaaaaagaagttacaactgtttggagttttgaagatagaggaaattggagttctcataaaggtaattatccaggtaattgtagtcctaaggttattagaaatttattaattcgttatagtaaagaaaatgattggattttagatcaatttttaggtagtggaacatcagcagttgaagctttattattaagaagaaaatttatagggttagatattaataaaaaagctatagagatagcaaaagaaagaacaaaagatttaaaaggtaagataattattaaagaagggaatgcattaaaattaaatataaaggatagtagtatagattttgtgtgtactcatccaccttatttagatataataaagtatagcaatggtataaaagatgatttatcattacttgaaaaaagtaagttttatgaagcgataaatattgtagcagaagaaatttttagagtattaaaagtaaataaaaaatgtgcaattattattggtgatgtgagaaagaaaggttatattgaacctttaggctttaatgttatgaatatatttttaaataaagggtttttattaaaagaaataataataaaacaacaacataattgtaaaggaactgaaaaatggagagatattgctgaaaaaagaaattttcttttaattcagcatgaatatatttttgtatttcaaaggtaaaagaaaaaatgatataataaccaaagaaaaaagacataataatggaggagtatatgaattttttagaagcaaaaccttttttaaagtgggcaggaggtaaagcaaaattgttacctgaaatagaaagtaggttacctaaaaaagatattaaagaaggaaaaataaaaacatatatagagccctttataggtggaggagcagtatttttttatatgttatctaagtataattttgataatttaattataagtgatattaataaggagcttatattaacttatagggttataaaagataaaccagaagagcttataaacatattagaaaaatatgataaaaaatataataatctttcttctttagaagaaaaacaagaattttattattttattagagataaatttaataagggaaaagaaacaataaactatgaaaatataggagaagatgaagtaaaccatgcttcttttatgatatttttaaataaaagctgttttaatggattgtatagagaaaataaaaaaggtggatttaatgttccttttggtaaaaaagaaaaagttaattcctttgaaaaggaaaatatattagcagtaagtaaggagctaaagaatgcaattatattaaatggagattttgaaatagtaaaaaactacataaatgaaaatacatttatttatatggatcctccctatagacctttaaaaaataaagaaagttttaaagactattcaaaagaagaatttaatgatgatactcaaaaaagacttaatgaattttgtaaatacataaataaagtaggtgctaaatttatggaaagcaattcagatcctaaaaatacagatgaagaagatgaattctttgatgaactttacaatgattttaatatagaaagagtaaaagcagcaagaagcattaacagtaagggaaatggaagaggaaaaatctcagaaataatcattaaaaattattaacaaaaaggactattgtaacacaacattttacaatagtccttttattctataaaaattatggtataatatagataaaaatatataataatgtaaaaataataaaacaaatatatataggagataagactatgttattaaatgaagcattttttgccattaaagatttagtaggaatacaatttaaggatatttttagtgaatctcaattagaagatattataaagaataaagggaaaagtggacagatacttgaattagccattggattaaagaatactaatgtaactttagattttgaagatggagaattaaaaactaataaatgcaatgctaaaggaaaacctttagaaacaatgtttataactcaaatatcaggaataatagatgaattattagaggaaaaaaactttgaagaaactaagttatataaaaaaattaacaatttattatatgtaccaattagtaaagaaggaaatccaaaagaatggtttattattgatgctattcatattgacttaaaattggacaagtattcctttgtagcaaaacaattagaaaaagattattattctatatgctcacaactaagaaatcatatagaaacatctaaagatggatttatacatacatctagtggagaattt

SEQ ID NO: 933 - DNA, 23159 bp, synthetic construct
  source 1..23159: mol_type = other DNA
  misc_feature 1..23159: note = Synthetic
tctacttttaaaatatgttttagccgttccgcaacacgtaaaataaccgcatcacccacctgataactaagcgtttcattgatctttttaaagtggtcgatatcaatgcttaaaattgcaaagttttcattaaactgtttgctgcgttcgatagcttcttcaacgcgctcctgcaacttctggcgattgggtaaatgcgtgaaaggatcatattgtgacagaaagaccagccgatcttctttctcatatatatcggtcagatcactccatgagccgacaatttctacatgaccatcaccgctatttgccagtagctgcagttcatcacggatatagcgaatcttgccttctttatccagaattcgatactcataaaccacatgacctttttcaaagatgccaccaaactgctctatggttttagagcgatcttcctcgtacaaaacacttttccaccaattaatatcgtacaactcctctggctcataaccaaaaagccgcttcaaattggcactaacccagactggcctaaagccgccctcttccagcagcagttgatataaaactaccgggctggcttttaataggtgattaaagcgtacattggtgcgacttaaagctttagtacgcttctgaacctgccagcgcaacaagccggtcacgccaaacataaccagtatcatggcgccgccgataaccagtatccacagcaataatttaggaatgatcggttcctgtatcggaaccatggtacttttcagcgcctcaaaatagacagaatcaggatcggtacgccacacttctatatgcttatcaatcgctcttaacaaatcggggttttcgcctattgctgtcacataataaagactcgcgggattaagcatgatcggcgtttcacgtagcccaaactttgttccatgtatatctgcaaagtgcacattggtaatcacagcatcagctttaccattattaactgcctggaaaccttcactgtaggtatcaacaggaataggcttaaaaccaacgccgtagcccatcatcatcttttgtaaagccacttcctgtactgaatcacgtagaactgcaattcggacaccctgtaaatcgggcagccccatgatgttgatatccttgcgcgcccagacttctgaccagctgtgagttacggcaatggaatgaaaatcaaacttacgatcccgctcatcggtaatggccacatccggcatcaggtcaatagccctgttcgataacaggtttaaacaattactccattcgcaatcaacataggttaactgccaagactcttctgcagcaatggcctcaatcagtttaataaaaagaccggcgggctctccctgcgcattgcggtagattttaggagaattttgatagagacctactcgaatttcgcgagcattatcagaaccctcaccctgaaagttccagatcagagcgagcgttaacagggtgactaaaatagcgctaatagtgactttataaaccatgctagtcacctacatccttagagtcttcaacctcgactcgatttcttcccttatccttagcctggtacagcaactcatcggcacggtgtaaccacttttttactgtgtcgactttaggctgatactgagccagcccaatactgatggtaagttttatattctttttaccaatcgcaattggattttcctcaatatactgacgcaatctttctgccaccttagccgccgaagaaaggctggtctcgggcagtagtagagcaaattcctcaccaccaattctggccaacaagtcggaaggacgcataatttcgctggttaatttcacaaagttttttaaaaccttgtcgccagcctgatgcccatactcatcattcacttctttaaaatgatcaaaatcgaccaccatcatgcatagttcagtgccgtttcgataggcgcgagacatttcttcttcggagcgactcataaattcacgacgattagcaacccctgtcagagagtcggtagcagccagctcctcaagcttctggttgacttcttttagctcaattaaagcctgttccgactttttcttttcagccagaatttgatctaacaattcggtctgcgagtagatatttttgaatgaaccagtggttaaaaatgcctgcaccacgccataactaagcaatagaaaaccggcagcgaaaataatatgggcaaaccaccattgatgatcccagacgactccaatggtgaaagacagacaggaaagcgcgaaccaaatcattgccagcccatataacagcgccatataaccgcgtgttttttggatcagcatccatatcacgctactaaggaacatactgatagacacatattctgctaataagcgccaccagttgagatcaaccgtggtcagatgcgcggccccaaacactaagatattgataaccaaaaagagtataactggaacagtcagccttttttgaccagccttctcaagctcgataacttcgccatacttcaacatggcaaccaaaaaacaaaatgacatcactaatcttgaggctgggccatagagtgaaaatatccatacattgctcattgaataatgagtcaggaatccatgcggtgcataaacaatggtaaaacccagaaaaccataaaccagccagcgtagaagctcttcccctgtcgctcgataacaacgccaggtgatgtagcttagaaaaccgctaaaaaggacagcaaaggagataacaatgacatgaaaggtatgggcaataaactttttatcaggagatatttcagattctatgtaaagaatgaaccataagggtagaagggctaagaaaatcactaacagcctgttataccagaccgccattaattttactgtcgtattttttatctgctcacgttccaatcgcgttcccttctacttttgggctatttgcaaccattacattgaacgtatgtccttgcttttttgcccaggcgtttctgcaaactgagacactgttaaatactagcactggggataggttgcgcaaagtcattgttttttatagctgtgacgtgttaagcatctcccaaaatacaaccacttacaataacttttgtgacttttttaatggaatcgctacaataggccacattcaaaggctcatattcacagagcagataaaaatactttcataggaaaattatgcttgttgccattctcgctgttatcgcaggtttagctttattggtctggagcgcagataaatttgttgatggagcagcttcaactgctcgtcattttggtatgccttcgttgcttattggtatggttattgtcggctttggcacctcggccccggagatggtggtatcggcactggccgcaggtcagggcaatcctggcatagcccttggtaacgcctttggttcgaacattaccaatattgcactcattcttggcctaaccgccgtgatcagcccgattgccgttcactctaaaattctgcgcaaagaaatgcctatccttatgctagttaccttgctggtaattggcctattatggaatctcgatatttcacgagtagacgccatcatcctgctaattggttttgccggttttatgggctggtccatctggcaaggcatgcagaagaaatccgacaccttggccaaagaagtcgagcaggaagtcagccagcacacaatgccgctcaagactgcaatattctggctggtgctgggactgattgtgctagtggccagttcgagaatgctggtctggggcgctgttgaaattgctcaggcctttggcgttagcgatatcattatcggcctgaccattattgcagtcggtacttcgctgcctgaactggcctcctctattatcgccattcgtaagaatgagcatgatcttgcgctcggcaatgttatcggctcaaacctatttaatacgctggcagtagtcggtatcgctggtgccattcatcctctggcagttgagtctgaggtgctatggcgtgacgccatgttcatgggcattctaaccctgtcgttgtttgtcattggttatggcttcaggggtgaaggccggattaatcgattcgaaggcgcaatattgctagctgcctatgtcggttacaccgcctacctgattcgctcagtgtttttataaagtttacaactcttatgtaaaagaaaagggctcaaacaagagcccttttgacattcaatcaaccattattattgatttactctagctaacctcagcgattttcaacaatcgagctaactggggcttatattcctgcggcaacatatcaccgagcgtgtacttatccagggttgcgaggaagttcttcaaggcttcgccaagcaccgatttaagaccacagacgggagtgatcacgcacttattatcgggcgagaaacattccaccaggctcatgtccggttccatctctctgaccagcactccaatacggatttcgtcaggatccatccgcaagcgcatgccaccgttcttgccacgtacggtttcgatatagccttttttgttcaatgcgtgtaccactttcatcaggtggttactggaaatctggtaactgtcggaaatttcctgaatggtgcacagccgatccttttccagtgccaggaataataaaacgcgtaatgaatagtcggtataacgggtaatatgcatctatcgtctccgtaaaatgcctaaagctctaatcattaaatcaggctctaagcattaggtcggctgattatataggtcaatagtgccgagaaaaacactgcgaggaagattaataccccggttttcatattcagcagccataagaccagccaactgcttgtcagcataaagccggccaggtatttggcaaaaagtggaatcgcacctcgctcgcgccaacctttaagcaagggtccaaactgacggtgctcaagtagccatagctccaatcgcggtgagcttttgcctgccgcccagaccgccacaatcaaaaatggggtagtcggcaacaagggtagcaccacaccaatcatgccaagcccggtcgctacaattgccaaagtgcgataggccagttgacgattgagtaagcgtgtcactgttggttttgcatttgaaagtacgactctcatgcctttacccttgtcattcgattttgccataggcttattctagatcaattaatatacatttgtcatacatcttttgataaagatcaagtctattgatctagatcatggttttattgccattttgtcgtaatatggccgacaagaaagacgtctaagccatcaaaagatgcatttataatatatttttaggttgacgtcttattttttaaatcttaatatgtacttgaaatacatctttaagaataatcacgatcagggcaaatcagtgaacaaagttagcgcacagaatctattctttcccgcggcctgcattcatgcagcgataaccgcggttttaactgtgcttgcctatcagttcagctccgaatggttaatggcatttgttggattaggtcatgctcacgaaatgctatttggctttgccctggcgttaatcgcaggctacaccctcggccagattgaagcgcgctggttgtggatactattcggtttatggttgtttgcacgtatcggttactgggttgacccggcaggtgctatcggccagtggtcgagcccgctattcgcattggcgctggcctggaaaatcgttcctcgcttttttgcggcaaaaaaatggcgtaaccggatgattagcccactgttaatggctatctgtagcgttcctttgggctggttaattttgcgcgaaatgggctggccagttgcaccaggccagttatcacaagccatgattcttttattggtcatgttaatggcattcatcggagggcggataattgctccagcagttgccggtgaaatgcaaaaacgtggcatcactcaacaagctcgtgttcaaccacagcttgaagctttaatacttctgcttttacctgcgggtgccatatctgccctgatcccaggcgcttcgcaggtagcaggagtattatctattaccgttgcaatcgtgattgcagttcgtcttattcgctggaaaatctggcgttgcggcgaccgcgccgatcttatcggtcttggcattggctacggctggctggcgattggaacctttgccctcggctttgccatcttctttgagctggcaacttatgtattactgcatttcattactgttggtgctcttggcactttatctgcctcagtcatgatgaagaataacctgcaccagtttaaacaccttcctcagcccaaagtcatgatcgtcaatattttaggcctgctgtgtttagcaaccctatttagagttttggccggagccatagttgactcctctcctggtctaacaggacctcacttgttgtggctctcggccctttcttggtcagcggcatattttgccctggcaatcttcctattttctacacagagaaagtctacacaaaaacaagcgtcactgaaaaaagcatccgcagtcaaagctgcgcccaaaatagttaatgcgacttcagtggttacacaaagcaaacgaggtcaatgccatgacagcatttgatatgaatttactggataaatcgctcggcgaaattgcccgcgatatccccggcgccagcgcggtcttctttaaacatgggctggatttctgttgcggtggtcatcagccactggcaaccagtattcaggagaaaaacctggatctggatgaggtgctgggtcagctcaatcaattaagttcgccacaagccgaagagcacagcctgaaatatgtgccgaatgaagaactgattaatcacattcttgagcgctaccatgaagtgcatcgcgagcagctgcctgaactgattcgtctggcgcagcgcgtagaaaccgttcatggccgccatcctgagtgcccgaccggccttgccagcttcttaagcgatgttgagcaggaaatggaagcgcacatgcagaaagaagaacagattttattcccaatgattcagcgcggtatgggtggcctggcgaaaagcccggtcgctgtgatgcgcatggaacatgatgatcatggcgagtcgttagctcgtctggaacaacttgcacaccacttccagctaccagcggaagcatgcaatacctggcaggcgctttacactggtcttgccgccttcaaggaagatctgatgaaccatattcacctcgaaaacaatattttatttgaacgaattgataactaccttggaggacactaactatgggtaaatatcgcaaactctggtttaccctgataggtatcttagcggttaccttcactatcctcggctattttggtcgtgaagtgtatcgcgaagcgccccctatcccagagaaagttgtaacgactgatgggcgcgtcttgatgacccatgactcgattcttgacggtcaaactgcctggcagtctattggcggtatgcaattaggctcgatttggggtcacggtgcgtatcaggcacctgactggactgctgactggctacaccgtgaattggaagcctggttagaattggctgcgcaagaagagtttggcgtgccttacgctgagcttaatggcgaacagcaacaaaccttgcagtatcgcttaaagcaggactatcgcaccaacacttatgacaaggcgacagatacagtaacagtatcagagcgtcgtgctaaagcgatggcggaagttaatgcctactatcaccagttgttcagtgacgatccaaaatatcgtcagcgtcgtgataactatgcgatgaaagaaaacactcttcctaaagaagagcgtcgcgaagtcatgaaccagttcttcttctggactgcctgggctgctgcaaccaatcgtcccggtggcgaagcaacctacaccaacaactggccacatgagccattgatcgacaacgtaccgacttctgaaaatattgtctggtctatcatcagtgtgattctattggttgccggtattggcggtctggtctggggttgggccttcatgcgtaaacacgatgaagaagagcctgctgctccggctaaagatccgattactacattcaagctgactccttcgcaaaaagcattgggtaaatacttatttgtggtggttgcgctatttaccttgcaggtcatgatgggtggtcttactgcgcactacacggttgagggacaaggtttctacggtctggaaatttctaagtggattccatactcattggcgcgtacctggcacattcaggcagccatgttctggattgctactggcttcctcgctgctggtctattcctagtaccaatcatcaacggcggcaaagatccgaaacaccagaaactgggcgtcaatgttctgttctgggcattggtagcggttgttggcggcaccttcatcggtaactacctggcgattgcacaaatcatgcctgaaaaccttaacttctggttaggtcaccaaggttatgagtacgtcgatatgggtcgtctgtggcaatggggtaagttcctcggtattgtcttctggctattcctgatgttgcgcggtattgccccggcactgaaaaaagccggtgataaaaacctgttagtactgttaaccgcttcagtagttgccatcggtttgttctacggcgcaggcttcttctacggcgaaagaactcacatctctgtgatggaatattggcgctggtggatcgttcacctgtgggtagaaggtttcttcgaagtattcgctaccgtatcactagcctttattttccacagcatgggcttggttaatcgctcaacagcaacagcagccagcttagcatcagcttcattgttcctgcttggcggtgttccgggtactttccaccacttatacttctcaggaactacaactcctgtgatggcagtgggcgcaaccttctctgcactggaagtggtgccattgattgtgctgggctatgaagcatgggaaaactatcgcctgaaaagccgcgccacctggatggataatatccgctggccattaatgtgcttcgtcgctgttgccttctggaacatgttcggtgcaggtgtactcggcttcatgatcaatccaccagtatcgctatactatgtgcaaggtttgaacatgactcctactcacgcccatgcagcactgttcggggtgtacggattccttgcgataggctttgtgttacttatcctacgctacatccgtccacacatggtgtttgatgaaagactgatgaaaacaggtttctggtggttaaacattggtttgatgatgatgttgttaaccagcttgctacctgttggcctgattcaattttacgccagcgtcagcgaaggcttctggtatgcacgtagcgaagctgtcatgcaaagtgacatcctttacaccctacgctggatcagaaccattggtgacgtcgtcttcatcgtcggtgcactagcagtaacctggcaggtgattaaaggcttacgcgagccagcagaaggcgctcatcagcctgttggtaaaccagttgaagaaggtgcgtaagaattacaagctataggaaacatttgaggtgccaattggcacctctttttttgcctctaatttgtaggctggaaaagactcggaacgcgtcgccttccaacaaaataccgtttatgtagtggcaaactaaatttggccacctaatttaagaatatggttatagcaaagatgcgcgacatggtgtgtcggttggactagtaaaattattgaagcaattaagaagattatcagacagtagaaacagaaaagcaggccggagcctgctttttaatttgttggaaattccttgttaacggaaaaaccacaatttcctatctgtccgattaacttaagccagaaattgaaacttgtcaagttttgcggtattacttaaacattaactaataaaaaggatctaagaatgaaatatagacttggaatagacatgggatcaacctcgcttggctggtgtgcagtaaagctagatgataacaatcaaccctgcgatatcattgatatgggtgttaggatttttcctgacggccgtgacgccaaaagcaagcaacccctttcagtaacaagacgggaaaaacggtcagcgcgtcgaagaagggatcggtatatagaaagacgcaacaaacttctaaatgcgcttatcaaatatggctttatgccaaaagataaggcagagcgaaaaaaagttgaagaaattgacccttggaaagctcgcgcagaatcagcgacaaaacaggttcctctttttgagttaggccgcgcactatttcatatcaaccagcgtcgtgggtttaagagcaatagaatactcgatgatacctctgattctgaattaacagggatgaaaggaggaatacaggaacttcaagaacagctaaattgcaaaacagtaggtcagtttttatatgagaagcataagaataaaaatacggtaagacttagacctaactcagtgaagggtaagaatgaatgggacttttatatttcacgagaaatgatggaacaggaggttaaaaccattctttcgcaccaaacgaagtactatccagaaaaccttacacctgatattcaacaagagctaatggatatcatcatagagcaacgaccattacaaattcctgaaccaggctggtgtaccttgattgaaggggaaaaaagaggtcgcttgggttatccagaaatacaaaggttcagaatttttcaggaagtcgcaaacttgcaattgaaaaagtatactcccgacgatcctgaccttacaaagcagcagaaggatattattctaaaagagctgacaaccaattttacagaagtaaacaaaaatggattgctgacctgggcaaaaataaaaaaactcaccaatcttaaccgagcatcttcatttaacctcgaagagcttggccgaaaaggattaaactgcgatctgacaagctttagactttctgatgacgaagcctttggaaccgaatggttagatcttgatctcgatacacaaaaccagattgttgataaaattgttactgttaccaacaaagaagatttaaaaagctggttatcggataacttcgatttaagcgaatctcagctcagctctattgcatctgctaaactcccgccggggtacgcaagcatcagtctcaaggcagccatcaaaataaatcctcatatggaaaatggtttaacttacgataaagcctgtaaagaagaaggcatagaccacagtcaattccatacaggtgaagtttataatgaagggaaccttccatactatggacaactcctgcagcgctatgtattaggtggagatcgttcattaggtgaggaagctactcccgagcaatattatggaaagatcaacaaccctactgttcacatagccctgaatcagttaaaaactgttgttaatgcgttgataaagcgattaaagtctgctcccgaagaaatacacctggagcttgcaagagaacttccactcggtgctgaccaatactcaaagctcgagcgagacttaagaaaagggcgagatgataatgaacgtatcaacgaagagctagaaaaacttgggatcgccaagaactatcaaaaccgaatgaaatataaactttgggaagacctcgctgaatcgcctaatgagcgttgttgtccatttacaggagacatcatttcagcacacgatattttcaattcagcgtacgaagtagagcacttattgcccttctcgttaagttatgacgactcaagggcaaacaaggtgctgtctcatagagatgccaacagactcaaaggtaaccaatcgccttttgaagccttcggacatagcccagaaggttatgattgggaggctattattgcccgggtagaaaattttgcgaataaaaataaacgttggcggtttgaacctaacgcttgggaaaaatggaaaggcgataatggcgatttattagcaagaatgcttaatgacacccgctatatgacccgagtggccagagaatacatgacttatgcctgtcacaaggacaaggtggttgctgtaactggtcagctaacatcaatgcttaggcatcattggggcttaaacagcctgatcagcgatgatgactcaaaagatcgttctgatcataggcatcatgccattgatgccttagtagttgcctgtaccagccgcaacacgctcaacaaagtatccaaagcatcaaagcgtgctcatgacactgacaaactcttagaaaaactcgaatacccatttgaaggtttcgagcgctcaaaaattcaggagctggttgatgatatcgtcatctcctataaaccagatcacggtaagccaaacggctctaccacgataggctctttgcatgaagaaacctattatgggcgcatctgtgatggcaccaaaaagaacactggcatttatgctacacgcaagcctttcctaaatattgaagacaaagagaaaaaaatattggaaatagctaacaccagcattagggaagatttattggagcagttagcgaccaagcccactaaaaagcaatggcaggactttttagctcaatatgcaaagcaacataatattcgccgggttcgagtacatattgaaaagtccgatgatgtaatgattcccatcaaagacaaaactgggaaaccctaccgatacgttcaaggcggtagcaattattgtgccgatatctggtgtaccgacaaaggtaaaaaggcaggcaagtggcaatcagagattatatccatgtttgatgcacaccagtctgactttacccctcagtggcgcaaagataatccgactgcctggcgcattatgcgattacagatcaatgatatggttgcttttgacaacaaagataatactgaaataaggcgagttaaaaaaattacaaatggcctagtttatctaagaagtcacttaatcgctaaagaagaaaaagacaaatctagctgggccgcatcagcaaagcagctacaagagaaaaatgcacgtaaagtattcgtagacccgctaggcaaggtaaaagaccccggtcatgctcggaaagctcataagattaaaaaggagtagttatgtccacaaggatgttagaaatcagtcaagataatcgctacctctctatccacagaggctttatcgaaatcaaggagtcaggggatctaatcgggaaggtccccatagacgatatcaacagtattattggctccgcacacggcctgatatacagtcaaagccttttaatggaactctccaagagaaacattcctctggtagtatgcaatcaagccttcatccctgtttctgtactttggcccctagatggccattacaaccaatccgcaaaaattgataatcagctggatgtcagcctccccctcaagaaacaactgtggaaatcgctggtaagccagaaaatttatcgtcagggacaaacgctagaagcattaagtttacccgcaggcgctttttaccagctcagcaaaaaagtcagctcaggcgacaaagagaatctagaaggacaggcagcaaagcgttattggcctatactcctcggtgaaaatttcaagcgctatcgcaatggtccagcacctaacaatttactcaattatggctatattgttttacggtcagctacagcaagagcggttgttgctggcggcctccatccagccatcggactatttcaccgcaataagaataatccttttcgactggtcgatgacctgatggagcccttccgcccctttattgatctactggtttggaagctacatttacaggaaggtgtagatgaactcactcctgaaataaaatcacggctggtgtctatattgtctgttgagttggaatctaatgatttcactagctccttgctaaaccatattcaattactcgtgcgctcactcaacaaaagctacgaagacaagaaagtcatgttgcaataccccaacccaagcctgttaaacctgcaagcgattctcaatggataagagtaaatttagacttatgtggctcatggtaatgttcgatctaccggtaacggaaaaagcagaaagacggtctgcgacacagtttcgtaactttttgctggatgaaggttttgaaatgtcccagttttcagtttacttccggtttattggcgaaaaagaacgaagtataccgattgttaagagaataaaagaggctttacccgccaatggcaaggttagcattctctttttcaccgacaaacaattcagtgatattctgtattttcacgatagaaccctagtagaaaatgccgaaatccctgatcagcttgccctcttttaaccactttacagccgctccaataacgaaaaagcccctgaaatcaggggcttatcgactcatagagtttatcagataggaaattgtgcttaaaccgcaacaagatgcttaatggcatttcataaccacgcagtttatcagataggaaattgtgcttaaaccgcaacaaaaggttactaccatgagaaagtcaatcaagtttatcagataggaaattgtgcttaaaccgcaacatttcgttagttagggttcgcattgcctgaagtttatcagataggaaattgtgcttaaaccgcaacttggagcatccgctctttcgcgtggtcagtagtttatcagataggaaattgtgcttaaaccgcaactttcgacatcaactttataacatcgaggtaagtttatcagataggaaattgtgcttaaaccgcaacaacgaaggacgctttatgaacaaagcatacagtttatcagataggaaattgtgcttaaaccgcaacaaagcctattgttattcgtgcagaggatggagtttatcagataggaaattgtgcttaaaccgcaacatctgctcccttccaattttggtttcaaaaagtttatcagataggaaattgtgcttaaaccgcaactgtcctcgtcggcaatgccggaagcctgctagtttatcagataggaaattgtgcttaaaccgcaacctgatgcgcttagttttactaactgtttcaagtttatcagataggaaattgtgcttaaaccgcaactgccggttcgggcatgaataagcgcctgtcagtttatcagataggaaattgtgcttaaaccgcaacgctcatggattgccttatgttgcgctttcgagtttatcagataggaaattgtgcttaaaccgcaacttaaacgtggaggtatgctatgggacacacagtttatcagataggaaattgtgcttaaaccgcaaccctttgtcatcatcataccagataataactagtttatcagataggaaattgtgcttaaaccgcaacctagctggagaaatatcaacctacgcaaaaagtttatcagataggaaattgtgcttaaaccgcaacaatactcagcaacggttacggtgttttcatagtttatcagataggaaattgtgcttaaaccgcaactattactccggctttaagaaaggggctgagagtttatcagataggaaattgtgcttaaaccgcaacaagtattacgaactatctcgaaacgctgttagtttatcagataggaaattgtgcttaaaccgcaacgtatcactacaccatatttcggtttgaatgagtttatcagataggaaattgtgcttaaaccgcaacttgttacgcatacccactccttttaacttcagtttatcagataggaaattgtgcttaaaccgcaacacaaaatcatcacaccaacaggcaggaaatagtttatcagataggaaattgtgcttaaaccgcaacaagatcgtttggcgcgtgctgaataggtgaagtttatcagataggaaattgtgcttaaaccgcaactttagccatagctttaggaaatacacttccagtttatcagataggaaattgtgcttaaaccgcaacacgccacttggtaacagtttgacctatagaagtttatcagataggaaattgtgcttaaaccgcaaccgaagtgataggcgcttccgttgccgactcagtttatcagataggaaattgtgcttaaaccgcaaccggcgtgaatggtgatgtcgcagccctcgcagtttatcagataggaaattgtcccccccccccccgagtttcttaaaggaaaaatttgattgctgggattcgtaaactcatcccagcctactaagcatcattccatcaatataacctaaagctataacctctcgactggttcattgaattgaaactgcgacatccagtaatattgcccgcttgcaaaggaaaccaaggaaagagcaatgacaggattcgaaattcaacaaaacgccagaattaaagcctacctaaaccgtaataaacaacagtctaatgattccccccttcctcttgacgctttattaaaaaagaacagtcatacactggttgttatgagccctgatgagttctgggattttatgaaaaagtattatcagcgaaaaggttattcggaagacgatacgattcaactggccttgcagcagttagtcaaaaaaggactgataacagaaaccgcaaagctggagtgggaagagaatcgaaccatgatcaagagtgcgggtggctttataccctcctttgttgatgctaaggccttagtcgttcttgcagccgaaatgaaacgaggcggtaacttgtttagcaagtttcgtattcagaattatgctggtgcaagctatatcatattgaagggcaaccctgccttaagaactcacctgaccggaacacgctatttagccaataaccctaaagttgttagcatgggcttaggcaaagctggcgctggcaatgctattcgcggcggcggcatcgtaaccgttatcttttcagtctggtttcatggtatggatcagttgatgagggatgagcttacctggcatcattttgtgggtggcctggctgcagatgtagttattgcagctgcaggagcaggaataatttggacaggccttacgctcactggcatagcggttacaggtttagctataggaccattattagcagtatttgcagtttgtgggttaatatcttacgggctctcaaacttatttggcgagaaactaacaaagtattttgttgagactcttaagtctatggagaaacacttgaaaatcaaagtaacacaactcaatacatttacgttgatttcaaaagtagttgttgctccgagcattgattatgcccttgaaaagctaactgataatattaagcaactttcaaaaagcacatcaaattctatatctctttcccaacgagaccctgaaggttttttgcatagattatttaatattccagatacgagaaatatatatcgatgaataaagataatgctttattagaagaactcaccattaaggaagtaatcttaggcgtaataagtgggacggtaatattgggttgtgcgttatacgctctcataaacagctatgaattatcacttggcatattcgaaaggattaatgcaaacagctattacgttaaagcaacaaaaatggggcttttccttatcagtgctgccttagcagctttttgtctaatttatctgatagttttaaggatattaaaaaaattaactttccaaaaagtgaataaaacctcgaaagtcctttcaaccattattttgctgggcataatatccagccttgctgtatggccggttcttaataaccagctggatagacatagctaccactactgctttttctattcaggcagtaatatcgccagcccccctgtgtacgttaaaaatcccgatcactgcatagctactcctcgtcagaatattaatgaaatactggcctggtttgatgagcaggaagcggctggggttcgcttgaccgctaaagatgtccaacaaaaagtcgatgagcttaaagcgattagcgggtattgatagtattcacacgtagttcggataagtcatacatggcgtcatccgacattcaatcggacgagcgccactcgcccctacacaagaattgttggatggcgcttcgcctgttggtaagccgattgaagaaggcgcatagatgttaaatcaataacaacactcttcacaaaacttgaggtgccaattagcacctcttttttttgcttaatatttagaaaaaatggttaagccaaatgcttggcatgaaaccttaagtgctgctcaataaagctggcgataaagtaatagctatggtcataaccatcatgtctttcgatagtcaccggagcggacttttcttcgacaatcgcttccagagtttctgttttaagttgctccactaaaaactgatccgcttcgccttgtgataccagcataggagtttgctgttcggcttgctgcaaaaggtaacagctatcgtattgttgccactcctctttgtcatcacctaaataggcagtaaaggctttttgtccccagggacaattcatcggattcactatcggactgaacgccgatactgatacaaacatatccggattacgcaaggcaatcatcaatgcgccatgtccgcccatggaatgaccgctgatggccgctttttcactgacggaaaaattgtcctgaataagagcgggcaattctttcacgatgtaatcatacatctggtaatgctttttccacggttcctgcgtggcgttgacataaaagcccgcacctttaccgaggtcataaccatcatcatccgccacatcatcgcctcgcggactagtgtccggagctacaatgataatacccagttcagctgctacacgatgcgcaccagctttctgcataaagttttcatcggtgcaggtcagccccgacaaccagtacaacactggcagctttttacccagctcagcttgaggcggcaaatacaccgcaaaacgcatatcgcagttgagcacctttgaagagtggctgaattgcttatgccaaccaccgaaacttttacttgctgataattcattaatactcataactactcccttagtagtgaattacgctacgaatacttttgccttcgtgcatcaggtcaaaagctttattaatatcttcaagcggcatagtatgagtaataaagtcatccagcttaaattcacctgccagataacgctcaacgtaatccggtaattctgagcgacctttgacaccaccaaaggcagtacctttccatacccgtccagtcactagctgaaatggtcgagtacagatctcctgaccagcacccgcgacaccgatgatgaccgactcgccccagcctttatggcaacactccagcgccgagcgcatcacattgacattaccgatacactcaaaggaataatctacgccaccatccgtcatctcgacaatcacttcctgaatcggcttgtcataatcttttggattaacgcaatcggtagcgccgagctttctggccagttcaaattttgactcattaatatcaatcgcaataatgcggctggccttagccatcaccgaaccaatcactgccgacagaccaatgccgcccaaaccaaaaatagcaactgtcgcgccctcttcgactttagcggtattcatcactgcgcccatgccagtggtcacgccacaacccaacaggcagacttcttcaagcggcgctttcggattgactttggccagcgaaatttctggcagaaccgtgtactcggagaaagtcgatgtgcccatgtaatgataaatgggcttgccgttaattgaaaaacgcgtggtgccatccggcatcaaacctttgccctgagtttcgcgaattttctggcacagattggttttgccagacaagcagaacttacactcgccacattcaggggtgtacaacggaatcacatgatcgcccggcttaacgctggtcacgccttcaccgaccgactcaacaatgccaccgccttcatgccccagaatacttgggaatacaccttcagggtcatcacctgacaaagtaaaggcatcggtatggcatacgccagttgccacaattttgacccgcacctcgcctttctgtggcggctgaacttcaacttcttcaatagacagcggcttacctgcttcccaggccacagcggctttacacttaatcacttggttcgacataacagtttccttgatgaatcacttcgattaacaaaccttacaacagtacccaataattgcaatcgaagctttgatttgacgtgatacataacaactattgatcaagagctactctaacagcatggcgtgaatcttctgtcgtaattgatgcctcgtaggcaatggcatggaatttatggccagatttggttacagttgacattattctaagtcagcacaatccgataaaaactctatggaaaaatacgaagacctgctcgtctccctgcgtaaaatcattcgctccaatgatctctattccaaagagcttgccaagaaagctggcgtaacaggcccgcaacttctgatcctcaaacaaatcagccgcaccaatggcatctcgcccaaagagctggcagagacactgaatttaagtcagggcactattaccagcatcatcgatcgaatgcaggatcgcgaactggtcacacgcataagaagccaaaccgacaagcgccgctttaatttatctctgactgaaaaaggacaggcattattagaatcggcaccaccaccgatgcaggattatttcattgaacgatttaatcgactggaagactgggaacaaactcaactactggccgcctttcaaagagtcgcaagcatgatgaatgcacaggaaattgatcaacagacgaatgtagagcagtagttgcatttcctgaatagcagtctatttacactacgtccattaagttcttaactccgtctaaatctcttttcaccatatttatttcttgttaaataaacttttataagactcaaataatatttgaccagattatttcgctttatgatactcaatgtatccttcgtgttattatccatgttagcaataactaaacgtaaatgacgctccgcatcattatctgacttttcaactcccaatccttttatgtaacaagcagctaagtaaaggtgcccctcacctatgttagagttttttaaattgtttaaatatttgaacgctagctcatagtctttatgtaccaaatccccatgaaacaaagctcttcccacatacaatgaagaatacaagtcaccaagagctattgccttatgtaaatactcgaatcctaactccggattttgtatattgtttgatgagtcattacttagcaagtaagttctacctagcatcctatatactctaggatcattacgataagttagcgcctccaaaatttcacaagcttctcttctttccccagcgagtattagctgagccgccttatctagttttaataattcttcttcatccaacataatattattttgcctattgaatcaattgcttaaaattgtcctaacccatactcaaatactggatgcctacaaatttctgaataaggttatcagatatttctatttaactataatttttgttgaatatttggatcacatttaaaaatttcattaccaatataaaaacggcagctcaatagctaccgtttttacattttccagttactttgcgtttttaagcaacccagcccagctcatgggcttttgcggcggccattttaggcacgtcattttcgatgaagtggtgatgcagtaactgtacacctagaacgtggttgaggatggcgtccatttgtactttatcttcgcgcggtacagttgggtcatcatttttcttaatcatatcctgcaatgcaccataatcaatcaggccagcttgagccactttttcttcgctggcaaactcttccattagctccatcagtgcattccatttctttttatcggtatgcgctggtggtgccatgaaggcgaacttctgacgtttgtatagcgtttcaggcaacaagcctttcatcgcttcttttagcacatatttctcaactgggcctttaatacgcatctgtggcggaatattcaccgcgtatgccgcaaggtgatgatcaaggaatggtggacgagcttccattgagttagccatatccacgcggtcaccgccccaggttagaatctgaccctcgagcatggttttaatccagacatactgtgccttgtccagagggtgacgcccttccagttgagtttcatcaaattgctcggccattgctgtccccggatcataatcactgatattagcttgatggtctttactcattaactgacgcgcgaaaccatcacagcccatccagttttggatacaggttggtgtgaaacctactttggcatcaattgcatcggagcggaatgcttcacgcggcagcatggcgcccttaaacagtttgtttgattcggccagggttgattgcatctctttgcgcaggttttctggcaagtcatctaatccatacaggaacatgtcgttacggaatgcaggatagccagcaaatagctcatcactaccctcgccggttaaaaccactttatagccctgctcacgaactttctgactcattaataatttagcaactcccagcgtgttgtagatggttctttctgtgtgccagatggtgcgttcgaaatggtcataaagatgttcagccgataacggcagaatgatttgttctgcacctgtcatctccgccatttcgcgggcaatcggtgtttcatcataatcggcatcatcaaagccaatagtgaaagctttaaccggatcctgacgcactgatgcagacaagccaagaatcgaacaggagtcgataccacctgaaagataggcgccaacgggaacgtcggcattgagacgatgttgaactgcctcaagaagattttcgcgaacaccatcgatgtattcctgctcatctttcacattcagatgcgcttcagcctgtgggaagtcgatgtcccagtatttgtgctcagaaatttccaactttccatttcggcgttggattttaatccagtgtcccggcggaacctgattaacgcccttaaatgctgttgaaccagg

SEQ ID NO: 934 - DNA, 24242 bp, synthetic construct
  source 1..24242: mol_type = other DNA
  misc_feature 1..24242: note = Synthetic
  variation 14683..14754: note = n is a, c, g, or t
  variation 3470..3471: note = n is a, c, g, or t
agctggttctctccctcctgctgcgccagcgttgtcgtggctgtcagcagcgccgccaggcacagcatcccttttcgtttgtgggtcatcatcttgggcgaagtcctattcaaagtcgaagatgttggtgaagcctgtgagctggaagacggtctggatgtcgtcgttgacgtttttcagcaccaccttgctgcccccggccttcgcacccttgaggatgctgatgaggatgcgcagtccactcgatgcgatatattccagttcggtgcagtcgatgatgacgtcgcggccgttgctgttgtagagcggctgcagtgtcttttccacttcggcggcagccgccgtgtcgagttctccctcgagggttaccagatacttgttgtccgattcttgaattgttgctttcattgttcttgtttttattacatgagttatttcttacctcttacctcttacctcttacctcttaattcttacctcttacctcttacctcttaattcttacctcttacctcttaattcttaactcttacctcttaattgcctcccctctccctctccttcggggagggctggggtggggcttcttaactcttcacgtcctttcgcagcgtcagcacgttcctcccgttcagacgctcgtagttgatggagtccatgagctttctcacgagcagaatgcccagaccgcccacaggccgctcctcggctgtcagcgttgtgtcggccttcgaggcttccgtcgggttgaaggcgatgcccgtgtcggtgatgatgaacttcagccgccttccgttcgacgtgattctgatgtgcacgtcgcccttcgttccggcggggtaggcatactccatcacgttgaccacggcctcttccaaggccaggcgcagcttgttggtgagcgacttgtcgatgcctgcccgttggcatacgctcttcacgaaggtgttgagctccgtcacctgactgacgtcgttctgcagcgtgagctcttcgtcgagcgtgagcagttccaccacgggcgaatatttcacggcgagcatggtcaggtcgtcgcgctgctcggcaccgccgccgaattcggcgacggcctccgtcatggtcttcaccatagcctttggctccagcgtggtgcatcgggccagcacgtcgagcacgcgttcgcgcccgaactgcttgttctgctggtcgcgcccctcggtcagcccgtcggtgtagaggaagagcgtctcgccgccgcgcagcatcacatcctgcatctcgtagctgaagtcgtcgaagaggccgatgggcaggttgggcttcacgtcgggcgtcaggcattccatcccctcgtccttgccttccgcggtcttcctcctgacgacgaccggcttctcatgcccggcgttgcaatagcgcaggtgtcccgacggcaggtcgagcacacccacgaagagcgtgacgaagatgttgcgcttgttgttgcggcatgccgtctcgttgagctgtgtcatgatgtgggccgggttgttctcgcgcgatgcgatgttgtggaagagcgactgtgtgacggccatgatgagggccgacggtatgccttttccgctgacgtcgccgatgcagaagaacagcttgtcgtcgcgcacgaaggcatggaagaggtcgccgcccacggctttggccggtatcagcgccccccacacgtcaacgtcgtcggagtggccgatggtttcctcgttcatgccgatcatggcttgctgtatgtcgctggctatgcgcagctcgttggtgatgcgttgctcctccatgttcttgcccacgagcaggcgctcctccttggcgaaacgattcaccatgaaaagcaggatggtgaaggccacgagcatcagccccagcatgtacaggcgcaggttcttcagcgaggcatacacctcgtcgtcgtagcacaccacggagatctgccagtgcggcttccccctcatgttggcatagaacacggtgcccttgcggtcgttgtcgctgaagcggatcatcctgctgtgcccgctgtggctgtcgtgccgctcggtagtggaatcgttgatcagtctcacgatgtgctgggaggtcttgctgctggcgcggctctcgtcgggctgggcgatgacgtcgcccccttcggtgagcaggatgttgaacgacgaggggtagatgtggcggttgttgatggtgtcgctcagccacttgagcgacacgtcgatgcccagcacgccggctgtcgtcccctggtggtcgcggatgggcatggcgcacgaggtgacgatcgactgttggtcgtcttcgttgttgttgtaggggtcggcccacacaggcttgtcggcgttgatggcggtggtgtagaactggctctgcgtgtagttgagtttgtcgcttgtgtaaacgcctttcacgatactgtcgccgacaaccatggcgtagggctccacgagatgacccatcgacgggagatagtccggcacgtaggccatgaatgctccgtgcacgtggcggttcgacttgatgatgcgctccatggcctcccttatcgagtcggtgtcgagcagcgaccgttcaatgtcccacgcatggttctgcaagatgtcggcagcgccgttcatcgtactcttgacgaggatggccttcatcgtcagctcgctctcggcgcgcacctccagctgctcttccagcaagtggtgcgtgtataggtactgtgctcccgacagcacctcgatgaggaaggccgccgtgatgacgagcagcagtccccgccgcttcagaatgttctgcaagaaagctttcaccttgttcatgttccctttttccttgttaattcttaattctcacctcaaacctctcacctctcacttcttacttctcccctccaactccccctctccttcggggagggtcggggtggggcttcatacctctcccctccaacttccccctctccttcggggagggtcggggtgggacttcatacttctcccctccaacttccccctctccttcggggagggtaggggtggggcttctaacctcttatatatttgggcacaaaaatacgaatttattatcaaacccctatcattttcctccatctttttgcataagaaacgacaaaaactttttttgtatggacgatgagcctgcatgtctgctcgtttcaagcgatgtgacgctatcggcacggtgtcggaaaaggcactgaacgctttcccgcgtcccagttttccagcatcccgtaatcctccccctccctttcggggagggctggggtggggcttttgaacgctttcctgcgtccctgttttccagcatcccgaagtcctccccctccctttcggggagggccggggtggggcttttccctcccctcggggaggccaggtgggggtctgaatttcctttacaatcccctcgttttaacgctctgtggctgcaaaattctgaaattaaaatcccacggnnatttgagcgattctcgcgaaagttgtaacggcttgaaaagaaagcacttgtcttttctttacattttccgccttttcaaaatgacgcattttacactccagaatggctcattttgacttgtagaatgcgtcatttcggagagcaaaatggctcatttcggagtgtaaaatgcgtcattttgaaaaacaggatgaaaaaagctgcgattttgaatggatttttccgcgtttcagaagcgttcgtctctctagaacgatcaataatccgtgcacgatttttaggtcataattgtttacaaagcggggccgtaacgaccgcgttttgagttgaaatggcacacgaaggaatgtttttcttacggattatttggtggtatggaataaatatattacttttgccacatgaatgaacagataagggaaaccattcactccttggagtatgatgagtattacgcaagcgtgttcttttccttaactcgtttctgaaaaagagcaccaaacaatataagggtgagatagaaatcgcccggcagattttgaaaaagtatcagtaggaggataagaatatgatcaagcttgatgaagagaaactggcagggttgaaaaccggttcacatcatttggaagagaagtatgggcctgtcggctctcccagccgagtggagttcgaggcaaaggcaaaagcgtggtattatgccgaactgctgcgcgacgagcgtaagcggcagaaactgactcagcagcagctgggagagcgcattggaaagaaacgtgaatatatatcctcgctcgagaagggacagacagacatgcaactctccacatttatgctcattgccaatgcccttgggatgagattttctcttgtcgttggataggaagggaggttaaaacacaaaccccaggttgacgtagaaatagagcttcttcgtcaggttgctgtagccgagcgagccgcccaagggtccgaacatggtgttgtagtagtagctgacggagccgccgagcatggctttcgactggaacatctctttcaccgactgcccgtcttgccccacggcgaggcggagcagaaggttgttgttggccgtcagcttgtattgcgcctgcagctgggcggcgtagagcttgtcccacgacagctcgaggttgcccacgccggcaaaggggatctgctggaggaacttgtggccgtaccattcgccgcccatcatgttgctgagcacgaagggtacgtcgtcggtatagagcagacggccgccgatcatcgcctgcagggcgagcttgtcggtcagggggatgttggtgcgtgccgcgagcgtgtactcgcgcatgccggtttggtcgtcgaggttgatgaagttgtcggtgtggtaggcaaagtgggcgtggaggcgcgtccctcgggtggggaagtaccattcgttctcgctgttgtagttcacgtcggccgaatagctgatgtagcctttgtcgctgtccatcgtctcgtcgaggtgctcgggcagcctgtcgacgagcaccgaccggtagtggtagtagtcccagttggccgcgatgctgacgttgaagttgcgcacgttgaagttgaagagctgcagcttcagcgcgtgccggtcgaagttcatgctgtaggccttgctgccgtattcgtagaagtcgacctcgttgtagtggaaggcgtagctcacggtgggccggaagaagctgatggggtggagcgaccagtcggcgcgcgccatgagacgcttgcccagccgcagcgtgagctccacatccatgggcgtcgacgtcttgatggggaactcggcgtttgcctgcatggccaccatctcctcgttgtcgaagcgcgcaccgacgtttacctggttcgagcgacgctctccggcaatgaatgtgacggtggcatcgtcgcgtccggcgttcttctctatgcggaagcgggccgtcttgtagtagaggtcctgccgtatggcggtggtgatgatgtcggcgcggtccatcgtgatgcagtcgcccacgcgcaggcggaacttgttgcgaatgtaggtctggtcgctcttacgcatgttctcgaagacgatgccgcctatcttgtacacggtggcgtgggggagcggcacgcgcacgttagagatgcgcggcagtggccgcccttttgccaagcccaggctgtcgcgcagggccaccagcttgtcccactgcttcatggctgcctcttcgccgcgccgtatgagcgtgtcgatggccgacgatgtgaagctggcggcgctgtagcccgaggtgttcacgcggatggggatgtcggtgagccgcatgttctcctcgtatttgttcttgcagttgatgtcgacaatctgcagcaggatgctcgaagccgagttgaggccggcggccgtcttcagctccgactgcacgtcgacgccgatgacgatgtcggcacccatctcgcgggcgatgtcggtggggaagttgttgcgcagaccgccgtcgacgagcaccatgtcgcccttcctcacgggagcgaaggctcccggtatcgacatgctggcgcgcatggcctggctgaggatgccgctgcggaacacgtactcgctgttgtccacgatgttggtggccacgcaggcgaagggtatgggcagcgtggcgaagtcgatcgagtcgttgtagggagtggtgagggcgtcgaagagcgtgctgatgttcttcccgaggatgaagccgccccctcctgatgccgacgagcggccgaaggtgatgttcttcgagatgacgtaggtgttctgcttctcgcgctcgtggaggctctggtggctcaggtcctcgcggtcggagagcacatacgaccagtcttgatacctcaccacagagtcgagctcgtgggcccggtgcccgcaggcgtacaagccgccgatgatgctgcccatgctcgtgcccgtgatgatgtcgacggggatgcccgcacgctccagaaccttcagcacgccgatgtgggccatgcccttggcaccgccgccgctgagcaccagtgccacccgcgggcgcttggaaggtgcctgccggtcggccgaaacgggtgtcagtcggtctgcggtaacgggtgtctgcgaaccgtccgacgcccgtcctgcggtcagcgtcggttgctgggcagctgccgtggcagccagtcccgctatgatagtcagtaggaataatatctttctcatggtgcaaagttacgaaaaagtctcggcaataaaaacaaacgcgttcgtttttattgatatagaatgtgttcttattcatttttgctttcaagtttgaacgaacaagcggaaagagccgtaagtagcctcctatagaagtgaaccccagaagtcgggtagaaacttctggggttcacttcacgataggcccatcctctaaggaatgaactttggggcttttgtcgtcacttgatgacgaccttcttgccgtttctgatgtagatgccgggagtggtgggctgttgaggcatgatcctgccttgcaggtcgtaccattcggcgttctggttgacagtggcagcaggctggttgatacctgttgggtcagcttctaccacctcaaattccaggtcggtggggaggaatcctgtcatgccggcgcagatgatgcggtagcgtcctgcttcgaggttaaatcctgcgaacattccttcgacggtgaactcttcgccagccttgacattgacgatcgtcggtatcgcattagtgcattcttttctgtcagagtcatcgacgtagtctccgttctcgtcgagcttgatgggaattgcgaacgacatgagcatgccattctccagtgcgcctgctgtcagcttgtagttcatcttaaagttgatgtcctcgcccttggcgtattgttctttgatgttattgtccttcagctccacttcaaacagtccgcagttggtgaaggtcgcctgtccgttgctgacgtgtactttgatgtaggagtcgtccttacacaagcatgggatccattcgccgtcggttgtcgtgcggtagtacatgcgaacctggtagtcgccgtcggttatgccggtccatgtcaatactgtgtcacaagagatgttgtcgaccagtttcatggttgacagtctttcgcctatggggcgcatctgcttgtagcctgtttcgttctctaagcacactccagtctgagctattatcacggggcatgtcatgtttgtggcagcgcaggtcaacatgcacttcagattaccctgcttcacgtcggcatgtattttgtaggtgttgagaactgtcgtgctgacggcaggagcttccttaggagctggagcattgggatagacaccactgtagaaggcctgcaagagtcggaatccgtcgtttactatggcgccacctgtaccctggttgatgggcagcagcgagttgatgcgatagaagccctcgttctctatagcctcgttggccactcccgaccatccccagttgacgtggaagaggtcttccttcaagtaaccgtcgatgacgaaggcatgtccgccctctgagctgtttccacagaaaaagacagcctttgcaaccttcagttcctcatagagtcgcttgatccagccatcatagctatacgtgtgttgttggtggaatctggcattggggaaatccatgtattgcgtcagtcccttcagcgccgaatgggcaaatgctcctgaaccgcctgaataaattgtgccatacgtcatctcgctcatggcgccgcagatgtgcatcagccgtgccacggcagcctgttgttcaggcgttcccttgatggcgctctcgtcagttacagacttgccttcctcgttgcgctcggtataaacgtcgatcaggttgccccagtcgatggttgtagaggcagggattgcctcgtcggagaatttcagccatacagggaccttggtcttgtctttcagcctttctgccgactgatagactatatctttgcgtgcaggaatgtcgtggatgagtttgccctccttcacttcgggcttggcatattcatctctccacatatagagcacctgcgccaatgctgttgcgggacagcccgtcacagcccgcagaggctcacggcgtacctgggtgcaggcagcgtcgttgtaggtggttaccatcgggcactcagcgttgtaaggatccatctggtcccacaggctcgttgtggtcttggcaataggctcgcccagattggcaatggtacgttggggcgacgtcaggttatatttctgcagcagctctatctcgtcgatatagtggtgaagccacgagcgcatgttttcaggcatctggctctcatcgtagacaccgctctccacatagcccaatatagagggcgcacagtcgtcgccgctgacaatgacataaccgtcggaaccctcagacactacatatacataggggttgccgttgctgttcgtggcattgaacaccacgtccgtcttcatcactggagctgaaatggctcctgacctggttgccggtctcttttcttccaaccacttttccgcaatccggcgggcctctcccttggtgatgggggcggcgctgatggtcatactacagagactaactgctaatgcaagaagtactaactttttcataattgtcttttcttttttttattatacctttaatttttttcttcggcaaaggtacgtcgcttttctttcctacaacgaaaagtggcatttttcttcgcagatttgttgcgacagtggtccgtcagtgcgacaatagcgtgacgccccctctgaatttgtcgcactgagaggtaaaaacatgtctttgtctcgcgatgtgtccctgtctgccatagatttaccagtcaatgacgatgactatccaaattaaaagaccttcactgctcgccctttggactctttcccaagaaatatgtaaggatacttacaaatataacgagaatattatatgcagtttaagagtaaagttataatattatatcagacattaggtggcgaagatatctatctcaacgtggagaagcaaggtagcaatcgtttggcagataatgtccttgaggcactctctttgatgatagcttagggttgaacggatgagaaagacatgatggtgaaagaagcggtgaacctcattaagtagctgaatgcattggtagtcatgggaagaaaccatcaggagttagaatgtgagtttggcttagtctgcagccaaagtaacgtttgtgatttacatagtagaatctatgtgtaagttcttatatgtttcgattaaaaagggttaagaatttgtgtttcaatagaaataaatgtcctattctccaaaatctttgttatatttgcaatcaaatgcacaaaggagaaagatagtccaacaatatcaaaaaggaaactcccacggcagtcgcgggagtaatacttcggcttaatagccttgttgtgaaaagtctttcacttgtatctgcgtgcaaaattataaagaaataacgaaataaccaaaaatacagataagaaaatgaaagagaaagttgttggcattgatttaggaacaagttctttgggaatctccgtgcgtaatctgtctttaggcgaaagtcttgaaaaacaactggaatggttctctgttaccacattcgaatcagggacaagctctgaccaaacaggagagcatacccttgctgctgacagacgatctcatgttcagagtagacgcttgaaagagcatagccgatggaaacgttggtccacactgtctcttctcattgattacaatatgtgtccgatgagtcgccaatcattggaacgatggtgtacctacgataaatccagagggctgaaacgagaattcccagtggatgacaatgcttttatgcgctggcttcgtatggattttgatggtgatgggaaatcagaccttaccgcctttcaacttagaagaaaaatggtagaggagcaatttgacttcaccaaacctatcaatcgctataagttgggcagggccatatatcacatagcccagcaccgtggttttaagagcagtaagggcgagacactatctggacaagaagaggatgtcaaagatgtgcaagtcaatgctgataatctggaagaaaccatgaagaaatcggaagagagaaaatcaaaagatctttctgaatatatggcaaagcatggcttcaagaccgttggacaggctttcgcgtctctggaagatgccggaatacgagttcgcaacagcagatatcaagctgttcgctcgcagaacgtggcagaagttgacgaatactttcattttcaagaaggacttagagaatatgaagacctccacaagcgccttgtcagtacaaaaaagggagaaggtacgctcttttataagttgccccttcgttcgcaaaagggacacattggcaaatgcacattcgagaagaacaagcgacgctgtccaatatctcatccagaatatgaaaaatatcgagcctggggattcatcaacaatatcaagtatagagaaagtgcaaacgactgttggcaagaactgcctttggaattgaaaaagctactgtatcagaaagtgtttacggcatatgtccgcaaagactttccgtttgagaagattcgtgagtttttggagaaacagttgggaatgacctttaagaacgttgaaggcacaaagaccattaactacaaggataaaacgttggtagctggttgtcctgttactgcgagactgcaaaatatcgctgccattcttaacaccaatatagaacaattgcatctgcaaagcactaagacaagattgtcgcactcagtaaagaatactgagaagcacgcagtaacatataatgctgaagacctttggcatttctgttttgaagcagacgaaatagaagatgtgaaaagatttgcccgaagttctttaggctgggaagatatggctactgatgccctttgcaaattatgggcctcgatagagcagggctatgcaccattgagtttgaaagcactgaaaaatatcaaccgtatgttagaatatgggctgaaaacgtctgatgctatattcttagcgaaggtgcctgacatcgcaggcattgaagaaagctctatacctcagttgattgaactgtatgaaaaagatgtaaaagcacccgtagatagaagtcttcgcattggtcgtatcgtcaacacacttatctcaaagtataagtcactggccccacgcgaccgttttgccgaccatgatttcggttatcagttacaagatgacgacaaggatgatgttgtacaatgtataatggacaacgacagcctcttcgcactgatggatgcaggggaacaacaacagatgataaacgaagtgacacgtctgtaccaatcgttctttgctgacattcatcgtgattatgtcaagactccaaagtttgctaacacactcgcagagaaattaaaagaaaagttccctgctgtagatgaaagcaaatggaagctactctatcacccatcgatggtttctgacttccctcgtaacaaggaggatgaaggactacttggttctccgagaattggtgccatacgaaatcctacggttcttcgcgctctcaatgtgctacgcaagacactcaacacgatgattgtcgacggacttatagaccctcaggaaactcgtcttgttgtagagaccacaagagtgaacaatgacatcaacaagcgatgggcgattgaaaaatacaacaacgaaagaagagacgccaacaaagctatctggaacatcctaaaggagtattatcccgacaagaatataaaagacgaagatgtggatgctgcaagatacgtcttggaacagagcggtgaagacctctttacggatgacaatccagacgatctgcattatcgtaaccagttaaagagatacaaactatggttagaacagggatgctgttgtctgtacaccgagcatgatatcagtcttagcaacatgttttctgagaactattgtgacctggagcatactatacccagaagcctctctttcgacagttctgacaagaacctcaccatttgcgatgcttattacaatcgtcacattaagcagaacagaatacctacgcagttgcctaactatgagcatgatgtcactatagacggacaggtttatacagccatcaagccaagattgaagaactgggaggagaaagtagagagattgagtcagaacgtattgttttggaaaagcagagcacgtcgtgcacagacagaagacagtaagaatgcctgcatccgacaaaagttattgtggcaaatggaattggactattggcgacagaaactataccgttttaagatgaagccagagaatctgacagacggtttccgtaacagtcaattggtggatacaggcatcatcacacgttatgctgtgctttatctgaagacattgttcagtagtgttgacgtgcaaaacggacagtcgacctctgctttccgaaagattttcggtattccccagaaagacagatcgtcgaactatcatcatgccgttgatgctactatcctgaccatgatacctcagtcggccaaacgtgacaggatgcttaagttgttctaccagatagacgaattgaaaagagactgtcatgatgtttctggacttcaattccaactcaacaaggaaattgaggattgtgatttgggaagaggacttgcaggtatagatgacttcattgccagacaagtgatggtggacttttacaagcaagaccgtacgcttcagaaaaacgtaagaccggtcattaggaaaggtaaaccactgatgaaaaagacagcagctggaaagttagaaccagtgacattctgtagtgacagcattcgcggagagttgcacaaacaaacattctttggagctataagacgacgtgaagatcaaaaaactctattcgtagtcagagaacccctgaaatacaaaacgtcaaataaagacagtggtttcaaagactggaaagaattgaacgacagactggtggacttgaatttcaaagacaagagttccgaccttaaacctatggtgaaaatgatgatgaatcaatttcgcaagggaacctcattcaaggaagcttgtgagcaaggcatctacatgcttgacaaagatggaaggaaggttaacagaatccgccacataagatgctatggcaaaaacgtgacgaaccccatgagggtgaaacgacatacatatccttcagacaaagaatataagcaatatgtttgggcggctcttgctgacggcagtgtatatgcactttgcgaatatgtgaatggcagcagcaaagtctataagagatacacctatatggatatctcagaaaacagaaaagtgggggtggaggatatccccgtctgtcttacagataagaaaggtaagcggtttaacttgcgaagaaagatatgcaaaggcgatatgctgctcatttataaagatgcccctgaggaactactgcatttggatagtactgatttgtcaaagcgattatataaggtgcagagctttgaacggaagaacgatatcattttgcggcatcatctgctttccactgctaagacgaacagtgaagacggaaaagagagaataagagataggggtgaatcgataaagagtttcacgaagcttcctaatatcatccgtagttctatcacctctttcaaatttctgcaaaaggatgtagattacgtgttcaacaaagaaggattactattaataacgatatagcaaaaaagaaaggccaattccacttcgataaaaggaattggcctttagcatacagccattttcttttcctaaattgctttataacatactcatcttcaatcaactacagatatcgtaatgtgtatgctatgtttagatacaagtttgaaagcaaatcacaacctatcgtctatgaaaaagaatcatcggcgtaatgtgtatgctatgtttagatacaagtttgaaagcaaatcacaaccgctgtttctcagccgctgctgatagttgaatgtgtatgctatgtttagatacaagtttgaaagcaaatcacaacgcggcaatcgccgtcgagcctgaatagacaatgtgtatgctatgtttagatacaagtttgaaagcaaatcacaaccctgaagcatcagttgctggccgaatgcgtaatgtgtatgctatgtttagatnnnnnnnnnnnnnnnnnnnnnnnnnnnnnnnnnnnnnnnnnnnnnnnnnnnnnnnnnnnnnnnnnnnnnnnntttgaaagcaaatcacaacctccgcgggtttttcttgcagccgccccgtaatgtgtatgctatgtttagatacaagtttgaaagcaaatcacaacaaaagtacggagtcaccgagcagagtatggaatgtgtatgctatgtttagatacaattttgaatgtaacccaggaagtcaaagaactccgttgcaaatttacgaataaaagggatgtaaacaaaaggtttctgataatttaacgaagtctttatttcttttttttgtaaaacgataagttttcagtaataatttgtaaatgtgcaacaatactacgatttagccttctttgagggcaaaccatcgattaacgcttataatttgcgatgccccaaatagatataagatactgggatgaacttggtaaagcctcgaaggtcatatccgaattgggatatgtgtcagaagaatcaatgtgtttagtttgccttctgctactaataagcggattcaatgagtatatgagggaatgcctgaacaaacgttctagaaagaatcataggtctggctgatgttcaagaaatggctgaaatcgcatacggtccgacaggggagtatgcgatttttgtatgatgttcttttcatgaggtaacaaactctccgtgcagggaaaagaaatcagcaggggaagatacaacctattaatataatgtgtatctttgtgggggaatagatgcatgaaaggatcatttataaacactatcataaccatgagaaaagaactgaagacaatgctgatggccttggcagctctgctctgcccggcaacgatgacagcgcagaagacctccaccgtctgcaacgccgacggcaccgtgacgttcagatacaagaacgaccatgcccgcgaggtgatggtcgacgtgcagtttgccggacggcagcccatgacgcgcgatgccgcgaccggactgtggacagccacgctgggacctgctgcccccgacatgtatccctactgcttcgtcgtcgacggcgtgagcgtggcggatcccctctgcgaacagtatttccccaacgaggggttcaagaacagcctcctcgagattcccgccagagcgggacacctgccccacgacatccgtagcgtgccccacggtcggctggagtacatccactactattcgcagagcctccacgccacgaacaacgccgtggtctacctgccgccaagctatatgacagagcgcgaaagaaagttccccgtgttctacctcatcagcggaacgactgacaccgaggaggtgtattacaaggtggggcgcgtgaactatatcctcgacaacctgcttgctggcaatgccgcggaggagatgatcgtggtgctgccctacggcaaccccttcaagctgctgcccttcacgccgtccatgggcatgatgccgcagatgaacttcggcggcgacgtgttcagcaacgacctcgtgaacgaccttatgccctatatcgaggcgaaataccgcaccatcaacgaccgtgaccacagagccatcggcggattctcgcggggcggcaaccagggactgatgaacgggctgacccatctcgacctgttctcgtatctatgttcctacagttcgttcacctcgaccgatattcccggcgtctacgacaatgctgccgacaccaacggcaagctgcacctgttctggctcggcgtgggaaccgacgacttcctctatgggacggcgcgcgactacatggagtttctcgacaagaaaggcattcgcacggtgaaagtgttcaccaacgacaagtatggtcacacgtggatgaacgccaaatatttcctcggcaagacgctccccctgctcttccggcctgaagccgctgagcgtgcgatggcaaagggcgtgcctgcacccgcagccacgggcaatgagcctgccttcacgccgggtgtcatggcgcgcatgttccccgttcctatcatctctcccgagtacgggcgcgatgccatcaccttccgtttcaaggctccacaggctaagcaggtgatgctgcagacagaactggccgaccaaccgatagcgatggagcgcgacacggcaggcgtctggagcgtcagtctgaccgacaatgtcttcgagacctttgaatacagcttcctcgtcgatggcactcaggtggccgaccctaacaacatgtacctctcgccgtgccgcggattcaagcccagcatcgcttcccatcccttcggaccatacagcatggccgtcatgggcgacgtgaagcacggtccgacaggctacgacgtggaacagcaggaggcgtggtacatcgcgccgatgccccatcggggcgcacggccggtgttcgtgcagctggtccccggcaagaaccacaccatggagagctggttcaaggtgggtggagcgaacgccattgccgacaagctgacggccgaccacaagacggcaccctgcatcctgacaaccagtaagctggactttttacgcaacggcaacggtccgcatcctgatttcaaaatcataaccctgcgcgccgacgactatcctacgtgggctgcgcggcggaaagcattggagaaagtgttgttggaactcaagaagtgagaccgtctacgaccgcagttgcagtcggatgtagctgcggtcgtcgaacgaacatcggccgttcatcatccctttcgtggccttgaagcgatggatgcagagcgggtcgtcgcggagcaggctggccaacgcctcttcactttgggccagcgtgggtttgaggaaggggtagccgtcggtggccagcacgagttcgcgggcttggccgacgtcgatgacgcgcaccttgtcggtgggaatggggaaaccgtcgatgacggcgaatgtttggttttggtattggcagctatcgatgagcacgggtaggatgaagttgcgcccgtcgtcgtgctcctgaaagtcggcgatggctcgtccttgctgcagttgcagacggatgtaggcactgcgcatctcggcaatgagttcttcgtagggtttcggattctcatacagccgaccgtcgaccatacactgacagtcgccgacgagccacacctcctgttgtgtgcgactatagatggcggcgctggcagccatgcgctcggtggggtgttgggcaagtctgtgcatgtcggcctccgaacggacgtaggcagcacgcacggcatcggttgcctgctggcagaacagctgactgtcggcatcggctgccagctgtctgatgcagtccacgacgagcgtcatgcagtaacggccgttgctcatctgccgatggaggcgaaaagggctcttgctggtgctcccgtcgacgacggccacgaagtcttcttcgacgatgattccgtcttcgcagctttcagcaccagcttttcccgtaatccttttctcgatgaggttcatttttttagttgacaagttgacgagttgacaagttgacgagttaacaagttgacgagttgacaagttgacgagttgacaagttaacaagttgaagttgcttgcaagaaactgtgcagactatttcacactcgagatgcgcttctcgtagaactgccggaaatcagtccatttgtagtagggaaagcagtcggttgccatgggcagacgggcttccttgccgttgagcaggcacttcacgaggatgtcggcagacttcttccctttgtagaagatgagctggatgttcgaagccttgcacgtctgccagttctggtagcagtctttcacctcgtagggatcctcagggtcgcggtcggcaccgttgatgcccatgagcacggtgagcggtccgatgcaggtgtcgtgaccgaagcgcaggtcggccacacgctgtctgttacccgagatgacggcatcagccttgccgatgatgtcttgcaggatgggaatcatctcgtattgcggcccgaacacccacgagtaggatcccaggttcgactgttcccactggttgatgatttcgtcgtcggtgatgatgttacccatcattccctcgtgaccgatgttgggcagcgaagtatacaggttgataaggttgcttccgatgtggtgcaggttgccgggcagaccctcggtgctggtgaagacgcgactgatgacgcggtcgcgcagcgtgtcgtcgctcttgaagcggtcgcggtttttctcaaagcgtggcttcactcttggatagcggtgcttcacggggttctggcggtcggtggggacaacgccgtcgagggtgaatcgcgacgactgttcgcgaatctctatcttcggattgcattgtaccagctcctgacagaaggccgacatgctgagcacgcagcgccccgagagcgacgcgatggcgagcacgttgccccctttcttgaacacatcggtgaagttgttgtacatgatgcgggcgatgcgctggtgctgttcccatcccagctgcgtcagttcgctcacgccggtggccagttcctgcttggcagccatgaacttggtgtagaaggcctcgccctctgccgtcagctgatgtcggtcgtgagccttggtgagcagtgtgtcgagctctttgtagagctggtcgttccaatagtagcgcgagccgtggcgcgaatagtggctgatgtagaagggtttgtagccgcgcggtgcctttgtcagctgcgcgttgtcgaagggataggggcagtcgttgccgtaggatttcttggggttctccctcagttgatcgtaggcattgcctccctgtgcccatgccatcatggttgtcaatgccatgacgagggcaaatacggttcttttcagttgatggtccataggtcttcaattgataataaggattttgttttctcgaagggtgcgtggtgcaacctatttagaggattgcaggaagcgttcggcacggagcgccatgttctcgcgaagctggtcgcggtagagccatatctcgcgcgaatggtagttgccttccttcccgatgaggggcaatatgtagtcggtggcgctgtagccgctcacgatgagcaggttggtggcggtgtcgaggctcacggtcattgtgtctttcgtctgttcgccgacgggcagtaggggtgacggttcggtgatgagggtagccggctggccgtcggtgcgccagttgacggggttgatgcccaccgtgctgttgggccatagtgcgcaggtcgtgtcgcgcacggagttataggagacgatgacgcccgtgtcgtcggctccctgtgcagctttgaagtgcttgtcgccggcggaagcctgttcgggaatgctgatgccgatggcgtaagctgcaatcatgcggctgcgtgtggcgtcgtccatgtcgcgtagcagcgacagcaggatggcagcaccctggctgaagcctgcgaggatgaacgggcgtcctccgttctggtgctgcagatagtggtcgaatgccttcctgacgtcggccgtagccacctgcatgcgggcctgtccggtgctgtcgttctcaaacgactgcagcgagcattggcggtagtagggtgcaaagaagttcagcttgccgctgacgagcgtgtccacacccaccatctcgccgcgcaggggctggcgcagactgtcggcgtaggtgtcggcatagtggcagatggtgccgtcggcgagggggtagtcgcccgtttctgtcgatatgatatagaagatgtcggcctgtgcacccttgtcgtctatgtaccattgcttctcgtcggcatagtcaggttcggcgggcagcacgtcgtcggtcgtgttgccgtcggttccttgggtcttgcagcctgctgcgacgaggcatagcagcactgccagcgataagcttgtccttttcattcctttcattttccttttttattagtgttattgaagtctcggaggaacgctggcgcgatggtacgagcgatccgttcaccccttctttctcttgtccaccatgcggtagtcggcatatcggcccttgtcgaaaacgaagatgttgtcgggaatgccgcccgccttgaagttcgagatcttcaccgtggtgtggaagatgcccagcttgacgcggatggcctgtgggtgtcgcgtgcggatgtcgagctgcacgcgcgcttccttgattcccttcacgccacgcttggccttcagcgtaatccagtagtgcctgtcgtcgcgcttgatgctgtagtcgtagttgtcgggcttgaactgaaacttggtggcatacttgtcgcgcttgtcgtcgttcatgtcgaacaccgtcacctccttcttcttccgctcggcgcgccagtaggtggtgccgtcgctgtaggcatcgtatttctcgtcgataaacttactcttcttctccttgtaccagatggtgccctcggtcttgaacacaccgatgatgttcacagagtagtggagcgttgctccttgcttgccgaaaaccatgtcgtacacctgattgaacattctgcgggcctgctgcgcattcgttagcggctgttcttgccgtgcaagcgtcgtggggcagagcggttcatagaccgaaaggccatgccccttacctgccattgtcagcaaaagcagggcaatcagaaatctccatttcaaagacatattgtttctctttacctttctatacggttgcaaaattacacaaaaatcctgacatcagcgccagcagcgccgaaaaaagcgcttttcttcacttcataaccacagtcttcaatatttttcagtaattttgcaacccgaaaagaatcatccccaactatgaatgatgaactatgaactgtgaactatgaactatgaactcctcctggggcccctgcttggcggagccatcggttacatcaccaatgatatcgccatccgcatgatgttcaggccccatcagccgaagtacgtctttggcatgcgcattcccttcactcccggcatcatccccaaggagcgcgggcgcatagccgaggccgtgggaagctccatcagcgagaacctcatcaaccgcgaagtgctggagaagaacctcctctcgcccgagatgatgagcaagattggtggcggctacgaccgtttcgtggcccggcagaaggtgaacggcgagtcgttgcgctcgctactgtgccattatctgcccgccaaggatttgcgtaccattcaggacgacagcagcacagagctggccacgctcatccataaccgtctggccgattccgacatgggtgatcggctcgcccacgctgccgtgacccatgccatcggcaagatggaaaacagcctgttgggcatagcttttaacgccgaccagtttgtcagactgctggccgagcctgctgagcacctgctggccaagcacatcaaccagatgatcagctccaactcggaggaaatcatacgcaacctggtgagccgtgagggcgatacactgctcgacacccctgtctgtcagttgctgcaggggcacgacgagcagctggcacagctccgtcatcttcttctcgacggctattccaacatcatcaccacccatctgcccaagatcctatccaccattgacatcagccgcatcgtacgcgaccgcatcaacgacatggatatggacgaggccgaaggcatcatcctcgctgtcgtcagcaaggaactgcgcgccatcgtatggctcggtgcactcctcggagccatcatcggcaccgtcaacagtttcttttagaagccttctccatgtctcttcgcgacttcgacttcgtgaccagccacacaccgccgaacaccaggacgacggccagggcgtgggtggcctttagcacgccgattcccatgagcagcgaggcccctacggagacgatgggctggacgtagttgtagaccgagacgaccgtcgggcgcagcgtgcgctggccgatcatcgtcaggatgtagcacacgaaggtgccgatgcacaccacgtaggcaatctcccaccacgtctttgcaggaatgggcgccgacagcacctcgctcacatgcgtcagcgtgaacggcaggagcagcaacgtagcccacgaaaacatgtacttgttgatggtgaatacgttgtagcggcggatgagcgggttgaagagcgataggtagagcgcaaacgagaactgtgcgaacaggcagagcaggtcgccgcggatgtcgcccaccttgccgtcggcatgggcggcagaggtgagaatgaggatcagggctcccgagcagcccatcatcacccctaaagccttcttgccggtgatgggctccttcaggatcagcgccgacagcagcatggcgaagatgggcatcgaggtggtgacgatgctcgcattgatgggcgacgtgatgcttagccctagcgtgtagcagcactggttgagcaacagaccgaagacggcggccccgatgaacatcagtttgtccttcagcggaacatgttccgtgccgtcgtttcccttgccacgcagcaaggcggtgaggcggatggccatcgaggccagccagaacagcaggcaggcgcccgccacgcggaacgtcaccatcgtcagaccgtcgatgccgtgcgtcatggcatcctttcccaccggagccatcagtccccaaccggcgcaggctccgaacatcgcgaggtgggctattagcggacggttgccgccattctccttatttgtttgtatcatgcagtgataatcgggtgtgataatctttttacctttttctataaacaatgctaataatgggtgcaaaattactcaaaaacaaacgaaattgcgtaactttgcatacctatttaatagtatttagcgatgagagacaagaatcgtgtcatccgtcagctgtcgttcgccaccgtcccgacagcaaccgacggctttgcacccagcgcggcaacaagactcatgcatgtgttcaaggccgcgagcatcatgcgaacttcgggaaacgccaggcagtggtgtaacggctttctgctggcaggcgtggcgctggtggctgtgacgtggctgacagcctgtggcaacaaacgtgccgatgggggcagcaacgttcagaatgtggcggcaaccgtcgactctgccacgatggtgagaccctcgtatgcgacgggtttcaaggtgacttatcttgagaacggcgtgcgcttggtcgacatcaccgctcccgaaggcggaaaacggaaagggaaggacgtcaggaagccggcgatgaaggagaagaatgggccaggggaggccgaaagcggtgcgctgggctaccgtttcgccttggtgccgcgcggaacgaaggccgacgtgcccgagggttacgcatcggtggaggtgcccatcaagagcaccatctgcatgacggccctgcagttgtcgaacttcaccatcctcgatgcgcacgacttcgttggcggcatcaccggcacgaagaacctcttcaacaccgacatccggaagcgcgtgaaagacgggcgcatcgttaagataggcatggagggcaacttcgac

SEQ ID NO: 935 - DNA, 24236 bp, synthetic construct
  source 1..24236: mol_type = other DNA
  misc_feature 1..24236: note = Synthetic
gtgaggcacggcgaactgctgtatgacgggaggaaacgcttcttggaagagtttctgcctctgttcaacgagtactactcgtggattagcaacagcggggagaaggcgacggtggaatatgtgagcaatgccgaagtgccgctgcagcaacagctgaccgaagcacgccgcaatgacaggtatgcccaatacaccaccgtggggccgcacaaggacgatgtgacgttgggaatagacgactatccggtgaagaaattcgggtcgcagggacaacagaagacctttttgctggcgctgaagctgggacaatttgaatatatctatcaaaggagcggagtgaaaccgatactgctgcttgacgatatattcgacaagttggatatggtgagggtgaaacagttggtgcacctggtggggagcgagcggtttggtcaggtgtttctgaccgatacacagcccggaagggtggaggatatctttgccgagataccccatgtggagcatcggatattcgaggtgacgtgcggaaaattggaactgaaacaggaaggaacaaatgtatagtaacgaacatacattgcaggatttgctgaagcaggccttccaccgtctggatatggacgacacggcaaatgagattgatgtgaaatatgcctaccgtcaagtggctggcaatttgataaatcaactcacgtggtcgattcagttcaaggacggggtgctgaggctcggtatcgcgtcgccggcgttgcgcgacgagttgtggatgagacgcgaagggttgacaaagtcgataaatcacacactggggcgcaatgcggtgaaaaagatagtgctattcacaagaggggatatggccatgagtggcaaacaatgatgtatgaataaacaattaagaagagaatgaaacagatattaaaggcattgaacatgatacggctttgcgacgcgaagtcgttctggctgcgtataatatatgtggtgatactgaatgcattgccgttgctgaacctttatatactgaagttccttgtggattcggtgaccgaggggaatgtggccgtgataatgggggtgcagatggatgtgtacaccactttgggactgttctgtgccatctttctgctgaaccgctttgtcggggtgctgaacagtgtgaacaacgacataatgcagcagcggctgatagactatattagtgagcggatgcagcaccagtcggcacgcttggatatgtcgtatttcgacaatcccgcctatcacgacacttatcacagggcccagcaggaggcttcgtaccgtcctattcagatattgaacgggttcatgggacttctggggtcgctgattacgattaccggtatcgtgatgatgcttgccacagcttcaggctggattatcgtggtgatggtggcggcagtggtgccctcgtttattgtgaggataatcaaatcgagacagatatatgctttcaggcgcaacaatacccagaactatcgtcgcactagttattatacttcactgcttggcggacgtgactttgccaaggagatgcgcacgttcggcttggctccgttcttccgcaaacggtttgtggacatccgcaaagcgttggtgacagatttggtgcgtatatcccgtcggttgggggtgtacgactcgatatgtgccattgtggagactgcggcattgttctttgtgaccatgtttttgataatgagtgccgttaacggctctatcaccgtgggttcgttcgtcatgctgttcgaggctttccgtcgcgggcagtcgcagctgaccagcttggtgagcagtatcacggggttgtacgacaaccgtctgtttataggtaacctgttcgagttcctcgatttggagcctaccattttgtctcccaaagatgcaaagcctttcccgaaacatgtgtcgagtgtggaattcagggatatcactttccgctatcctaaaatggaacgcgatgtgctgagccactttaacctaacggcgcgcgctggtgaggtgacgcagatagagggcgagaacggctttggtaaaaccacgttgctgaaactgttgctccgactgtacgacaccgaccaaggggcagtgctgatagacggggtggacgtgagagagtacgaccttaagggattgaggcacggcattggtgccatattccaggattatgtgcggttctattgtacggcggaggagaatattgcctttggcgatatagagaactacgatcacgatagggttttgtacgctgccgagttggcgggagtggacaaatacatcaacaagttgcccaagggattcgatacccctcttgggcgaatgttcgacgacggcgaggaactgagcatgggtcagtggcagcgcattgcgttagcccgtcagctctatagcgacgccccggtgctgatatttgacgagcctaccgcctggatggatgtgccgtcgcgcgacaagttttacaaaacacttgaaatgctgaaggaacagcggaaggtgattatcttgattaagcatgtatagtgtggacagactcaatgaattatacgaaacaataaaaaccagaattgatatatgttgcattttgaattatcagaaatagcacccaaagaatttgaagggaatgtgatattcctttatgggaacgatgtctcggacaggaagctgccgttgaccaagaaagaactggactacttgaagagtcatagtgagaacgaccccgaggcggttgtggtgttcgaccgtttgccctatcatctctatgttgtatgttttgacggcgagaagcccgcacaggtatcgcaggagcatcttcgcaagaatgccgccaaggtggtggatatgatcaagaaagagtgtttgggtgaggaatgctgcgacactgctctgaccggcgagggcgtgattcccgaagagattgtggctttcatggaaggtatgtggctggccgattacagctttgaccgctacaagaccaaagagcccaaacatgtgggcaaggtgtatgtggagtcgaatttcctcagcaaggaggatttggacagcaacgtgcgtctgtggaaccgcatttattggtgccgcgagtgggtgaatatgcctgtggctgatttcaacgccgagaagtttgcctcggagcttgacgatatagctaaagacctcaaggtggactgcaccgtattcgacaagaaaaagatagaggagttgggtatgggcggtttgcttgccgtgaatcagggcagcgtcgacgagcctcgttttgtggtgatggagtataagccccgccacgctgtgaacaccaaaccgctcgccctggtgggcaagggtgtgatgtacgacaccggcggactgaatatcaagacaggcgactatatgtcggagatgaagtcggatatggcgggagccgctactatggcttcggtgctttttgccgccgccgagaatgagttgccggtgcatgtggttgccttgctgccgcttaccgacagccgtccgggattcaatgcctatgctcccgacgacgttctgaccatgtatgacggcaccactgttgaggtagtgaataccgatgccgagggccgtctgatattggccgacgccattgcctatgcggttcgcaactatagccccgagctggtggttgatgccgccactctcaccggtgcagctgtgcgggccattggcacctatggcattgccgccatgcagcaacacgccgaaaaccccttccagctgctgcgtatcatcggtgaacaggtgcacgaaagggtggtggaattccccttctgggacgactacgacgagcatgtgaagtcggacttcgccgacttgaagaactgtggccccggacaggctggcactatcactgcgggtaagttcttggcccactttgctaaagaaaccccttatatccatctcgacatcgccggtgtggcctatttcagcaaaaaacaatggtattatgccccgggcgcgtcgggattcggcatccggctgctctatgcctttatccaaatgtacgaaggcgcctccaaaggcaaaatgtgacacgatgaacattcaaggttggtgaggctcgcataacccgaagcgcttttcggccatcatgattaacagcctcatcaacagacataatacatattaactttttattcattttagatattgatatggaagagaaaagaaacaatccccgtgtgcgtttggccatcacgcagggcgatataaacggagtaggttatgaagtgatactcaaaacattcagcgacaaccgcatgttcgacgtatgcactcccgtgctatatggttccaccaaggtggcctcctatcacaagaaactccttgcccttcatcaggacatcaccttcaacggtatacatgacgccagtgaggcggtggaccgtaagttcaatgtggtgaatctgaccaacgaagagattaagattgatatgggaaaactgaccgatgtggccggtgcccagtcccgcctgtcgctgaaccgcgcctgcgaggatttgaagaaaggtctggtcgatgttctggtcacagcccccatcagcaagaagaatatccagtcggaggactttgacttccccggccataccgagtacctttcccaccagttcggctgcagcagccttatgattatggtgtgcgaccgtatccgcataggcattgtcaccaaccacttggccctcaaagatgtgcccaacgccatcacccacaatctgctcttcgacaagattatgcttatgaacgagtcgctcaagcgcgacttcggtgtcccgatgcccaagattgcagtactggccctcgaccctcatgccggcgacaacggtgtggtgggaactcaggacaacaccgtaatcaaaccggtgatagaagaggtgcagaacaaaggcgttttggcctatggcccttatccctccgatggtttctttggcagcagcgagttcaataagttcgacggcgtgctggcactctatcacgaccagggtcttattcctttcaaactcatgtcgttcaccgagggtgtcaactacactgccggcctgccctatgtgcgcacctctcccgcccacggcaccgctttcgacatcgcaggcaaggacaaggccagcgaacagtcgttccgcagtgctgtgttcctggcttgcaacattctgcgcaacaggaaagagtatgacgagctcaccgccgaccctctgcgataagtcccctctgcatgtcggaaaaacaattgatattctaacgatacgaatggccaatgaagaagctggttctttttgacgggatggcgatggtctaccgttcctattatgccttgaacggctcggggcggatgaattccaaagggctgaacacctcggcggtactgggtttcaccaacactttatatgacttgctcaaaaagttgaaacccacccacgtggctgttgctttcgatgttccgaaacccactttcaggcacgagatgtacaccgaatacaaagccaaccgtgaagcgatgcctgaggccatacaggtggggctgccctatatccgtagcatcctacaggccttccgtattccggtgctgacctgcgaggggttcgaggccgacgacatcataggcaccacctcccactgggccgacgagaatggctacgacgaggtcataatggtcacccccgacaaggatttcgggcaactggtaacctcccgcgtccacatgtacaggttcggccgtatgggtcgccccgacgagattatgggcgtggaggagatttgcaacaagttcggcgtgtcgtcgcctgctcaggtgaaagacctcctgggcctctggggcgacagttcggacaacatccccggcattcccggcgtgggcgagaaaacggccaagaaactgattgaccaattcggctccgtcgaggaaatggtgcagcgttccgacgagataaagaacgacaagattcgcaacctggtgaaggagtatggcgagcaggcccttttcagcaagaaactggccaccattgtgctcgatgcccccgttgagttgagcgacgagcaactggaggtgaaaaagcccgactatgccgctgtgcagtccctttttgccgagttggaattccgcacattggccaaaagggtgtttaccgacctctcggtcaacgacccttccgaagctcagcgttttgcagcttccaaacccgctgcggcttcggccaagcgtacttcaaagtcggctgacacccagccccagcagcccaccctcttcgaccaacccaccctgttcgagcaggcgcatatcgacgactcccgtgccaccgaaatacacaggatggacattttccccgaccacggcgatgttgccgtctatgtctccggtgccaccatcgtgctggcattcaatgccgatgacgtgtattcttcgcttgtgggcgacatcgatgtggcccgtctgcgcaaactgctggaggacgaaagcagtctgaaactgtgccacgacctgaaagctttgaagtatattctcaaagagttgggtataagtttgaaggggcaggtgttcgatgtccagttggcgcactatctgattgatgccgaagcccgtcacgggctggacagcatctctatgtcggtgttgggcagcgagcccgccaacgagttggagtcggccgccgttctctggcagctctatccgctcatggctgcacaaatgtccgattccggcctcaaccacctctacagcgatgtggaactgccgctggtcgatgtgcttatcagcatggaggaggaaggcgtgcgaatcgatgtcgacgctttgaaggactattcgcgccgcctgtccgaggaacgtgacgggatagagaaatccatcttcgagctggcgggaggtcagttcaacatctcttcgcccaaacagttgggcgaggtgctgtacgaacgcctcaaaatcaccgacaagccgccccgcaccgccaccaaacagtattccaccgccgaggacgtactgctcaagctcaaggataaacaccccatcatcgggatgatattggagtatcgctcgctcaccaaactcatcggcacctatctcgacagtttccccaagctgatcgaccctgtgactcaacgcctgcacaccgtctacaaccagactgtcaccgccacaggccgcctctcgagcagcaaccctaacctgcagaatatccccatccgcaccgagcgtggccgtgagatacgcaaagcctttgtggccagggataaagactacatcctgctggccgccgactactcgcagatcgaattgcgcatcatcgcctctctggccaacgaccgccacatgatcgaggctttcgccaaccactacgacattcacgccgccaccgctgccaagatatacaagatacccatcgaggaggtgtcaaaagacctcaggcgtaacgccaagtcggtgaacttcggcatcgtctacggcatcagctccttcggactgagcgagcagctgggcatccctcgcaaggaggccgccaccctgatcgaggagtatttcaaccaatatcccgacatcaaaaactatatcgacaagaacattgcctttgcccacgagcacggctatgcccaaaccctcctgggccgccgccgctatctggccgacatcaactcgcgcaatgcctcggcacgcacctttgccgagcgcaatgccgtgaatatgcccatccagggcacctcggccgacatgataaagattgcaatgaacactatttacagcaaattccaacagctcaacctcaagtcgaaaatgattctccaggtacacgacgaattggtgttcgactgctacaagcccgaggagcaacaggtgcgcgccattgtggaggacgctatggtcaacgccctgcccctctccattccggtcgaagtgggcatagatgtgggcgacaattggctcgaggcacactaaactatcgttttttacgttatacatcaagaaacaaaattaaaaatagtacaataatgaaaaaagtattctccttctgtctgttagtcgtggcatcgatgggcatgctcttcgcgcagtccgatgtcaaggcggatttttcgtctgtcgccacctcgggacaggtgttatattacaaaattattgattatggcgaggtgcatgtgtggccccacagcgacaaccccgagcttctgggcggttacatcaagattccccgcacggtgaagttcgaggggcagaactatattgttaccggcatcggcgacaatgcttttgccttctgcatccgcatccagggcatcgagctgcccaccaccatgttcttcatcggcgaccgtgctttcttccattgcaccgacctccgcgtgattcaaatgcccaaaacccttaccactatcggcgaaagtgctttcgagggctgcacctcgctaatcgatgtagttatgcccaattccgtgatagagatgggtgccaatgtcttcaaggattgcgacaatgtgcgccattttgtcatctcgcagggactgaccgaaatacccgaaggagcttttatgaactgcaagtcggtgaccgactatttcatccctgcctcggtcactgcattgggatgcaacgctttcgatggctatgtgaacctcaaaactgtcactttcttcggcaatatcccccccgaacccgaatgcgagcccgcctttggccgcgaaatccccatctatgtgaaatcccaggccttcgaccaatacaaagcctcctaccattgggggcaatatgcaatcaaggcaatgtgatatttttcctaatcgacaactttttttgccggaccatgaacccctcttcatggcccggtttttattttattagtgtctgatatacgtgctgaaagcacgtaatcctattaaccccacacgaagcaaagtgccgtgtggggttgggatagacactcttattctgcgtgcaggaggcacgctacattgttgattgatatgttgtagcgtatctccgacacgcatagggatggcctctgttaccccacactgaacgccttcggtgtttagtgtggggttaataggattgtgtgcatcctgcacacttaagccctcgttatacaaatacatgacatatattctttcttttgtattacttactatcttccttcccgctttgttacccttttactatcatctaactacttgataaaatgttctttacccattgggttaagaagagctcaagaaggggtgaggaagagcttaagactatgcgaagtggcggcaaactgagatttgaattgtgatgaaagacggatggagtcttggggtctgcaaatgatagaggggagagcattctgttgcagttgctacagttgctatagttagattcttggcttatgcataggctcgacccggacggaatgagactggcgaagtggatgaaaaaagaagtgtagcaactgtagcaattgtgacgcccccaagatagagcgttgagagataggacgctatacgtccgcacataaccgccggtgccattctgtcgcgatgcgaaaagcgattctcgcatacctcattgctgattgggttcgctgtaggttcggtgtaggtccgcttgcatggcgaagcaaccccgaacccacagtgggcctacagcaaagcaagtgcggccgagcgttggcagcatcaagcatacagggacaaaggaataagcattaataccctattcaacccatcgaagtggagtaacaccccggattgcccaagggcaaaacggcggtaagatagtgatagattgtaaaatacatatatttttgctggtaaaagtgtctatgttagataatttgtgtatatttgcaacacgaaaacgaaagaaatagactataaaaaaagaaaaaactcccacggcagtcgcgggagtaacacttcggcttaatagccttgttgtgaaaagtctttcacatgtatctggctgcaaaattacgaataaaaaatgaattgataagattttttttataaaatgagtagaaaaattttaggaatagatttaggcacaggctctttagggatgtctctccgtaatcctgatttaggtggaaacatacaaaatcagcttgaatatttctcagtcactacctttaattccggtactggaacaagtcaaacaggtgaatatacgcttgcttctgatagaaggtcacacagacaaagccgccgacagaaagaccatagtcgttggaagagatggaatactttggcattattggttgagtatgatatgtgtcctattagtaaggaatcacttgaacgatggagtgtatatgacaagaagagagggttgaaaagagaattccctattgatgacgaaccttttattcaatggctccgtatggactttgatggagatggcatttctgactgtactgcctttcagttaagaagagacttggtagaaaagcagtttgactttactatccctatcaaccgctataagttaggccgtgcaatttatcatatcgctctgcatcgtgggttcaaaagtagcaagggtgagactctctccagtcaggaagaaaatgagaagactgaaacaaatatcgatgcagacaatctggaagttgctatgcagaaatcagagatgtctaagaataaagaccttgtcgagtatatgaacttacatgattttaagacggttggtcaggcctttgcctctttggaggatgagggcgtgagtatacgaggcagtcgttatcaggcagtccgtcaacaaaatattgatgaggtcaacgagtatttcagattccagaaagggctctccatatccaaatatgacgatttgcataagaggcttgtcagcactaaaaagggtgaaggaaccctgttttataaattacccttgcgtcctcaaaaaggcaatattggcaggtgcacgtttgagaaaaacaagcgtcgctgtcctatatcacatcctgaatacgagaaataccgcgcttggagctttattaataatatcaagtacaaagagaaaacaggtggtgtttggctcgaactacccatcgctatcaaacgtgagttgtatcaagaagaattcgtttcaaaggtaaggaaggatttcttttttgaaactatccgaaaagcacttgaaagaaaactcggacttactttgcaaaacacgggcgaatcaaaaaacatcaactacaaggacaagactttagtggctggttgcccagtaacagcaagacttcaaaacatagctaatctctttaataaatcaatagacaatttacattttcaaggtaacaaaaccagaccctctcacaataaccataatggcggaggaaatcacactgtaacttatgatgctcttgacctttggcacttctgtttcgaatcggatgagttagaggacgtgaaacgctttgccacgggttcattaaatttcgaccccaaagctacagactgtctatgtaaaatatggaattccattgaaactggatatacaacacttagcctgaaagctttacagaacatcaaccgttttcttgagtatggtcttattgcttctgatgcaatatttctggccaaaataccagatataaccggggaggaagatgcagaaaagataatcaaattcttctacgagaaagtcaagactcctgttgaaaaaatacaacgtatagatagaattgccaacattcttattgccgattataaatcatttgctctgaatgaacgttttgcagagcatgattttgattacaaactacaaaaagaagacaaacaggttgtcattgattgcataaaaagtaatgacagtgctttcgaactgatggatgctgaggaacaacaaacgatgatagaacaggtaacaaggctttaccaatcattcttttctgacagaaagcgagggtttgtgaatgtgccaacaatagcggaagaacttgtcaaagaactcaaaagtatctatccagaagttaaagaatggaagtggggaaagttatatcatccttcgttggtatcggacttcccccgcgacaaggataatccaaatcatcttgggtctcctaagataggtgccattcgtaatccaaccgtgctgagagcccttaatgtgcttcgcagaaatataaattatctgatagatgacggccttgaccctaaggaaacccgaattgtggttgagacaacaagagtaaataacgatataaataaacgtaaggccattgagaaatacaatgaagaaaggaataacgagaataaggtaatcgaaaagatcctaattgagctttatggtgaagcaagtgaaaaagacatcaatgcggccagatatgtcttggaacaatcaggagaagacctcttgactgctgacgatactgataaccgtcactatcgccatcaaacaaaaaaatataaactctggttggaacaaggttgtagatgcctttacacgggtcgtatcataaatctgacgaatctgttggatgataattcgtttgatatggaacatacgatacccagaagtctatcgtttgatagttcggacaagaatcttaccgtatgcgacgcttattacaatcgacacatcaagcaaaaccatattccgaccgaattgcccaattatgatgtagatgtgataattgatggtcatctttatacggccattaaaccccggctggaaatgtggcaaaaaaaggtagaacgtttgggccaaaatgtgctattttggaaaaataaagccaagaaagctcagaccgagaacagccacgacagaagcatgcgtgagatgctgctatggcaaatggaatacaattattggcgacagaagcttgataggtttacgatgaaaacaaaagacctgaccgatggattccgtaataaccaacttgtggatacgggtatcatcacacgctatgctgtatactacttaaagacacaatttgccagcgtcgatgttcagaatggtcaatccacatctgcatttcgcaagatatttggcataccacaaaaagatcgctcgtcaaatttccatcacgctgttgatgcaacaatattgacgatgatacctgtgtcggccaaacgcgacagaatgcttaagctattctatcagatagacgaatacaagaagttgggatacgaagcacatggactgaaattccaattaggcagggaaatagaaaattgtggcttgggctctggtttggccgaaaccgaggattatatatcccaaagagtgcttgtcgatttttatcagcatgaccgtacacttcaaagagattttcatccagtcataagaaaaggcaaaccccttactcgagagcaagaagggaaatcggctcctgtgacttttcgcagtgatagttttcgaggcgaattacataaccagacattctatggagctgtaaagcggcgcaatgatgacaaagtactttatgttgtccgtgaaccattgaaatacaagacatctgaaagagataaaggattcaaagactggaaagagttgaataatagaattgtagatttgaattattcggcagagtacgagggcttcaagccgatggtgaagatgatgatgagccagttccccgtaggcacatcttttaaagatgcttccgaacaaggaatctttatgcttgataaaaaagggaacaaggtaaacagaataaagcatatacgttgttatgggaagaatgtgtcgaatcctgttaaggtcaagaagcatacttatctttctgacaaggagtataaacagtccatttgggcagcattaggagatagaagtgtttatgcattatgcgaatacagcgatgggaaaaacaaggagtataagcgatataccaacatggaaatatctgacaataggaaaaatgggaaagaggatattccaacattatatgtgggtaaaaaaggagaggtactccctttggttagaaagataattaaaggagatatgctgttgatatacaaaaactcgccaaaggaattgttgaatctcgatagattggaattatcaaaaaggctatataaggtgcagagttttgaagacaagaatcgtgttacactatttaatcacctcctttcaaagactaacaagaaagggcaagatggccatgatgggaaagaatacaaaggtgaatccatcaaagactttgaaaaactgccacctgttattagaagtgctataactaagttttcatttttgcagaaaggtgttgattttgagttcagcaggacaggtgtcaatttgatacaaaaataaacatgtcaatataaatagaaagggctaattcctcatggatacggaggaattagccctttggcataccatccttttatttctatttttgtgtacaatggtataaacatcagtgctttatgcattatgtgatgtatatgccataagttagatacaagaatgaaagcaattcacaaccgctgtcgctcccgtgctggcgcaccaagcgatgtatatgccataagttagatacaagaatgaaagcaattcacaactacgatagtttcactcatttttcaatcgaggatgtatatgccataagttagatacaagaatgaaagcaattcacaacttgttgtagtggtagcatggctggctttgagatgtatatgccataagttagatacaagaatgaaagcaattcacaactatgagtggtattgtgtttcgtatggaggagatgtatatgccataagttagatacaagaatgaaagcaattcacaaccgaacccgcgtgctggaggcaaacacctttgatgtatatgccataagttagatacaagaatgaaagcaattcacaactgatgccctcatactattacgagcaccagcgatgtatatgccataagttagatacaagaaggaaagcaattcacaacacccgcctgcataccacaaacgcggccgaggatgtatatgccataagttagatacatgaatgaaagcaattcacaacgtagacaccacggcaatcaacctgacggccgatgtatatgccataagttagatacatgaatgaaagcaattcacaacgatgcggagcattacgtcgttgtccttgcagatgtatatgccataagttagatacaagaatgaaagcaattcaccactcgataaggtctttcacatacaggcacagggatgtatatgccataagtgagatacaagaatgaaagcaattcacaacaccggaaccgcctaaactcaaatcgggaaagatgtatatgccataagtgagatacaagaatgaaagcaattcacaacctctcccttgttgaggatgtacatgtacgagatgtatatgccataagtgagatacaagaatgaaagcaattcacaacactggaagccgtcaaggttcgaggccttgagatgtatatgccataagtgagatacatgaatgaaagcaattcacaaccggcggcgcggcgggggtcaaggcttatgcgatgtatatgccataagttagatacaagaatgaaagcaattcacaacctgtgcttggagcatgaggcgggcgacttcgatgtatatgccataagttagatacaagaatgaaagcaattcacaacggtccagcggtcggcctcgaagtcgtagagatgtatatgccataagctagatacaagaatgaaagcaattcacaacttgttggggcatagtctgattgggttgaatgatgtatatgccatcagttagaaacatgtttgatgaggcaaagtgacaaggatacgaatcattgtgacatttaattgtctgcatttgttgattgaatatggtaagaatgtcaaagaacgctcgagattgtgttatgtcaataatactattatccatccattaggtattatgctaaaaagcaatcttttgatgtattaattcatgtattaatgacaatgcaaaagtacaaattatttctgatatggtatatgataaatctttacattatgaatgttagggaagtgttgttgtgtttttgcaaacaggtgcaatggattattggaatatggataatgttataagcccttttgagtgaggtggtgctgtgaatgaggggatgagaatggttgttggttttagggggatggtgaagaaaaaaaagaaaggcatcgtcggtgtggtgacgatgccttgttggtattagcgggaaatggtttattcaacggtcatttcctgcaggaattttattgggtgtaccaggttttgaactccgggacgcgggctttgcttatgatgatgcggtcgggagtggggacggagagggtcagcgcaagtttgccgatgggccagacggagatttccttgatggcccgatgggcaacgatatactggcggttggcacggaagaagaggtcggggtcgagttgctccatgatgaggtcgaggggtttgtcgatggtgtgttgttgtccgcccagcaggatggctcgggtgagtttgtcctcgatatagagacaggcaatctgactaatctcgacggggacgagtttgtcgaggtgggggatgaggaagtgagagcggtagtgcttgagcgaggaggcgagggccgctatggggattggcggcgggggtgaggtaaggttttcgagcttgtcgagggcgcgacgcaggtcgtccagcccaattggcttgaggagatagtcgatgctgttgaccttgaaggcctgtagggcgtattggtcgtaggcggtggtgaagatgatagggcaggtgatgttcacttggtcgaagatgtggaaggcgaggccatcggccaggtggatgtccataaagcagaggtcgggataaggagctgcggaaggggatgtcaaattgctaaaatattcgacgctctcctcaatgctctgtatgacggcgaggatgttaaatcggggcgatagttgggcgagggtgcgctggaggtgctgcgcggctacaatctcgtcttcgatgatgaggatgtttttcatggtgaggtcagattaaggggatgtcgacgatgaaatgggtgtcggtttgggtgatggtgatgggggtgtggtaaaggaggtcgtagcggagggagaggttgccgaggccgacagtattgcccgactcgctgtcggttttaggctggagagggttggacactcgcaggagtggatgcggcgactgaggcgtgggtgcgacagtgaggatggtgacggtgaggggatgacgctgggagatgacgttgtgtttgatggcgttttcgacaaggagctggaggctgatgggtggcatgtggagggaaaggtattggggagagatgttctcgtcgatatgaaggttgctgccgtggcgaatctgcatcatgtagatgtaggagtgggtgaaggcaagctcctgctcgagggttacctccttggtgtcctgcatggagtagcggaaagtggcggcaagctgctggagatagttatgggcgttgccgtcgtcggtgccgatgagcccgtcgagggtgttgagggagttgaagaggaagtggggactgatttgctgctggagggtctggtagcgggtgagtatgttctcggactggagctgctcgttttcgaggacaagctgctggcggcgggtgacgttgttgaggaggagggagacaagcgaggagatgagtgccgaagcaccgttggcgatgagggtgatggcaaaggtattggaggtattgccggcaccatagatggttgtttcggtgtggaacgagaggagggtgaagagggcagcgatggcgagagaaccggcgagacaggaggccatgagggcagaggatttgaggccgcaacggataagccagaaattgaagaggtaaagggggatgaacagcaggacgttggcgagaagtatgaagggaatgtggaaggtgggttcaagggtatgagtaattggcgagaaggctccgaggaccatcaccacggtgaggatgagggcggaagcgagggctatccacagggcacgggtggtgcggtagagttggatagagtggagggtggtaatccactccctaagtggacggggctttatgttggcgttgtgtttcatgatgcggcgggcaaggatgaagggtgtgcttttcgaattgcaaagatacgagtttatttttacataatcacgacttccggtatttttttataaaacggagagaggcacaggcggtgcagaaatagacgagcacctgaacccaaagcgtcaggtattcgtgacgcacttcggcaaggggggcacccatggtactgaggcgcacaaagccttggataccgggtgtggaggggaagatgtggctgaagaggtaccagaaccggggcatgttggactgcggccacaccatgccagagaggaagaagaggatgacactgaagaagacgcagcagagaacaccagacattttctggcggacaaataggttgccgaaactcatgccgaagagggtgacggagaggatgaagggcaggaggaagaccagtatatggcgcagggagccgagttggggcatgttgaaccagtgggggatgagccagaggtcgatcagtgtgatggggatatagaggaggacgaagcagagtgtacggccaatggtgacgcggtggatgctgtggttgcggagacggggcgggatgagacgcagagcgcggtggttctcgttggcatcgccgcacaggataaggatgccgatgaagagggtttggtggacgatgagcatgagcagagcggggaggaagaaactggagaaaccgccagcggggttgtagagcttgacatcgtcgtaggctaggggctgcacaaggtcggaggcctgctgaccggtgatgcctgtaagggcgtagcgttgcagttcgatggtgtgcatctcgtcgatgaggacgttgttgcctccgaggagggcgtttttgtagtagaggaaagagctcatgtcgcacatgacagcaacgcgggcggtacgaagcgaagccagtcgcgagccgtagtcgtgcgggaaatagaagatggcatggatgctgtggttgttcatcagatgtctggcttcagccaggttgcaacaatgataagccacttcgatttcgggggtggattcgagtttgtggatgaagcggtggcttgcctcacagtcggagtcatcgacaacggccacggggaggttgatgacggtttctttgtaatataccgagcagaagatgagtggatagagcagggtggctatgaagaagaccagcatgaccatagggtcggaaaagatgcgccgcacctcggcactgaacacttgccatatgtcaagcagcgcagttttgacactgagttttttgcggtcgtgagacggctgaagcggatgccggttgccggaaaggtcggaagtattcatgacagttgttttttattgaggttgagatccatcatcttggcaccgatgaggaaaacaagtccgaaaaggagcaggctgacaatggacgaccagcattggtcgagaccgttgccgaaaatggcgatgtcgcggtaggcaagataatagtgacggatgggatagagccaactgagactatcgaagaagtgaggcatggcctcgacggggaaggagaagccgctgagggagaagctgagagccgcatagacggcacagatgcccatggcaagcggcgggtcggggatgcatccggagatgagcactccagcgcattgggcagcaggaataagcaggaggctgacgagaaccatgaggagccagttcccgttcatggggaagtgcatgaaaccaaacatgacgagattggccagaagcacgaggaaggagtagtggaccgtataggggaagagtttgccaaagagagctttgacggtattgttgccactttttctcatccagttgcgcagggtcctttcctgccgttcgcggccgatgagatagacagtatggagttgagagatgaaggcaatgatagccgggatgagtgtggacatgagatagatgcggtagttggtccaggggttgccgatgggatgggtgtcgagttcgacaggcataatgagtcccatgatttgctcctcgtcgtagccttttttgcgtagaatctcacgctggacggcaccggaagccaacatgcccatagtggccagttgcttgtagctgagggttcctgcaaggaggtaggcgttgttggagtagagaccgaaatgcggtgcgtggaactggagaagttcgttgtaagtgtcgggagggatttcgtagaaggcgaaaatctcgccgcgctgcatggcttttcgggcttcggcatggttgtcgtatacggcttcgacatgaacaccctgggtggcattgagttcatggcagagacggcgcgagaggtagctgtggtccatatccaccacacctataggcatccgttgaggcagcccttcctgcaacatggtggcaaaaaagatgaaggaaaagacgataccgagggtgaggatgatgaggtagcgggggttgagctggatgcggcgcagttcgcgtagcatcactcttaatgtggggttatttgctttgttctgcatggtgccaagggtgttgaaagacaagaattaatgtttggtgtcgctgatgatggctgtcatgccgggacggaggccttcgattttttcttgggggacggctttgacatcgaaactcttgacatcgtattggccattggtcttggtggcacgccaagtggcgtagcttgccatcgcttggactttacggacattgcaagtgtaggtctgctcgccgagagcggggatgttcacttcgatggtggcgccgctgtggatgtccttaagaaggtcttcgcgcacggcgaatgtcatccacatgtcgctcatatcgaggatggagaccacaggggagccggtgccgatgaggtcgcccattttggcatagacctcgaccacttcaccatcgcacggagcgatgaggtagctgtcgttcttgtagctctgaacctcggccacggcaccgccagcctgattgacaagagcggcggcagcatcgatgtcctcgcgctgagcgccttccttggccaagagatactgctgctcggcggcggcgcagtcggcttgtgctactttgtatttggcatcgacctcgtcgaatttctgtgcagagacgacacctttttcataaaggcctttcaccctgtcgtaggatttgccgtagacatcgacggcagccttggctttctgccacacttggtaggccatctggatttgctgttcgcgggcaccgtgctgggctttctgactttgtgcagatgcggcactgcggactgcagtggcttgcatcatcttggcatcgatctggggactgtagatgtgggcgagagtatcgccagctttcaccttgtcgccctcttggacatagatatggtcaatacggcctgggaccttgttgctgacacggtattcggaagcatcgacttcgcccatgagtatttctttctgtggatggatggccaccaatccagccagtgctacaattactaccagcccgaggatgactgcgaggccggagagaagggatttgtttgtttctttcatatagagtattgatttgttattggttaattcccatggcttgacgaagatagacacggctcatggctatctcgcaagtttgaggttctcctcggcattgtcgaggttactttgcgcttgggtcagtttcttataagccaaggtcagttcgtagttgagtttgtttacctgcagttctatcaaatcctgagcttcttcaatctggtatgccacttcgcagcgtttggccttggcggccttgagcgcatagaaactgcctgggtgggctatggggatgttgaccgccaagccggccatgaaggagccgttgaattcgtttttgaaaccatcgaagatgttggggttagagaagagatagccagcagtcagtccgatattgggcatcaacgtggagcgggcaattcgaacactttgctgcgcaatactatcgctaatgtgaagcatcttcatctcgctgcgacggctgtagatgttgtccaagttgatgttttcggggacagacgacccttcggcaaaagaggagagaccctcgtcggctaccgtgaagacggtgtcgaggggcatgccacagcgttgggccagcaacatttttgcaaggagcaggccgttggtggctttggtgagattcatctgagcctcgttgagtttcacacggacacgggtgaggtctccctctgtggcgacatctgccttgaccatctcgtcaacgttattgtaaagcgtctgcaggagggcggcatatttctctgccacctcttttttatgctgaactgaaaccacctgccaataggcttcgtcgacagcgacaagggttgcctcgcgctgctggtcgtatgcaacgcccgagaggctgttggtcaaccttgcggtgcgataaagtgccaacagtttgccacccataaagaggggctgggagacggtaaccgtgccaagagctacggtgtgggtgttaagttcaagtgcatcagtgattcgttgtccggcattattcagcgcattctcgatgcgggtgttgtgcaagatgttgttgactgcaggacccacaacatcactgttcaagccgaggttggttagttcgtcggtgatggcttggttgatattgctttggacactggttcccatagagttgatttcgtcacgctgctctttgctgagtaggttgacctctttctgcatccaggaatatgtaccgttggcactcactttgttggcctcaagggcacgttggcgacactcttccaaagtgacgcactgttgtgccgagagaagcaccggaataaaacacaaggttaataatgtcaatgttttgcgtatcatgtcgtactttttttgatgatgcaaaagtacatacattatcaagagtgggacggggatatctatcccaactgcccaaaatggaagttgaaatgaacaaaagagagtccgaacagaagatacaaaatatctcgcttttcggcatgtcacagcctgcaaaatgattataatacaaaaaaagaggcatccccttggttgtggatgcctcgatatgagtgtcagcacttgcaattttagtcgagtttcatctcttggaggaaacggacgctggcgtggatgtgcttgtacatgatttggtcgatgtcgacaaagttgacgcatttgcggtagtcggccacgaggttttcgatgaaggggctgctcttgaggccttcctgatgacggaagtcgagggcctgggctgcatcgaagagctcgatggcgaggacacgctcggtgttttccattacgcggtagcatttggtggcagcgttgccgcccatgctgacgaggtcctcctggttctggctggaggggatgctgtcgacgctgcatggggagcagagctgtttgctttggctgacgatggatgcggcagcgtattggggaatcatgaaaccgctgttgaggccgggtttggccacgaggaagctggggaggccgcgtttggcgtcgatgagctgataggtgcggcgttcgctgatgctgccaagttcggcaacggcgatggcgaggaagtcgagcaccatagccaagggttcgccgtggaagtgaccaccgctgatgacgaggtcttcgtcggggaggacgatggggttgtcggtggtggagttgatttcagtttcgatgactgaggcgacgtaggcgatggtgtccttggcggcgccgtgcacctggggggcgcaacggaagctgtaggggtcttggacgtgctctttgtggcggcggataatctggctgccgtcggtgtatttgcggacggcagcggcggtttcgagctggcctttgtggggacgcaccatgtggaggctttcgaagaagggttcgatgcggccgtcgaaagcgtcgaggctgagggcgagcagcatgtcggcctgtttgctgagacgctgggctttgaggatgcaccaggtggcgtagctgctcatgaactgtgtgccgttgagcagggcgagaccttctttgctttgcagctcgatgggctgccagccgagttgggcgtagacttctttgacatcgcaacgacggcctttgtagtagacatcgcccaagccgaggatggcggggagcatgaggttggccaacgggcagaggtcgccgctggcgccgaggctgccttgctggtagacgatggggagaacgtcgttgttgtagcagtcgatgagacgctggacggtttggagctgcgcaccgctg

SEQ ID NO: 936 - DNA, 24140 bp, synthetic construct
  misc_feature 1..24140: note = Synthetic
  source 1..24140: mol_type = other DNA
cgcttgaggaactgttctacctcctgattcagggcagcaccgccgatgatgacctcgtacatctcaccaccgaaggctttcagcacttcctgacagatcatctcacgaactttctttgaaatgaccggcatctgcagcagcagacgcatgcggttattttgtatcttcgggaacaccttcttacggataatcttctcgataatcagcggaacggcaatcacgatgaccggcttcacctcttgcagcgcctgggcaataatggcaggcgaaggcacacggttcagatagaacacatgacaaccatacaggaactcaaagataaactcgaaagccattccatacatgtgagccatcggcagcatggagatgactctgtcacctggcttgatctgtttgccgagaacataaacggcgaaatcatagttagaccagagtgcacggtagggcagcatcacacctttagagaatcccgtggttccagaggtgtagttgatgacagccagctcgtcagggctttcctccatataatagctgacatgctctttgcggaaatatttcgggaacttcttaccgtagagttcattcagatgttcacgggcataggtcagtttgtctgtgcgtgaaatcatcaatgaatagtcgggattgttgatgattccctccagactgggcatcgcttgcggatcgatgatcgttgccacatggtcacctacgaaaagcagccgtgcttcggagtggttcactatgttgtggatctgctcggcattgaactcatggagaatgggtacagccacagccccataggtcagtgtggcaatgaaagccacagcccattgtgatgagtttcggccacaaagggctatcttgtctcctttcttaatgccgctattctcaaagaggatgtggattttctctattttcctggctacatcatgatactgcagcgtctgtcccttgaaatcagtcaatgcatcgtgatcccaattgttaatgatactcttctgtatgagagcattaaaactaggtatcttttccataagcgattagttattctgatataagtagcgtttgatactctttttaggagttttggcaaattcttcttcgtgaatctctatggccgatatgcggctatagggtggtaacttctcattgagagcctggcgattctgttccatgatgttttccagttcttcctgactgaagctgaccacttcgtctttgtcgggatgaaccagcgccaccagtttttcgcctcgctggatgacgagactttctgaaaccatcgccatcgtgttcaacttgtcttctatctcttcgggatagatgttctgtccgttggcgccaagcagcatgttcttgatacgtccacggatgaagatatgcccgctgagtgccatggtgccaagatcgccggtatgataccagccatcttcgtcaatcacggccttcgtggcttcttcattattataatagcctaacatgaggttggttcctcttgtgacgatttcgccaggaacatattgtggattgttggacaagatcttcacctccatgcggtctactggcgtaccgcatgagccaaatacaaagtccttatagtcactataggaaatcagcggggcgcattctgtcgtgccatagccgacggtgatggggaaattgatggagtgaaggaactcctcgacttctttcgagagtgcagctccaccgacgatgacttcgtatgctctgccgccgaaggcgttgtagacctcctggtaaatgcgctccttgacctttctggataccaccggcatcgccaacagcagtttgatgcgattgtcctggatcttcgggaacacctttttgcggatgatcttctcgatgatcagggggacggtgacaatcaaggtgggcttcacgtcggcaaaagcctgtgcaatgatggcaggcgacggcagacgcgtcaggaagaaaaggtggcagccattgcagaatccgaaaaggaactctacggccataccatacatgtgagccatcggcaggatactcagcagattatcaccgggtttcacgtgtttgccaatatggctgataatgaattcaacgttactccagatggtgcgatagggtagcatgacgccttttgaaaagcccgtagtgcccgaggtgtagttgatgagtgccagttcctctgcttcgtcttgatgatagctgatgtgctctgcgcggaatgcccttggatatttgctgccaaataacatatttaaatgttcgcgcgcgtaggtaaccttttcagaacgtgagatcagcaatgagaaatccggcagattgataatggcctccagaccaggcatggcttccgggtcgatggtcttcacggcatagtcgcctacgaagagcagtttggatccggagtggttgacaatgttctggatctgctcgccattgaactcatggagaatcggaactgctacggcaccataggtcagcgtagcaagaaacgctacagcccaatgtgcagaattacgaccgcaaatagctatcttgtcgcccttctttacatcgctattctcaaatagtatgtgaatcttttctatcttacgagcaacatcatgaaactggagcgtaatgccctgatagtcggtcagcgcatcttgatcccagttctcaacgattgctttctggatatacgcattaaaactgctgaatgtttccattgaaactgcacaaatttttaaattttgtgcaaagatatatcatttactgcacatttccaaaaaaaatgtgcaatattttagtccaatgtacaaaaatcaatagaataggtaacaaaaggaacacatttattcgtatctcatcgactttgcaggatgaatatgagatataagatagcttggagcgatcaatacgaatacgcagatgaataaggtgacggcatcaagcagaaggatcaatgggatgttcaactccatgggtgcctgactgacgtagtaggtctgaggatcgagggtgatgatgcccgtgtactgttgcaatagcacaatgccgatgccgatgacattgccccagaacatgccttgtccgatgatgaagaccgaaaaccagaggaaggtgtgacggattgtcttgttgcgtgccccaagtgctttcagtataccaatcatctgggtacgctcaaggatgatgatgagcaatccgctgatcatcgtgaatcctgccacacataccatcagcgccagaatgatccacacattgatgtcgagcagttcgagccagataaacacctggggatatgtctcgtagatggtctgtgaagtcagcatattcccgttcttgtcgttggtgcggttcacctgttcgatgaaagcctcttccgttggtagaatcaaatccagattgtccactgtaacagaaagggcagaacactcgtcgggtttccatccgttcagacgattgacggcgtaaatgtctgtaaaacagatgctttcgtcaaaacgggtcatgttggtctgatagatgccgcaaatggtgtatttacgcgtcctgacattgtcgttctcgatgaaataggcaaagagtttctgcttgaccttgagcttgagcttgtcggcaatcatctttgataccagcagctgatagtggctggtcgtatcgctgaattgaggcagttcgccgtcaaggagatgcgccttgagaaaagcggtatcgaactcaggtccgactcctttgaaggcgactcccagaaagtcatcgtcggtcttcagcaaaccttgcgtgactgaatagcgctctgtatgctttacaccgccaatgtggctgatggcgtttagcaggctgtcgtcaacagcaatcgtataaggatcaacatcgttgaaccacagcacattatgcacttgaatatgcccgccgaaaccgacaaccttgtcacggattgtgtgcttaaagcctaagacgacactcaccgtcacaatcatcacagccaatccgatggcaacaccgatggtcgctatacgaatagcagggcgactcaccatgcgtttgtcgtcctggttatgatagatcttcttggctatgaataaagggaaattcattcctcgtcaacccttccgggatatgcttcaagggctttccggagtacaaatagggctctttcaagatccttcttcttcagtacataagcgatacgtacctgattgacgccagctccgggagtcgtgtagaaacctgctgccggggccatcatgactgtctcaccttcatactcaaactccgccagacaccaacggcagaacttctcggcatcgtctacgggcagcttggcaactgtatagaacgcacccatcggtatcggagagtaaaccccggggatgcggttcaggccatcgatgaggcacttcctgcgttctacgtattcgtcatagacatcacgcagatattcctctggggtgtcaagagaggcttcagccacaatctgtccgataaggggaggtgaaagacgggcctggcagaacttcatcacagctttcctcacctcggcattcttggtaatgagggcaccgatacggataccgcattcagaatagcgcttcgacacagagtcgatgaggatcacattctgctcgatgccttccaggtgacaggcagaaatataaggagaccccgtgtagatatactcacgatacacctcgtcggagaagagatacaggtcgtatttcttcaccaggtcgcgtatctggttcatctcacggcgggtatagagatagcctgtcgggttgttggggttgcagatcataatggccctggtgcgctcattgatcagctcctcgaatttctctaccttaggcagcgagaaaccttcgtcgatggtagtggcaatcgtacggatcctggcgccggcagagatggcaaaggccatatagttggcgtatgccggctctggaacgataatctcatcacccgggttcagacaggaaaggaacgcaaagagcaccgcctcggaaccgccgctggtgatgataatgtcgtctgctgtgacattgatatcgtatttcgcgtagtagttgacgagtttctcacgatagctcagataaccctgcgagggtgaatactccaggatattgcgatctatctgctttagcgcgtcaagtcctacttgtggtgtcgggaggtctggctgaccgatattcaggtgatacaccttcgtgcctcttttctttgctgctgctgcaagaggcgcgagtttcctaatgggagactcgggcatttcaaggccacggactgatatttcaggcatcttttctagtttttactttttaccttattattaattacttccgtaaaatcggtgcaaaggtaacacaaaatatcgtaaatctgcgcaatctcagcccaaaaatttgcttttctcgaatattatatgtacttttgcccgacaaaatcaattaaaagagaagaaagacgatgaattttgaggaaatgatcgaggctcgtaatgcccagaagacaacgaaggtgcgcatgccttatggctttttctacaagcgtcaaattgaaggtaaatactctaatttcgtggaatttcacgatgagttggtagacaacatcttcttcaccaacagcgtgaagcatgagtgtgaattcttggctggcttcaagcataaagctcagcttcattttacacccaacgagggtgatgacggcatctatgccattgcatttgaggttggcaactatctgacgctggggcagttgctcaacgacgatccctccgttgtggcccgcaatgagttcctcaagaaggtgttgaaggaaatccttgacataaccgtcagccttaatgacgagaatgtctatcatgtctgcttcgccccctcgaatattcttgtccgtaagaccgacaatgccgttcgtctgctttgtcatggatccttctatagcaaggtggatcaggatgtgctctatgaaggtgtggaagactttgttgccccagaggtgttcaatggcagcgagatcaacagccgcaccgatgtctattcattaggtaagtttattgcctatctgtatgaatcgtcaggactgcccatcgaattgaagaagatcatcgagaaggcaacggctgtgaatccggatgaccgctttgattcggttgcgacgcttcgtgcgacgattgagaaagtcaccacgatgaagcgtaccacgataaccgccgtctctgccatagtcatagcagctgcagtagtcggtctcttcttctatctgctgcccagtcccgaggtaatcgagtatgtcaagcctgtaaaggatgtcgtacccgacgagatggtcgaagaagatatggatgccctgataggtatcggtgctgacgcagactcggcaaccatcgctgccatcgtggaattgcagaagcagaagaaggattctctcggcatgagtgagagtaagctgcgccagtataattcgaaggccgaggcgattttccgcaagcaattcaccaaggctgccgatgagattatctcgaaagtctatacaccctcgaacatgaatggtgatgtgaatgactttgctgccaagagtaagcgtatgactgaggaactggccaaaaaacaggatgagctgatgaaggccgcagctatcaactcttctcatgcccagcgtatcgcatcggagattatcgagcagataacggaaaagaagaaagatattcttgacaaggattacatgggactgaaaaatgttcctcaggataagaagacgactacacagtacgattatagtagttcatcagaatctacgcttccgacgactaccaccacaacaacaaaaacttcgacctcaaactcttcgcagccgaggagtaatcaggacacctacaagaagtatagggataagtatggcgtagacccgggcgatcccgttgaccctgataattataaattaagaaagaaataaaagatgagaagtagaacagcaacttggtttgagtgcaagatccgctatgagaaagtcatggaggacggcttgcagaagaaagttaacgagagttatgtggtagatgccctgagcttcagtgaagctgaggagcgcatcatcgaggagatgtcctcctatatcagcggtgagtttgatgtggctgacatcaagaaggcggcctataaggagatattcttctccgacgacgagatggccgacaagtggtacaaggccagactacagttcatcaccatcgacgagaagacggaaaaggagaagcgctccaccgttacctatctggttcaggctggttccttcaatggagccgttaagaacattgacgaggtgatgggcggcacgatgatcgattacgtcatcgcttctgtggcagagacctcgctgatggatgtctttgaatatgcaaagacgaaaaaggatgacaaacctgaatttgaggggtaagatggactacgacgtaaaaggtcatttgcatcagatactcgacacgttgccacagggcgtccgccttgtggcaatttccaagtatcatcccaacgagtatatcgaggctgcctatgccgaggggcagcgcatctttggcgagagccacgaacaggaactgcgcctgaagcatgagtcgctgcccaaggatatcgagtggcatttcattggtcatctgcagacgaacaaggtgaagtatatcgcaccgtatgtgtcaatggttgaggctgttgactcgctcaagctcctgaaagagattaaccgtcaggcagagcgttgcgggcgagtcatcaaggtgctgctcgaactgcatattgctgaggaatccaccaaatacggcctgacgctcgatgcctgccggcagctgctcgaaggcggcgaatggcgtgatatgcagcacgtgagaatctgtggcctgatgatgatggcctccttcgttgacgacaaggaacagattcgccgggagatgcagacagccgcagatttcttcgatgaagtgaaggcgaaatattttgcggatgacgaggcattctgcgaacgttcctggggcatgagcgacgactatctcattgccgctgagacccgttctacgatggtccgtatcggtacggctatctttggtccccgcgtctattgaaataatactgatcccgctttctggtgatgccgccgttgttgatggcatgtacgggacagtaatgataacaggccagacaagaggtacactttccactatgcaaccatctgggaggtgtacctgttatattatccacaggacacaccttcgcgcacttgccacattggatacagacatctgcatctaccgtgaacttcttgtcggttaccatcttcttgttgaaatagccgccaatcacgtatgaatagagtcggggagtggcgcccttttccagttcttcaatcccctttttacagtctttgatgatgctgacgatatgatgcaactgtcgcccggcattctctattttccagcgttccttgtcttccggatccgtcttcataaacggcaggcacacataggtctccggcataatcacagagaacatagtttccgcttttaggccgatagtagccagctccttattcaggatggtcatcgcctcacccatgttgtcgccgcaggtcgtcaacgcccagcaataggcatcgtcggctttcgtgatgcacagccttctgataaagtccctcacaatgcgtggcggctgccagccatgcgtcgggaaacagaatcccagccgttctccctctttcagcgtaaacgcatattgtccctgccttatcagatcagggatatacagcagttcctcgccaatggcctttgcaatctcgccagccacccatctggtgttgccagttcctgaaaaatagaatatcatcgtttgtcacttctctaattcaggagcaaagttacaacttttccccgaataaacaccatgatttatcaggaaaagttatttcaacacatcatttctgatcggacatcatcgagtcagaatccagtatgttcagacatgttttgatatttgaaaagatgattctatttcaactctctaccaaaatgtgatataactctctgtatattagtcttttaatataatttcgactttctactaactttctactaactttctacaaactttctactaactctctaccaactctctactaaatcacatgctaatcagcaaataatgctgccttactgccgtatagttacccacaacgatgtagttacattacggcaaaccatcattcatataccgacaaactatacctttctcgtaagcaaactaataaattctctagagaattttcaattccgcttacgattgaccacctttcaaccgtaaccagagcaggcatcactcggtacataaatgcacgacagataccatattcataccattttagtagaaagtttgtagagatttagtagagactttgtagaaagtttggtagaaagtatatggagtataatatattgatatatagtcatatatacagattttagtagaaagttgttattgttttgtcaatttgcaattcaatgacatataatttactcctgaagatactccatataatatcttcatgacgcctcgaatttttggaagcgtgattcacatacccagaggtacctgaatgcctcctataggatgccgccgtcataaacttttttatgggaaatgtgtaattttgcgaaaaggaactaaattatttggaacttatcaatctttttcctatctttgcagcagaaaaagacaatgattaaagacaaatattagtgattagagattactatgatatgaacaacaaaggaccaggttacgttatatttattgacccgctcgacctctggtcgcttgcatgcttgcaagaatccagctttcgcgaagattggatgatgtttggcaagatgagaccgctctgtcgaactaaaggccaatcatatataaaaagaaaactcccacggcagtcgcgggagtagaacttcggcttaaaagccttgttgtgaaaagtctttcacttgtatctgggtgcaaaattaagaattaaaaacgataagaccaaatattctgctaagaaaatgaaggaaaaagttgttggaatcgatttgggaacaggttcgctaggtatacttctcaggaatcttgaacttggtgataatatcattgaccagttggaatggttttctgtgacaacgtttgactcaggtacgggcatgagtcagacaggggaatatacgctggcttcagatcgcaggtcacatgtgcaaagccgacggttaaaggaacacagcagatataagaggtgggccacgttggctcttttgattgaatacgatatgtgtccgatgagtccagaatcattagagaaatggcgtgtctatgacaagactagaaacttgaaacgcgaatatcctctagacgatctagccttcaatcaatggattaagatggatttcaatggcgatggcataccagaatatacaagcccgttccaactaaggcgtgaattggttgaaaagcaacttgacttctctcagcctgagaacagatacagacttggtagggccatctatcacatagctcttcatcgaggcttcaagagtagtaagggtgaaacattggcagaattggaagaaggaaacaaggatacccaaattagcacagacgacttggaaggtgccatgaagaagtctgaggaaaagaaatccaaagatctgacagaatacatggagtttcaccaactgaagacagtcggacaggcatttgcctatttagaagatgagggcgtaaggattcgcaatagtcgttatcaggctgtaagatcccaaaatgttgatgagatcaatgaatactttcagttccagcatgggctcagtggttttcaagaattgcacaaacggctgataagcacgaagaaagggattggcacactcttctacaaacttcctcttcgctctcagaaaagccatattggcaagtgtattttcgaaaagaacaagagacgatgccccatctcacatcctgaatatgagaagtacagagcttgggcttttatcaacaacatccgctataaggcatctgttgaggatgtttggcaagaattatctttggagattaagaaccaactctatcaagaggtcttcgtctctaaggtaagaaaggactttaactttgaggttatccgcaagttcttggaaaaacatctatgcttaacgttttcaaatacggaaaaggccaagactatcaattacaaagataatacgttggtagcaggttgtcctgtgacagcccgccttcaaaatatagcagattatttcggcacagacattgagcacttcgagcagaaaggaacgaagacacgcgatactcacaccaaaagacaagaaagagagaggcataccgtagtttatcatacgatggacttatggaacttctgtttcgatactgacgagaaggaagatgtgacggcctttgcccataactctttaggatggaacgagcaggctactgacaagctctgcaaattatggaatgcgatggatcagggctatgccacactcagtctgaaggccctcagaaacatcaatcgcatgctggtctatggtctcaaaacctcagatgctgtattcctagctaaagtgcccgacattacaggtatgtcggaagagggtgtcaaggacttgattgacatttatctcggaagggtaaaagggcaagttaaccagaaagtgcgggattgcagaattgtcaacactctgattgctaactacaaatctatgccagtcagagaccgctttgcagatcataactatgattatcaattaggtatcgatgacagggaagccgttgtaaagtgcatcgtggataatgacaaggacttttctctgcttgatgcaacagcacagaagaagatgattgatcgtgtgacgaatctttaccagtcgttctttgcagatattcatagggatttcgtaaaagccccacgaacagttgatgccctcaaagaagaactttgcaagagatattcaggcatagatgacagcaaatgggaaagactttaccatccttccatgctttctgacttccctcgtgacaaggacaatgccaaccatcttggcagtccaaacatcggagccattcgcaatcctacagtcatgcgaacattgaatgtgctcagaagtgtcatcaataagatgatagacgaaggacttattgaccctcaggaaacccgccttgtcgtagagacaacgagagtgaacaatgatatcaataagcgatgggccattcagaaatacaatgaggagcgtcgggacgagaacaaagccatcaaggacatccttcaagagtattatcctgaaaaggacatcaatgacgatgatgttgacgcagcacgctatgtactggaacagtctggtgaagacctctatggagaaaacgacagattccagcatttgattaagaaatataaactatggcttgagcagggatgccaatgtctgtatactgggcacatcatcagtctctcaaatcttcttaacggtgagatgttcgatgcagaacatacggtgccaaggagtgtctcttttgacagttctgacaagaacctgacgatgtgtgattcctactacaatcgccatgttaaaaagaatatgataccatcacaactgcccaactatgaacatgatgtcgtgatagacggccatacttatacagccatcaaacccagacttcaaatgtgggaagagaaggtggaacgcctcagcaaaaatgtaacattctggaagaataaggccaaaagagcccagacggaaagttataagaatacctgtattcgccagaaattgctttggctgatggagtttgactattggcgtagcaaacttgacaggttcaaaatgaagacaagtgacctgacagacggcttcaggaatagccagttggtggatacaggcatcatcaccaagtatgctttgctatatttgaagaccctcttcaagagtgttgaagtacagaatggccaatccacatcagccttccgcaagatattcggaataccggagaaggatcgctccactcattatcaccatgccgtagatgccgccatccttacattgattcctacttcggctcagagaagcaggatgttgaaactgttttatgagattgacgagatgaagcgaggtggccatgagtattcaggacttcaattccagttaaacaaggaaattgagagttgcggtattggaaaaggcgtagccgccgttgatcagtatattgaagatcacgtattggtgaactattgcaagcaagaccgtacattgcaggatgccaacaacattaggggtaaactccacgcagaaacattcctgggggctatcacccaatggaatggagaagaaaagaagtatgtgaaaagagcggaattgaagtataagaagtcttcactcgattctggatttaaaagttgggaagacttggagggtgccattgtcaataaacaattggtgcagatgatgaagtcgcagttcccaaagggcacaacattccaagaggcttgtgaacagggcatctatatgctgaacaagaggggagagaaggtgaacagaatccgccatatccgtattgaggttaaagagaagcatcctttggccatcaagaaacagacgaacctatctgccaaagattacaagcagtattactatgcaggtatgggtgatctgtatgtgacatgtgaatatcagaatcagcaagagagggaattcattgtatatagcctgttctcaatcgcagaaaacaggaagctgggtgtagaggatattcctactacgattattggtaaaaagggtatacgcctgactcttgacagaataatcaagaaaggggatatgattctcatctacaaaaattctccagaagagttatacgagctggatacaaattctttgtctaaacggctatatatggtttgtaatcctgagagcgacggaagactcaacctttgccatcacctttgcgcaaaacaggagaaagggcagtcaatcaaggactatgaccatcttccgcagaatatccgttgtggagcaaagactatcaagttcctccaaatgggcaaagacttttctatcgtaaagggtaaaatagagttcaagcgatcataactttcataaaaatagaaagggcaattctgctgctacacaggattgcccttgtttggcatagcatcttttttgtttctgaattgtttcgtaaggctctcgatctcaacagattgctcaaatcgagatgtttatgccattacatagatacaagtttgaaagcaattcacaacttcctctgtttggaatgctaagatctttgagatgtttatgccattacatagatacaagtttgaaagcaattcacaacatcaccatcagcgggtcttcgcagatgtgggatgtttatgcctatctttagatacaagtttgaaagcaattcacaacgaatgaaagccgaatgagccgcaggaatgcgatgtttatgcctatctttagatacaagtttgaaagcaattcacaacggggacggatgctgtgcctcaatctcatccgatgtttatgcctatctttagatacaagtttgaaagcaattcacaactgaccgacgacctgacgaagcttgacgacgatgtttatgccattacatagatacaacgatttcaaagattaagagcatcattttatctgatgccgttgcaaaggtaatcattatctttggattagcaaaattctcatataattatttaccagactaaagaatcttaaaggggtacaaaaaatgcctgaaacgtaaataaatgaggctttatgcaaatacaaaacatgacaatatgggaacatgaaaactattcagactgctggaggtccacagaaagtaaattgtgcaccaagagaagaaatcttccgttttatagaagattatcctgatataattgggcttttcccttgcaggattctgaataattacttatctttgcagcagaaaaggcaatgattaaagacaaatatgagtgacaataaacaagtgctagattatgctcgatagagaatatcgtagtcgctatgtgatcatgaagtgtctgaccttgtggcaccgattatgtaaatgcgtgtagcaaaggtggtaacaacgaaattgagaactggcagatgttgtgcaagacatataatagaaccaaaggaaatagataaaaaacgagtttatgagaaaagtattattattaattgctgtattgatgtcaggtgtttctgtaatggcgaagtctgcttatattccgaaatacaggacatatatacacattgttgatggctctgatactattgcaattgcgaactatttgaaagacttggaactaaaagacagtcggggtatgttcaatatagctgttgaacatgaggaggtgacaaaagagaaagtgaaatcaatcaaacgagccagacgtgctgctaacttggcagcattttcggccgtgatgtctggtgcttcaacagctttctcccaaaatagtctgcaatatatggtacgttctacaaataccaaaatcgcgagtcagttggcagatatttattctctaaatgccaatgcagagcagttactgaatattgatgcgttgatagaaaatacatcaagcgaagaattgattgtaaatgatatggaacgtggtcttacatggtatgttaggccctctcaatccctaaaaatcaagcttaacaatccagaagtaactaacctccgaattagtgatgttcataacaaccaagtgcgttatgcaatggttacagcaggaagtgtcgctgaacagtgggatatagaatgggaagatgatagttgctggattgttatagtatacaaggtaaaatattcggataataagaaaatagatcattataagaggatctcaaaagaagactatacagaaatggatatgacaaaagaagagtatcgcgcattcaagaatcagttgaaaaacaagtagctagaattgagttcactttggaggagtcggacgaagaaccaaggaatcaagggacaggtgaccgatttattttagaatcatttcaaggataaatcaataatgtatgactcagaatgaaagatggcaacggcaatatgaggagatgatgactttttatccacaagatcgacttgagaagtttgccattctcttgaaagttgctgataaataccgtaggaaaaatcaatatgaatataggtgaaataagtaataggaggacaggcgcatagagtgagattggaatgcaggattataaacagcgataaaaccatacacaatatgaatacgaacaacaaaaaaacagagttgactattcccgtcgaaaaggagttttatgatcaaaagtgccaggatgcagaaatcaccaagaagttcaaggaactgcatgtgaagattgttaatgaggtaatctcgttctgtaaagataatggcattattgttgatgagttttatttacacgctgatagtcttgatgaatcaatcaaattaggatcgtggcagccagcgacagattctcagtttgaactcgtaagagatattgaggaatggtcaaactcgtttgataaagaatcgtgtataggaacaagcaactcttttgccagctggatgatatccttatgaaagttaatcagtaaatcttgtatcttgcttaagttgacacgtttcttcgtgtcatctgagttgtagttgcctttcacaacgttgaaaaattcttcgtacaatatatagctactgttctcaagatattggcgatgcttaagcctgtttgccaaatcaagaacctccttatggcgcttctcgaaattagaaataaagttatcgtctttattctgatacagaagttctttgatcttagagatttggcacttacgcaatatgacttcaatgttctgacctgtcaattctgtaggagcatacaattggtgattaaaccaaaggcactgcaacaccatatcgaagctgttatggtaccagattagtgctgaatacaaataatgctgcttgaagtattccgtcttaaacttgttgccatagtctttctcttctactaagtccagaaaaggctccttgtacgacattgccaacataaaccgcgccgtctccagttcatgcacaaaatcaataatacgccgtctggtttccatatcttctggcgtcataggttgtacctcgcccaagtccctcaggaaattagccgattctaatacgctataagcttcttttgtcgtcataataatacgtgtttgctgcaaaaatacagattgtttaataagtgagtccaaattgccaaagggggatgatattgccatagcctgtttcgatgtcatctttgacaacataaccttcggccgcatcttgtatctgcttctgctttttcctctttccacccacctcaaaggtctttccgtctatttcgaaatcgcttatccgtgaactgatgacatcagtcttaacacgcatctggttatagaagaatgtctcgcgaatgttgccaatatcggtactctcatgcccaagaagataggccagatttgtgttgtcaagatatactttctcgacctttcctaagccacgtatgccgccagtatcgtcacgcagttgtcctatcatgccagcctgttccatgtaaaggaaatagtctggcagcacattacgactgacacctatcacggtggccaatgactccatgacaggcttgaaaggaacactttgtgctataacggccagtagttttttcaactttcgacctgttgaggcgttcatattcgcgtattggggaatgtcaacctccatagtttggttgataacctgacgcaagcgcatctcatagttgccctcatttgcaaaagggtagtagccattcttcagatagtccttgaagaaaggcagaggatgactgacggcatcaagttttgcctgatgctccaagatttcgttgatggtgtatactggggcgtttatgttatgaaacaatgccagatattccctgaatgagagtccctgcatggtgaatatcagagcacgtctgctcaagtcggatactccttttgtgatatcaagtatggaagaacctgtgaatcctaccttcaagtttggatgagagtcgtaaatgagtttcaattctcgtgaccagttctcatatttatgaatctcgtcaatgaatatctgctctccaccgtctttgacaaactcatctactgtgtcgatgagggtatgggttgagaaatacagatgatcagcagcaatatagagcatgcgccgcttgtctttgttgtccctgatgtattgaagaatcattgttgattttcctacaccacggggcccaacaagtccgaacattctggactcccaactcacttgatcatacatatacctatggaatgttgaagtggttagcttcaactgactctccatgaattcaataagcgaaatatccataatcgttatatttttgctgcaaagatagtaaaaatgcactaaagtagtgcacaaaatgaaggaaaaatgcactgaagtagtgcaaattattgattttttgcggaaaaatacatgatattgcaatggcatttttcatttatggcgacatccttgaatacagagacgaatgaaaagtatcctaaccctaaccgtcgcttttgttaaattgagcaaaatagtttgtgggtaaagagggaaatgattacctttgcaaccgcaaagcgctagctatatattataaataaggtgaactagatgatgaaattcaggaccataaccatattattcttaatgataactgccatcggctgtatggcacagcgacgccagttgcaggaagcccgtctgattctgaaaggtgacaaggactacgacaaagccgaaacgatgatgcttaatctgctgaatgattccacgcatctggaatatcgggataatcctcgtatctatgatatgtggctgcagtcggtagagaaacaatacagccagctgaatgaaatgatgtataagaagcaggaggttgatactgtccagctgttcgacctgacacatcggcttttcatgataggcgaacgtcttgattccattgacatgcggcccgacaagaaaggccgtgtgtcgccggagtatcgtaaggataatgcctcgcgactgatcggttaccgtccgaatctgttttttggcggaacctatcatctgcgtaagggtgattaccccagggcctacgactttttcgagcgctatatcgactgtacccgtcagcctctgttttcggactatgatctgatgaacaatgaccctcgaataggggaggcggcctattgggcatcatataccggctatctcatgaatgagccggtccttacgctgcggtatgcgaaaatagcccgtaaggattctgccaagttggagaatctcctccagattacggcagaggcgtggtcgaagctgaaagacgactcctcgtatgtagcatcgctttgggacggcttctgccatttcccgaaatcggcctatttctttccacgcctcctggacagctataattccaaaggcaaccacgaaaaggtgcttgggattgtggatgacgcattgaaagccgactccgtcagccagttgttcctgctagctaaaagtacaatcctgctgaatctgggccgttatgaccagagccttgagtgtagcaagaaactgatagaactgtatcctgatatggccgatgcatacttcaacgcagggtcggcttgtctgaacatcgccttgcaaatggactcccgtaaccacaggaaacagatacggaagatgtatcagaaagcgcttccttatatggagacttatcgcaaactggccccaggggaaacaaagaagtggggtgatgcactttatcgcatttatttcaacttaaacatgggaaaacagtttgatgagatagataaaatcttaaagaaacaaaaaagttaaggcttattgctacaagtttgccaatttattcctaactttgtagattataaataataatatcgatctaaaacgaataaacaaggaattatggcagacaatgcacaactcattgctcagtgcgaggcacgggctaaggaatggctttctccggcctttgacgaggagacacgtaaagaagtacaggcaatgctcgacgcagaggacaagactgcgctcatcgatgccttctatcagaatcttgaatttggaacaggtggtctgcgcggcatcatgggtgccggtacgaatcgcatgaacaagtacatcgtgggtatggctacccagggtttcgccaactatatcctgaaggcattcccaggcaagcagtgctcagtagtagtaggtcacgactgccgtaacaacggccgcatgttcgctgagaccgttgctgacatcttctctgcaaatggtatcaaggtttatctctttgagagtcttcgcccgactcctgagatttcgttcgctatccgtcagcttggttgccaggctggtgtgaatgtgactgcttctcataatccccgtgagtacaatggctacaaggcttattgggatgacggtgctcaggtgctggctccacacgacgtgggtatcatcgacgaggtgaacaaggtgaagatcggtgacgtgaagttcgaaggcaataaggaactcatcgacatcatcggtggtgagatggactgggactacctgcaggctgtcaaggaggctatggtggatcaggatgtcatcctgcgtcagaaggatctgaacatcgtttactctccgatgcacggcactggtcgcgtgattattcctgaggctctgcgctcttggggcttccagaacatccatgtggttcccgagcagatggtgatcgacggtaacttccccacagtcgtttctccgaaccccgagaatgctgaggctatgaccctcggtatgaaactgggtacacgtctgaatgccgacctcgtgattgcttctgaccctgatgccgaccgtctggctatcgtatgccgcaacgctaagggtgagtgggagattctgaatggtaaccagacatgtatgatgttctgctggtatatcatcgccaacaagaagaagcttggtcagctgaagggtaacgaattcctcgtgaagaccatcgttactaccgaagagattgccgagattgccaagaagaacggtgttgaactgcgcgactgctatacaggcttcaagtggattgccaacgagatccgtatctctgagggtaagcagaaatacatcggtggtggtgaggagtcattcggcttcctgccgtttgataaggttcgtgacaaggactctcctgcatctatctgcttgatctgtgagattgctgcttgggcaaaggataacggcatgaccctctacgatctgctgatgaacatctacgcagagtatggcttctcgaaggaaaccacgatcaacgtagttcgtccaggtaagactggtgctgatgaaatcaagcagatgatggccgacttccgtgctaatcctccgaaggaactgggtggtgcgaaggtttgtctgtggaaggactacaagacgctggaggctacgaaggctgacggtagcgtggagaagctgaacatgcctgacacgagcaacgttctgcagtggttctgcgaggatggtactaaggtttctgttcgtccttctggcacagagccgaagatcaagttctactgcgaggtgaaggattcgagcttcaagtgtgctgactgctacgagcgctgcacaaagggagcagaagagaagatcgaggctatcaagaagagcttgaatctctaatctcttgtttaggttttgttaatgataagccccgccactcggcggggctttatcgtcttataaaaagagcccttccgatgattcattggaagggctcttgtctggttcgtattaatagatgatgctagagagcgtataggcaaccagcgtggatacaatcacggagataagtcctggcatcatgaacgagtggttcagcaggtatttaccaatcaccgttgtgcccgagcggtcgaagttcacggtagcgatatccgaaggatagttagggataaagaaataaccgtagacggatggcagaacaccgaggagcacagggccggagatgcccaacgagtaggcgaggggcagcatcgctacgacaacagcaccctgagaattgatcaataccgataccaagaaaaataccagtgcgatagaccaaggatactccttgacgatgccggcaagcataccctgcatctcagacatatagttcgagaaataagtgtctgccagccatgcgataccgtagatagctacgacggcaaccataccagactgccatacaggaccagcgacagctttcttgggggctgccttacagaagatgatcatcagcgcagcagctgaaatcatcacgatctgaatcacaacattcatggccagaggcttgctgaaccactcggtcataccactaacgtgaactttagcctttaccaactggtcggcagtcagagtcatgttctcgtcgagtaccagtccttggctgcctttaacggcacgaagcgtttcgtaggaaggcagggcattctggaagatagcgaagaatacgatgactgcgagggcaccgaggaagatgaagacggcattctttgcagactgtggaatctccttgtcaagtgtggttgcaccacctccatagatatattcacgctgggctggatcctgaagcttcttctggaactgcggatccttgtcaaggtcgagaccacgatgataggatgcagcagcagctgccatcagaccacagacacaggcagggatggaaaccatcagcacaccgggaatggtaatgtcgaagtggttggcattcgagatggatacgaaggccacaacggcagcagcgataggcgaacaggtgatacctacctgagaagcgattgatgctacaccacaaggacgttctggacgaatgcccttcttcaaggcgatgtcgcagataatcggcatcagcgtatataccacgtggcctgttcctaccagaacggtgaggaagaaagtggtcagcggggcaaggaatgtaatacgatctgggtgtttgcggagcattctctctgcaatctggatgagccagtccataccacctgaagcctgcatgataccagcacaggtgacagctgcaatgatgatgtagataacatcagttggaggcgtgcctggtttgagtccgaatccgaatacaagaatagcaagaccgataccggaaattgctccaagggcaaggctgccatagcgagaacctacccacaacgctccgagtacaatacagagctgaagaatcattgtgaatgtaatcataaagaaatgtaagtttttaagttatttgcataatttgcctgcaaatttacgcatttaatttggaaatccatacttttttagcagaaatattaaaaatatttatttccttttgtcagatagaatatttttagtacctttgcacgctataaaataatatgatagaaaataggtaataaatatggctaagaagtttgccgaacataacggcttgaacctaacccaggtgaacaatgatatcctggagatgtggcgggagaagaatgtcttctggcgctctgtcgacgagcgtgaaggatgcccgcagtttgtgttcttcgagggccctccctctgctaacggtcacccaggcatccaccatgtgctggctcgtaccatcaaggataccttcaatcgctataagacgatgaagggctatcaggtgaagcgtaaggcaggatgggatacccacggactgcctgtagaactgggcgttgagaaagaattgggcattaccaaggctgatatcgacaataaggactcggagaaatacatctctacagaggattataacaagaagtgccgtgagaatgtgatgatgttcacacaggaatggcgtgacctgacggaaaagatgggctatttcgtagacctcgacaatccgtacatcacttacgacaataagtatatagagacgctgtggtggttgctccagcagttctataagaaaggcttgctctacaagggctacaccatccagccgtattcaccggcagcaggtactggtctgagttctc

SEQ ID NO: 937 - DNA, 14602 bp, synthetic construct
  misc_feature 1..14602: note = Synthetic
  source 1..14602: mol_type = other DNA
actatggctatgaatatgagccattacctaataaatttcaagaagatataagtaagtttgcaatcgatagtggtgccgatattgtaatcgggcatcatcctcatgtgttgcaaccagttatacaatacaaagatggctatattgcttatagtctcggcaatttcatatttgatcaatcattttctgaagagacaatggagggcgggattcttgaagcgattataatggataagaaaataaccaatgtaagccttcgccgcactgtccaaaatgagatgtttcaggtcaatttcaaagaggaaagccgataattcttcccgtgctataatgagcagatgtcttcaatttcgaaaacctctacaaaaatagatgataatagctcactggaactcgaaagttaccaccctcttataaaaaaagtcttagatagtcataaaataacatcaaaagaccaagcagaagtatttctaaatcccgattatgatcttcatactcacgattcggcattgctcaaaaattctgatttggcggcggaccgtttgattaaagctataaaagacgacgaacatatcgcgatatggagtgattatgatagcgacggtattccgggagcagtactggtaaacgatgtctttagaaaggtcgggttttcaaattatgaaatatacatacctcataggcataatgaaggtttcggtctaaatatctctggcatcgatgagcttgctaaaaatggtacaaatttacttttaactattgattgcggtatcgcttctttcgatgcgatatcccacgccagagggcttggtattgatgttatagtcacagaccatcacgagcttagtggttcgttacctgatgattctattgtggtaaatcccaaacaaccgggatgtctttatcctgaaaaaatgctttgcggtgcagcggtcgtttttaaacttatggaaagggtccttttcaagcttagagaagatgaggatgatttaaacgttaaactacatataccaaagccaggttgggagaagtggttacttgatatggttggacttgcgacactttccgatatggttccacttgttggggaaaacagagtgcttgcaaagtacggtctttttgttttgcgtaaatctccccgagtcggtctaatgaaactcttaagaaagacaaaggtaaatcaaagatatttatcggaagatgatatcggtttcacaatatctccacggataaatgctgcctccagaatgggggtatctcgagatgcttttttacttttgtcgactgaaagcgaagatgaggccgagcattataccaatcatctcgacgaaattaacaacgaacgcaaaggtgttgtcgcctctatggtaaaagaaattaaacggcatatatccgagagagaagagatcaaggacagtcctgtcatcgtgcttggtaatccaaaatggaagccgtcgctcttggggcttgccgctggatccattgcagaagaatgtcaaaagccggttttcttatggggtagggatggagaaggggtgctcaaaggttcttgtcgagctccagagggttttgatatactaaaaatcataagtagtacgcctgagggtacatttcttcagtacggaggtcatatgcaatcaggagggttttcaatttcaagtgaaaaagttcattttttaaatgatttactttccaaatcccacgacttgatttacaaagacgaagaaaaaaaagagaatgcgtccgccttaattcatggggtcatttctccggaggaagctgattggaaactatactctacgatagagaaattgggtcctttcggagtcggaaatccaaagccactttttgaactttcaaatatcgagttattgagggtagagtacttcggaaaagaaaagaatcatctgaaatttgtttgtaaacgagaaggtggtaaaccaatcgacgcaatacaatttttctacacccgaaatcctaagaataaaaactcaaaagaactatcggcaatgaaaagggtaagtataaccgctcatcttgaaaaaagtatgttccgaaactttccggagctacgacttaggattgtggatatagtagaataggtgttagttggtagctgttagcttttagggaaagcgtggagtgtgtaacataaagcatagaacgtgtagcgtataacatgtaacacgaaaagagaggaagagaaaattcacctaattcatctaattcctaattcacctaataaaattaaaaattggtaattaaaaattattgttttataagttgtatgttgttagttgtaagttatgtgtcctaagtcttgcttatcatgaataccacaacaaaagatgtcattatatttaccgacgggtcttctcgggagaatcccggtcctggtggatgggctgctgtaatagtttttggaggtagagaagttgtagagcttggagggtacgataagagtactactaacaatcgtatggaactccaagctgccatatcggcattgtcatatctcaaatcttcaccagtatccaacttgaaagtaataatttataccgattcatcttatcttataaatggaataacttcttggatttattcttgggagagaaattcttggaagacaaaaaataagcaagatgttttaaatcgcgatctgtgggaagaactccggagggtttcagataatttagaagtaacatacgactatgttggtggtcatataggagtaaaaggaaacgaaagagcagacaaaattgcgacttcgtttgccgatttaaaagaagataaattatatgagggagatatagaaaattattcgatacccgatattgtaagtggcaaatttctaaagtccgattcagtaaaggaggtgtcaaaaaagaaaaaaagtagtagcaaaaaaccttacggctatgtctctatggttgctggcgatttcaaattctacaaagactggaatatgtgcaaggcggaggttctgggaaagaggggtgcgaagtatcaaaaagttttttcaaaacaagaagctgatttactaaagaatcaatggtcggatgtataagagactgtttgcggtctcaccacgagagatagaatatacactccgagtctcttcgtcacgtaattttgttaaaatttggctgcaaaaccgtctatttttcgtcaccatttaccgcggcgaatggctactcaaactatccaattttcgcgggcgaattttggacatttcgcctatgcattagatggtggatatgctcttatacgatgaggttggagattggctcttagaatcgttgcaatgtgtggaaaaagtaaatttcgggctacccatcctctatctcacttttgatttcaaaataaaaacccgcctacgattagaacgtagagcgggtctatttgtatttcagcgtcggatcaatgcttcggcgagaatgaaatcgacatcatcgttgatgttgatcgatctctctttcggcataacatacgcaataactttgggtccccagagccgaccttcgcgaacaatagtgggaagtgacgcgtatatggcaccgtttcttatgtacacttcatcaaacacttgcctcggtagagggtagtcagattcaggagtttcttcgcgggcacgtaagaaaccctgggtgtccatcatatacgtccgtttcggatgcacgttagatttcacaacagacaataccgattcagcgttgacattatttccaagcagtaaaccgacagcattatcaatgtctgatgcgaggcatagcggagtagtcactcgtaaaaggaccacagctctcggctcaataccaccttcctgtaccagcttctcatacgttgatcggaatacaccgaacgatggttggcctgctaccgaaagtgaaggatcgtgccgccaaacgtcaattccactgatctgtcttgctgccagttcaatttcgtcattgtcagtagtaagaacaatacggctaagtgatcttgcctgtactgctttttcaagcatgtaatgcaacaatggcttcccggcaagcatacgaatgtttttctcagataggcctgtagaaccgccacgcgtgggaatgattgcccatacttcttgtgatgtattcatttctcctcctttccgggaacgatgtcatgtaccgcaagacgttggaacggcttactctcggaaagcaaacgttccatatacaccgctgcgtacataggtccgcgtccgataagaataatgagagaggcaatttctggtggaaacccaatgtcaaggagaattgaaccgcctgcggcctcgatgttcatgtatctgccacgctcggaaccgacgattgactcaatatctcgagcggtacgaacatgctttccaatgtaagtatgttcgtcgcataatttcataaggacaattgcccgcggatcttttgaatggaatcggtggccgtagccatagaacgtatttttattatccaaccgttctcgaacccactgctctacacttctggcttcggctgcttctttaagcatttccatcgatctctgtaatgcgccttgatggaactctcctgatcctgtgaggaaaccgcctaccgccgaattcaaaaatggcgagcgacaatccgcacccatacgcactgcgatggtactctgaccagtgacaccatgactgacatgcgagacaataaccgcgcgaagtaagtttgcctcaacttcactcggtcttcgatcgaagagtaagaggaaaaccatttcctcgtagctaaagcgacgtatgatttcttcttggtctacccctcgagtgagaagtttgtttttaccaacttcagtgatgtttgatttccaaggtacttgttttggcatattgaatctttcagttatattttcgtttctgatgtaatacaacaccagtatctcttgattgtcaacaaccccatattcttgatagaatgacggtatgactaaaaatcttagaataaaaaaaggatatggtgatttcggtaatttaagcaaaaactacgacaaagctcggaaagaattccccagtgaagctatgaattacatccttcataaaattgcgaaagaggaaccatatattttggacatcggttgcggaactggaattgctacggaacaactatcagaaaatggagcaaaagttgtcggaactgatatagatgaccaaatgatacgacaggcgaaagcagacaacaagtacaaaataaagtataaggtcgctccagtggagaaacagccgtttgaggatggcacctttgatgcaataaccgcgttcagctcctttcactggtttgcgaacaaaatcgctttggatgaaataaggagagtgctgaaaccaaatggatggttttttgtcatcaataaaaacgaggcgggtgatttcaagaaaagaaacaaagagattctcaagcgattcataaatcaggaaattccggacatcaagaaagaatacgaccctgcgaaggtagtgaatgaaaacggtttctgttccgcccaggatcaatcgttttttgtcattgaatatttcagccctgaggaagcgatctggtatatccaaacaatgagcgtgtggaatatggtcgcagatgaaaagaaagaagacgctattaccgaccttaaaaaacacttcgaaaatattattaaagaaggtcgagttgagcgacagcttgagattaaagtggtgggagctcgtcgagctcaatgagggatttgctcctcagtttccatttaagagccaatctccaatctcatcgtatatgcgaaacgagacacgaagtgtatcttctgcctctcgtggtgagattggagattggctctaagaaactggtcttatgtctcatcgaggtctgaagtgtccaaaaatatgggcgaaaaacgagctggagtccgaagtgaatcgagattcaatgaggacgaagcgaagttttgcagtcatatttttggtcatgacgacccgaaacgggggttttgactcatattactgtggtgagacataagatcagtttctaagacgattatttatgtggcaaaagttatcatatatttttataggttctttcgcagtcggcgttgcttatagctcactttattccgtcggatacattgaaggtttgtttttgattttgctttcagtcgctcttttactttatggaatatcgattgccaagccatctgctcggaaagtctttttatccatagctcttatatttttttcgcttgcggttggagtaataaggtttgatgtttcaaacaataacgaaagaagtgctgtagatagcttagtcggcatggaagttacaatccaaggcagggtagtagacgagccggatgtccgagataaaaacacacacctcaaagtcaaagccgagaaactattatttgccgatgaagagtttgctatggattccggtatgcttgtcatatcatcactttatccgcaatacgaatacggttttgaagtggagataaaaggagaacttcacaagccggaaaattttgaaaccgaatccggtcgggaatttgactatatctcttatctttcaaaagatggcatacattaccaaatgttttatccggagattgtcgtaatttctgaggatgaaaatctggcgatagtaggagctctctttgccttcaagcaggcgtttgtaagtaaaatgagctacataattcctgaaccggcttcatctcttgctgcgggtcttgtggttggggccaaacgttctcttggagaaaatattcttgatgattttaggaccgtggggcttatacatatagtggttttgtcgggttacaacataacggtaattgccgattttgtaatgaagttgttcggttcttttttcaggcgtatgctgtcgattggaataggtgtcggagtcataatcgcttttgcgattatgaccggcggttcggcgaccatagtcagggcttcgtttatggctatactcgctctgcttgctcgtgccaccggacgagtttatacaatgactcatgctcttgtcgtggcggggttttttatgattgtttggaatccgaagatattggttttcgatccttcgttccagctttcatttatggcgactttggggcttatactcggagtgccggtagtatccaaatatctacactttattccggaaaaagccggtcttcgtgaaatagtctccgccactttggcaacccaaatctttgtcttgccgatgattttgtggatgatgggaacattgtctatagtttctcctatcgtaaatctactcgtacttccttttgtaccttttactatgcttctggcatttcttaccggagtactcggttttgtgtcgtacctatttgcagcactgccaggttacggagcgtatttattactatcgtatatgctattaatcaccgattggtttgcccgtctgccttttgcttccgttacgataaagttctttcctttctggacaatggtctctgtttacattttttatgcaatctttctcttgtggtggggtaaaaaatttaaagatgatctacaagtagaggaattgcaaaaatccgcttttaaaaattaagtatgacgcatcttctttactttcagtcggtttttgtttaaggtctacggcagagtcgaaccggtcgacacaggcaaagacgctgccttgaagcgtaaaatctaaataaggaggacctatgttcaggacttcagatgaatggatcattgaatatcaacaaaataacgcactttggatccatgatggaaacccaaagcgaccacatgcacttcttacatcaggaaaacactcaaacggctttttcaacagccggttagtgatttcggacgaagtattgttatacgacgctgcttccgatcttatcgaattgttcgacatacaaggaggagatatcgatgaggcacaaggagtcgtcgggccgcaaactggggcaacaaaacttgccgaatttgtgagtaatcagataatgtcttttaccagagacgactgcttttttgcttcgcctgcaaagattttaaacgacggaaaaaaatctttggtctttcataactatggaaaatctcttgtgaggggtagttacgtgcttctttgcgaggatgtgataacgacggggggaagtgtcgacctcactattgaggcagttgattctgtaggtggggcatcaatgccgtttatacttactcttgtaaatcgttccggtcttacggagataagtgggagagagattatttctctcatcgatcgccctatgccaatatggacacctgaagaatgtcctctctgtaaacaagggtctgaggcaattcgaccgaaagacaactgggatcgtctgaatgcaaggtattgaaaccctcaataatacgaaaagagaacggaatgaaaaagacactaacaccggcggaccgtttgattgttgccgccgatgaaattgcttcggctacgacatagccaaaaagatcttaatcaacgacatcagctcgcccactcccgtggacgagctttttgttagcattacgtagaagtgaaagtggcagtggaccactgtacttcttgcttttgagaataaaataactcgtgctattctcttgctatggaacaatacatactgccttcgggtaataaaatagatatagacggggtgatagaggcttttgacggtgtggaagaagactgtgtctatttactggatcttgaaaaaggagatgtgggctgtattgaaaactcacctggcaaaacaaataaaagtccaaaaaaaggaaaagcggaagagatgattaaaagcggtcgttacgtcgccattcctccactgcctcaaaaagaaaaattaaaaatcgcccgggactttctggaaatgatgtccgtagaccctgaagatgaagacaaagaggttattgaggtggtgagtaaaattttaaacggcaaatggaaggataagtcgtatctcattgaagaaattatttactcgtctgaaacaggtattgaaatcgcatgggaaactttccgggacgatgtattgtgggaaaaagcttgtgattggtttgacacgttgcctgtagaagtggaagtcgagtttaaaggatgtggtaattgtccggcttgtaaattgtttgggagcaatccaacggaagaggaagtaaaggaagtttttgaggaaatgaataaaagtacagttgcttttggtgaggaagaaatgctggcgcttaaaggtcccgatgaggaaatcatggataattattataatgctatggagctcgcgggcggcaatcggtctgaccgcaaaagagcggaaaagttactgcaaaattcgatcaaacttgatccgaacaatgtgataacttacgtgggtcttgttcatttgtattatgaatcgggagacaaagataaagaggtggagaatgtaaaaatcgcctacgagaaaacaaaacaaaaatttcccaagtggccaacagagatgccgtggggagtgttgagaaacagaccgtttttaagagctataaaatatcgcgccggtttgcatgccgaagaaggcaaagaaaaagaagcgataaagttatacaaacagatactgaaaatgaatccgagtgacaatcaaggtgtaagatatttggttgccggactatacgccggtataagcggagaagaaattgacactatggtcgacgaaggcaacgaaaagcaagattgggacaaggtggagaatctacttaaggaacaaaacaaaaagcacaaattctggaaagaacccaagtgggattagaacagaattgcctaatttctatagcttggaaactgaaaaaagttgctgataaaactgcaagatggtagtatatatctgtagccacaataaagattagtttataccaagacctgatctgttaggctgctgtaataaggtgctttacatcctgcgggatgtaaggtttaccgcagagctctaaaccgcgactcgttcgcggtttatctctatctgattttgtgatattttaagggttatgaggtacactatagggcttgacttaggtattacatccgtagggtgggcaataattgatgaagataaaagacgcatcattgatttaggggtgcgttattttgataagcccgaaacacctgatagtggaaagtctttggcagaacctagacgtttagcgcgaagtcagcgccgacgtttagcgcggcgccacggtcgactggatgcagtaaaagaagcttttatgagggcgggtttgtcaaaagatgaaattaggaaagctcactcacaaccgaacaatccttatggaatacgaacctgcgcactcgatgagcttatttctccgcaagaactctttattgccatataccacatagtgaagcgacgaggatataagagtaaccggaaagaaaaaagtgacgcaaaggtagataaagagcgtggagctgtactgtttggcattcagaatatgaagatctctcttgttaaagaaggtgtacgaactgttggtgaactttttcacaaaaagattgttgaaaatgaggacaacatttcttttgaaggtgtgcgtaataaggctgggtcatacaagaattctgttactcggggaatgctcgaagatgaactcgggcagatattttcagtccaacaaaaactgggtaataaatttgtaactgatgaacttgtaaaaacaattgttgaccatgacaccgaagataatgcaacgggggcttttaatagacaaaaacattatgctcaaggcggatttgagaagatggttggtctgtgtacttttgaaggaaaaacaaaagagttgcgtgccgccaaagcgacatatgctttccaatatagttcagtattgcagaagataaatcacgtcgttataaagaaaggtcaatatgatagagggcgaccgttaagtgaagaagaaagaaaaattgctaagaaatacattttttctgtcaaaactccacactatgacggacttcgtaaaaaattgaacttaggagcaagtgatcgttttaatatggttaattactttatcaaagtaaaaccaggagaagagattaataaggagaagttgataaaggaagcggagacaaagacgaaattaccttcgatgatgaattggatgaagttacgtgacttgttagaagaaactgaccctaactttgtacagaaagcagatgatgacaaaacgatttacgataggattggaacggtactttctttgtataaaacaaacaaagaagttaaggacaatttaatcaacggtaagtacgctgttgagaaaatccctgaaactgtaatagaagcaataacttcttctgatctaacctatgactctttcggtagtctttctctaaaagctctctataatataatcccatatttggaagccggtgaagattatgataccgccatatctaaagcggattataaagaattcgcaaacatcaaacgacacaaattattgtcacttaagcaagatgactatcgcattaccaatccggttgttaaacgaaccatatcgcagactatcaaggtggtcaacgctattatcgataggtatggttcacctcatcaaataaatattgagttggctcgcgatctttcgaaaaatttcagggaacgcaagaatattgaaaaactgcaaggagataataggcttgtaaatgaaaaagcaaaagaacgcatggtcgagctcggaatccctgaacccaaaggacaggatattttaaaattccgtctctggagcgaacaaaattgtaagtgtgcgtattctggtaaagcaatttacgaaaatcgcctcaatgaggatgggtatgtagagattgatcacgttattccatttagccgtagtttagatgactcttttaataataaagtgttggtactaaagcaagaaaaccaagaaaaggggaatcgtattccttacgagtggttcggtggcaatgaaaataaatgggctcagtttgaagcgttggtaaaatcgtttgtcaatattgctccacgaaagcgagcgaatctacttgtgaagaagtatgtgggagatgacttggttgcacgtgccctcaatgacactcgatatatttcaaaatttgtaaagaattacattgagaaaggattagaattttctgatcctgatcataagaagccggttaatactgtaaacggtatggcgacagcttatgcacgcaagcgttggacactttataaaaatcgggaggaaaatctaaagcatcacgcacaggacgcggcactggtagcggtaatgaatagtaaaactgttaaggatattgcgaaggattctaagaagggggagataataaggtacttacaattgcataaaaaactcgatgaattgcccgagataaatgctgaagaagcacataaattagagaaagaaataaaggaagaagaataccgcacaaagctcaatgacccttgggaaggtttccgttatgaattagcggcacgcatggaagatgatccgatgtatgaattagaagcacataaagatgaaattctgtggtttaagaatagagaagaaactgatgatgaactaaacataaaaccaatctttgtgtcgcatatgccacgccgtaaggtgagtggtaaggtccatgatgacaaggtgcgcagtgcaaagcgatttgaacaagagtattcatcggttaaagtgccgctcaccaatcttacagaaaaacgtcttgttgaagaagggttgtttcttgatccaaaactcatgcagacgcttctttctcgtctgcgtgaatttaatggagacgcgaagagggcgtttgcagaaccgctctataagaccatgaaaaatggagaaaaaggaccactggtgcgttccgttaagcttacgggtggacaaaaatcgggtctattaattaatgatggagagggaattgtgaagcgacaatcaatggtacgcgtagatattttcaccaaagctaataagaaaggtaaagacgagttctattttattcctgtttacgcatatcacaaaacgaaaaaagaacttccgacaaaagtgtgtactcgaggaaaaagcgagaaggattgggatgtcctaaacgataattactcatttaagtttagtgtatatccaggtgatttgttgagtatgacaaaaggtcaaaatattacaaaaggatattatgttaaggcgagggtttcagtggcatctctagtggtagagacacataatcgtactgagcaaaagaataccggcattaaatcgcttgacaaattagataaatatatggtagacatattgggtaattataataaagtgcatcacgaaaaacgtatgccactatcataaataaaaaaacgatacctaataggtatcgtttttttatgtcttggagaattatacatgtaggtaacgagagtagactttcactaaagcagaataatctttcccttattcaaggcgatcagaccttctctctgccactggaagacattggagtactgctcgtagaaaatcgcggtacgcttcttaccggtgcgcttctaaatgcttgtgtgcaacacaaaataacggtatttatatgtgatgagaaatatatgccaagtggagtgctgttgggatatcagcaacattccaggcaagttagtgcaatcaagaaacagttacagtggtcattgccgtttaaaaagcaattatggaaaaaaattgttgaacaaaaaatcttaaatcagtcagaagtatttaggcttgtaaaaggggagaagtctctgaaaatacaatcatacgttaattctgtgcaatctggtgataccaccaaccgtgaaggagctgcggctcgcgaatattttcaaaatattcttgatattcctgctgtgcgctcatttgataatcatatcaatgcagctttgaattatggttatgccgtaatccgtggtgtaacatctcgatcgctatcttcgtatggcttcttaacaagtgttggcattcatcacgatagtgaacttaacaacttcaatttggcggacgacataattgaaccctataggccatatatcgacagatttgtatttcaaaatatttccaacgttgcaggttctcttactaaagaagaccgaatatctatcgttaatttacttacagagccggttgttttattggggaagacgtattctttacaacgagctatagaaattactgtacaaagcttggttacatctaccgatgaaagtgaccctataaaattattattaccaactttatgaataatcgatttatgagacttttagtaatgtttgacctgccagttgtgaaggatattgataggaaatacgccactcaatttcgcaacttcctaatacaggatggttatgatatgcttcaattctcggtatatacgagaatttgtgccaacattgattcagcagaagtccatacgaagcgactcttgtcaaatgcaccaaataatggttcaataagaatattgactctgacgaacaagcaatttgccgacgcagtgattgccgccggtaagaaaaaaccacaggaaaagaaaataaatgaatcacaattacttcttttttgatgtaaaaatagccctaaaacatagtgttttagggctatttttcagacagatta

SEQ ID NO: 938 - DNA, 9883 bp, synthetic construct
  source 1..9883: mol_type = other DNA
  misc_feature 1..9883: note = Synthetic
cttccgatctaacgtgacgaatgtcacgatcgagttgccgtgtgccgccaaacaaccgaggagagagttatgaagaaatttctgttcgcctttctgttcgcctttatgctggcggggttcgcctccgccacagaccagccggcgccgactcgcgtcttccaaggcgcgagttcggaagcggggtggcccgccctcgagaggcaactcgagaccgggggtttcattcacgacggtgtcatcgacacggctgccctcgcgttcatcgcgagtcagcacggtcgggcgccggctgaggtgagggagaatcccgaaaccttcctcgctctgaatgggctcggtccgaccattacggtcgccgagttcaagcggatcgggcaaggtcggggtttctacctcggtccgctgctagcgacaccgatggtggctaccacggctgaagcaccagcggcgacgccgcttcccgtggcaacaaccacgccaccaagggcacccgtggctttggtcactcctccggaaagtcgggggcaagaccagagtgacgagcgtctccgcgtccaagcggagcgtgtcgatgccatcaacgccaatctggcggataaatcccgccagattgctcgtcttgagcaacagctcaggacggcacaggcgactggccgacaggtgacgaatgtcgctcgcgagctcgaagccgccaaggccgagtttgctcgcttgcaacaagcgctgccggaggtggtgggcgctgcgactcaaatcgcggtgctgcccgtctcccagcggttaaacgctctgggggcggaggtggcgggtgtccaggcactgccaatcgtcaagtatggcgactggcttgtctacggcgcagctgctctcgcactggctctgctcggcacaatcggcgttggttttaccaatcgccggcaagccaagcaggcgctggatctggccaccgcagccaaggctgaggtgtctcgtgtgaacgaggcatcacaagccctggatgagaaggtcgagaacgccgaggagcgggtgactgccatcgccgagaaggtcggcctgaaggtcaaggacgttgtctttgaccgccggctcctactcgccgacttgaaggccttgcccaatgaaggcacctaccggagtgaagtccacgtcattcttgatgacggatgccggaccacttacgaggttgccctcaagaagctggacgaggagtacgtgacggtcgagggggtgctttaccaaacgcaatccctgcggatcgaaaatctcccagttcggttgaagcgggcgggcttcaacggccatctccttaaggcgattaacgtcgtcgacaaggacggtcggtccgtgctccgggcggcgtgatgacggtcgggaacctgcgaagcaggttcccgaccgaattcctctagtttaaaactagagacggttagaggagagatgagtcagtcttagggattgagccatctcgctttataaagcgcaagaaagttactgattacttctagctttgactagctgtagcggtaacgtgaaggaccggtgaagtcttggcgattttgaccaattcttcccaaccgacagctgtcttgtggacgattacttctagctttgactagctgtaacggcacttggcacaatggtcatccgacacactttcttgactgcttccagatcttaaaacaagaataaaaaccaacactaaagctgcccaagaggcggctttttgcatttttataaaaagtatggtataattagaagagtagccctttccaaccgatctcttaacgtttgaggagcttcctgtgaaaaaaattttgtggccagctattttttggttagccggcatctttggtgctggcgttgccgccgccgagacggtgagcatgacctacacctacggccgcttcacggtcgaggtgctgggtgaccgacagcgagtggtgggtggtgaatttacaccgcccctgcttatgccggtaatgcctagccgtaccttgcgccagactggtcgtccgccggtacacgttttgctcatcaactacaagacaaaagagctcttgtattaccgccgtaaccaaaacgggctgtaccagccggtgattggttacgcggtggtgacaccggaggcggattttttgccgcaaccgattgtccggggggtggtggagcgcgtggtgccacgaccgacttggtgtcctaaggtgggcgggcaagtgaggcggatgaatccacacctgcctcccggctgcctgccctacggtcatccactcaatcccatgggtgattaccggctggacatcaactggaatgtgcgcgggtgggagttgattcgcctccacggtacgactggctacccccggggcaatttctgggacgaggaaaccttcgggtgtactcgtctggaaaatcaagccatcgccaatttgttggcgttgcttggaccacgtgccgtggcggaaggaatcgaggtgattgctcaccgcgacaccatcaactgggcgcagttcggacgttgaaagggtggggcggggggcggcaaagccgcccccctccccacccccaaaaccttcacccacactgggcggaggttttttattaccgacacccaatcattcagacaacatctttttagattttttgctatagttacaaaatgaaacaacccttgctaatttactggttacgacgcgatttgcgactagccgacaatccagctttagtcgcggcggtagcgaaaagccgtcaggacaacataccgttgctaccactttttattctggaagattatatgctgaaagctactcccgaataccagtttggttacccgagccggttttttgtaacgcaagctctaaccaaactggccacgcagttacctgatctgactttagtttgtggcaaggcggttgattatttaataaaactcaataaacagtacacgctgcaaatttttgttaatgatgatgtctacattgatttttataaacaactgacaaaattaaaagaagcaggtttggaagtggtggtttttgaagacgctttatcggtacccaaagaaacccgcacacagaccggaaaactctacagcgtctttacaccattcaagaaagctgtctgggctgattttgtaaaacagcgaccgttgaccaagccaagcttggctaagctaccagacctaccggcgggagtgcgggacttgccagctaaagtcgcatgtgaggcaaaaacggtttggtcactttttgccaaggcacgggtgtgtaaagtcggtaattgtttagtagacctggatgaacacttgccccttcccgaattgactgactggtacactgacgaagctggagctaataaacatttcaaacaatacttaaggtcgggggatttagattcttatgataaaaaccgcaattcattggaattagatgtggtagaaaatggcaagacctcaaagatgagtttggctttggcctggggactgctttcctcgcgtcagctcttagatcagctaaggcagcactttggagaatcttttgctaatcctttttccttgcgagttagtcagggcgcacttacttacatttcagaattgatttggcgagaattttatcgttaccagctttttcatcatccagaacttatgaattgtgaatttcaggaaagatttagagggacgattgcttgggccgagccagttgaagctaagaggcgatttttatcttgggtgaagggtgagactggttaccaaattgtcgatgcggcaatgcgacagctggccagtacgggttggatgcataatcgttcgcggatgatagtggctagtattctcaccaaaaacttaggtgtagattggcgttgggggcaggagtattttcgagccacactcattgatctcgatgaggcgtctaacaatggtggctggcaatggggcgcttcggtgggaactgaccctaaacccattcggatttttaatcccgatttgcaagccaagaattatgatgccagtggtgcctaccgagcacgctggttgggtgttggtagtggtcaatcaaaccaccccaaaccaatagtcgaacacaaaaccgctcgcaccgctgccctaaagcgctacggactagaaggagctgcggctagggattattaaaacattacccagcgcacaagtgcagggtgtacactggcttgctctctccgagaattgtcttggagccatctccgagaatcgaactcgggaccttagcgttacgaatgctatgctctgccaactgagctaagatggcgcgcctagggcgtatcttagtacactggcagtttgttttcaacgagaaaatttgttattcttcagccactccaaagaaaggagcaagccatcgtagctcagttggtagagcgtcgccatggtaaggcgaaggtctccagttcaatcctggacgatggctctgattctagttgcaaaaatttatttttctagtactgttaatagtgcaatctgcaaaaaaggtttttataccattacctgatctgtagggttgctataataaggtaaattactgataaggtaatttaccgcagagctctagaccgtgccagcaatggtgcggtctatctcttttcatggttcggtgtttgtagtatggttaagctactgtttagttgttaaacacaagtttatgaaatacaccattggcttagatttaggtattacgtcggttggttggtctgtggttaatgatgataaaaaacgcattgaggatcttggagtacgaatatttacaaaagcagaaaatccaaagtcgggagcctcgctagctgaaccacgtcgtgtcgcccggtcaatgagacgtcgtttaaggagaagaaatggtcgcttgcaagcagtaaaacgaatttttatagaagcaggattgccaccggatgttattgtctcagctcacgccaaaccgaataatccttacctaataagagcagaggcactagatcgtgttttgacaccacaagaattatttatcttggtataccaaataactaagagacgaggttacaaaagtaatcgaaaaaaaatcgatcaagtttctgacgacaaagaaaagcaggcggtattaggcggaatacaaaatatgaaagccttattagaacaaggtggttttactacggtcgggcaaattctacatagtaaattagtggaacaacgcaatttacatagctttggaaccggtgtgcgtaatcacgccggttcctacgaaaattctgtttccagagaaatgcttgaagcggaactgaaagaaatttttttaacacaacgcaagcatggtaatacatttgtaacggatgatttagaacgggctgttattggttacgatgagttgggtaaggcaacgggagcttttaatcgccaaagacattatgttactggcgatatcttgaaaaagatggttggtatttgtacgtttgaaaatgaatcgggtaaaggagaaatgcgcgcagctaaagctacttatagttttcagtattttaaccttctccaaaaactaaataatctaaaaattgatgatttagcagaaccattattgccgccacgaggattgtcgctagaagaaaaacagcatctgatttcctattttcacactgtacaagaaccctcctatcacagcgttaggacacagttgaaattgaagccaacagagcgtttcaatatttcctattttgctaagagacccaaaaataacgaaccgctaccaaccgaagctgagatacaaagccaaaccgaaaaaacaaaattttccaacctaaaagactacatacatttgaagaagataattagcgaaactaaccaagctttttggaacgagatagatagcaaaaaatatattattgatgaaattgccacaattttgactttatatcgtactgatgaagatgtgttggctaaattagatatgattgtagatggggaacgtgtagtaattccagatgatgtaaaacaagcactgctaggcatctcgtttgcaaaatttgggcacctttcattgcgtgctttgcgtaagttgattccacacctagaaaatggtttgcgctatgatgaggcggtaacggcagctggttatggtagtaagttagcgaagcgtcataaaaaattaccacctctgtcaaaagacgataatagtattactaatccagtagtcaaacgcacagtagctcagactataaaagtcataaatgcgattatcgatcgctacggctcaccgtttgcggtacacattgaattggggcgtgaattgtctaagagtcataaagagagaggggatatagaaaaacagcaaaaagaaaacgccagcaagaatgaaagagctaggcagactatcaaagaaacttttagggttttggaaccaaaaggtcaagatattatcaaatatcgtctttgggaagagcaagagaataaatgtgcgtattcaggcgtgagtattgacgagaagagattatttgaagatgggtatgttgagattgaccacattataccatttagtcgtagttgggatgacagctttaacaataaagttttggtgatgaagcgagaaaaccaacagaaaggcaatcgcacaccgtacgaatacttgggtggggaaggtgatcggtggagagattttgaagtcttggttgaatcatacaagcgaatgcattatggcaaacgtcgtaagttgttactaaaaaaatatactgaagatgaactaaccactagagcccttaatgacactcgttatatatcgcgttatataaaaaactacatagaaaattctttagagtttagtaaccttgaagacaagagaaagaaacgagtcatcactatcaacggtatggcaacagcttacctgcgcaagcgttggaccttcaataagtcaagagaaacggatattcaccacgctcaagatgcggtgattgtggcggtaattgacgattcgatggtccagcaagtagccaaacattctaaaatgggtgaagtgaaagaatatttacagttgcataaacgagccgaaggtctggttggtatctcagagtctgaggagacggaagctaaacagcagttagctgataagcaagttaggcattcaaaacttttcccactgccctgggaaggctttcgtgaagaactaaatgcccgcttgtcttccgacccacaatttgagctcgaagcatgtaaagataaaataccatggtataaaaattgtaccttggaagaactaccgtctttgcgaccgatttttgtctcacgaatgccaaagcgaaaagtgaccggcagagcgcacgaagatacgctacgtagtccaaagtggtttaagcaacaaaaaccacaatcttcagtacgcacacccttaacaagtcttaccttagaaaaattacgcggtgaacaagccctctatctagacccaaaactcaaaatggctcttatcacgcaacttgatttgcataatggcgacgccaaaaaagcttttgcagaaccattttacaagacaatgaaaaatggagagcggggtccacaggtaagatcagttaagttgatcgaaaccgggcaaaagtcaggactcctcattcacaacggtaatgctttagtggatagagcttcaatgattcgtgtagatatatttgtaaaacaaaataaaaaagacaaggatgaattttattttattcctatatacgcacatcatgtagttgaaaaaaatttaccggtcagggcttgtactgcgggtaaaagagaaactgaatgggaaaaaatagatgatagtttttcattcaaattcagtctgtacccaggtgatctcattaggattataaaagagggagaaaagcgtttctggtattacgtaaaagctggtatttctacaaattcatttacagtcgaatcgcatgatggttctgagaccatcccaagtatgggaattaaaacacttgacaaaatagataaatatgtggtagatgtactcggtaattatcaccaagtcagtcgagaacctcgtttgtcacttcaatcaaaagcagagtgattgacagcttttctgcctaaatggtggtagaaaagattatgtcatggaggattgttagtattgccgagcgttcgcatatctcggtgcagagagctcagctagtaatcaagcaatcggctgaggagtaccatgtcccattggaagacattggtgttttgttgttggaaaaccatgctactacactttcaactgcgcttatggcagcttgtgtagaacataaagtagcactatatgtgtgtgatgaacgtcatctgccgtgcggagtgttgttgtcttatcaacaacactcacgccaaagcaaagtgattggtgagcaactaaactggggagagtcgttcaagaaacgtctttggcaaaagattgttcaacaaaagataaacaatcaacgtctagtactcgaagcttacacaggttaccctcaaccagagttagaacgccattgcgcagaagtgcgttctggtgatactttgggacgcgaagcaacagcagctcgacattatttttctaaacttttgccgccgggtgtaaccagaggtagtgaccatgttatgaatcacgcccttaattatggttacgctattgttcggggagtagtcgctcgctcgttagcggcatatggttttgtcaacagtatcggcattcaacatcgtagcgaactggataaccatgccttggcagacgatttaatagaaccctaccgaccttttgttgataaattggtattgcaacacattactcccggagttgaagagtttgatcggactaagcgaattgaaattcttaaggtactgactgcaaccactctagttgaaggaaaagagcagactctacaacgagcggttgaactaaccgcccaaagtcttgtcaccgctaccaccgaaaaagactcggaacgactgcttttgccagtgatagcttatgattaaacgttttatgcgattggtaacaatgttcgatcttccgaccgaaacaaaaagtgataaacgtcaatatatagagtttcgtaattttttgttgcgagacggttacgatatggtacagttctctgtatacgtacgtttgtgtcgtgatggtgatactgcccgtagacatatagaacgtttacgtaagtatgctcccaacagtggtgcggtgcgaatactgttgataactaataagcagtacgccgaagccatcattgttgccggcgaacgtaagtcgcaagaaaaacgcataaatgattcacaattactacttttttagatttattttaatctgcaaaaaacccttacagtattgtactgtaagggttttttgcagatcgattataccattacctgatctgtaggggagctataaccgctttatctgctctaaagcgattatattattataccattacctgatctgtaggggagctataaccacggatctcccagagagccggatcccattattataccattacctgatctgtaggggagctataactcttttgtgagtccttcatcttctccgagaattataccattacctgatctgtaggggagctataacccagcaatctcccaaatctcttcggtgagattataccattacctgatctgtaggggagctataacaaattataaatgattgaatcatccctgtctattataccattacctgatctgtaggggagctataacccgcattgccgccgccctttgacactgacgattataccattacctgatctgtaggggagctataactcaaggtcgtactaaaccggggaaaattgtattataccattacctgatctgtaggggagctataacgtacagatggcactatcaggtcatcgtaaaattataccattacctgatctg

SEQ ID NO: 939 - DNA, 7275 bp, synthetic construct
  source 1..7275: mol_type = other DNA
  misc_feature 1..7275: note = Synthetic
gtaaatttgcaaatttacgaatcataaaacaccgatccactctttcgcccctttagggctcctcctttcctgcccaatttcccgggactacgccccgggctattttcttcccggcctttcaggacgctttccgcatttcgaatttcgcttttcgctttggaaccccgttcaccttcacgaatccccctcgcgtaagcggacatccacagtcgccggaggcggtggcaaggatgggcgggggcaggtcttagggggccattgcgcgggtgcgtaaacacctaaggcccagtccccggaggggatcccgcaaaggtcggggggtgagtatggggaccaatactgagctggccaaaccgcaactaccaacccccaatctatactaaaaaaagcctttggccttttgcttggaaccgggagccgtctcaaaacgcttttatccaataagggataggaccgtttttgtcccaccgggtagccaatgattcacgccaaaggaaatggacccatcaggaaacacaaagggccgccccttggcggcccttgcgtcaaagttactgctcttgacccgatgtgactcctgcagagtcagggaaacgggctgcagtaattactttgccttgattccaccctattacctatgattactaagatggttagtcaagctcccgataagatttccagagggtcgctcaccatgggtctggatattggccaccgctccattggatgggcggtccttaaaaaagcaccggaaggccagattcctgaaatccttggatgcgggacggtcatctttcgcagcgaagactgcatgaattcccagcgcaccgccctgcgccgcagccgccggaatatccgggccacacgctcccgcattaaaaggatggaaaaggccctcgctcaagccggggtgctcacccagacccaactcgataaatttcatgcggccggacgtggccaccctgccccctggtggctgatggcttgttggttgtcgggcaagacctccctgctttccgccgaggagttttggcaagtgctgcgctggtacgcccaccaccggggctacgatgccaaccgcagctggcttaatgaggaggaggaagcggactccaaaaggacccaggaaacccgcgagcgcatggcggccgccggaatcaagaccgctgccgaatacctctgcaagctggctggttgcaagcccggcgacccccagccaaagttcggcaaacctttccgcgggacgaagcactccgtactttttcccaggtctctcattgaagatgaggttcggcggctggtggaggcccatgtcggcaaactgaaggggttggacgccaaacttcgcgaaaccttggtcggcacggacaaggagtcatgggcaagcaccccgtggttcgggggcaaacgcctgcccaagcgataccggggcagccttctttttggtcagctgatcccccgctttgacaatcgtatcatctcagcctgtccctttgagcctgagccaaaaaatcgggaagtcggtcgaaaggtctgttccaaggccacttgggagttcctcaacttccgctgggccatggtcgtagccaacatccgggtttatgtgggcgggatgcaacgcgccctgacctccgatgagacgaagcgctttttcaatgtctgttgggatgagggcgacctcagggccactaccggagccaataaaatccagaaaaactccgacaaagttcgctcccttcttggcaaggctggggtcagtcttgccggcggtgacaatcttgaccagctggtcgtcctgcccgattccctaaaggccttccggctggttccagtggccaaagggctggctgcgtttcggcaaatctggtcctgcgccaacgagcatcaacgccgctggcttcgctcgaaactgctggcgcgtcaaaagcttgccgcctcctccatattcagaattcccaaacccatgttccaaagttggaaggacgctgccaacaccaaagggcttttccaaggaaaggacgcgaagcttcttgaggaaaaaattggcggcgatgttccccaaggccgggcggcctacagccgccccatcctggtgaaggcgtttgaggaggtcatggacggcaaggacccacgggaggagaaaggatgtcttttccgtcagggagagacccccttggaagccaaaatacccctagaccaacgaacgaataaccacctcgttcgtcaccgcatccgtatcgcagaaaaacttcgtaaggacatcattacagaatatgcggggggtgactcccatgccttcggtgatgtggtcattgaaatcaaccgggaccttccaagcctttccggaaagaacgccgaggcaatcgccgccgcggagacctccaagctcaagaactttaacgatgtaagggagaggctggaagccgacctcaagggacacggggtcagggtgaccgccgggctgattcgcaaggccaggattgccagcgaccttgattggacctgtccctttacgggccagaaattttccgccttggaactggtgcgtggcgtttacgataaggaacacatcgttccccggagcacccgcccctccgatagcctttcctccctcgtcatcaccccgaggaaggtaaacgacttcaagggtaaacgcaccggcctgcagtttgtgaaagaggaaggtggcaaaaaggttcccggcaccagcctttccgtcatcacggagcaacgttaccgtgaatgggtggagaagctctcccctcccctgaagacaagggacgacattcgccgctgtgaaatccgcaaaaggctcctgctcaccgcccatctgccgaaggaggacgaggttggttttcttccccgtgacctcacccagacatcctacttggccaagctggctctcaaggaaatccgcaaagcctttgaggcggagggggtgaaaatagatgtgcgtcccctgcccggcctcgccaccgccaccgcccgaaaggcttggaagcttctcggctgcctgactccagcttttcccgaggccaaagaggcacttgaggcaaacgacaaacaggccgtccggaaaattacccatctccatcatgctttggatgccgtgacattggctctgagcggggagattttacctcgggatggcatgttgctggccgccttggcttccaggaacagggacaaggccacccactctctcctcaacagaaaactgggctcactggtaagattcaacgaggaacgcgctgaggtggaggatttgccaaaagagctcaaggattccatctcaaagcggttggccgaatgccgggtggcccaacacatccccggcacatggtcgggcaccaaaagcgagctgaccatgtggggagtggtcaaaagagaggggggtaaggtaacgctgcgacaacgcgggccaaaagggcttaaggaggatagccttcgtgaagactccattattcaagctccctctcttcccggagtttttaaagcttcggacaattatggcgtcctcttgtccactccgccccagaacattcgatggaacaagccttttcaaaaaattaaagacgccaaaaggtttaagctcctccgaataggcacactcatttcagttcctagcgggaactttttcggattatggaggatagttggaattacatgcaggctgtcaggcgagcttttggtaaatttagttcaccctgccgccatcaagtcgcaaagcgggaagccagcatcgggcagagataatgtttctctaaactcgctcctaaaatcgaaaatggaagtactcagcagaaaccttgttggatgtcctatcatttccttgaagtaagttccccgaacgccctattgaaggtccgggataaacagatttatctcaatttaaacgacctcggtgaaagacggttgcctattgaggatactgcagccgttatcatcaccagtttcaattgttctattcaccatagttttttcgcaagttccggccgaatgaacatgcctgttttgattacctgtgaaaattacaagccgcaaagcgtccttcttccggctattcgcgcaacggatacatcgcttctaaggagtgattggtcttatgatgaaaagctgaaaagtatactctggcaaaaaactatttctgcaaaaatagaaaaccaagccgagatgcttaaggtttggggcgcttcgccagaagaggttgccaaggtgcgcggttgctcaaatatgggtccattccatgcccgcgaagcccgagccgccaaactttactggtccttctggggtaagaacctgcccaagggctttgcacgcaaacgccgttcaggaggcttgaattcgatgctgaactacgcatatgccgtgctggtttcagtcataacccagcggctacttgctgctggcctagacccagttcgtggttttggccacagattccgggagcgcacctgtgctctcacatacgatattatggagacctagtagctacggcggttgactcagacggggtgattcaatcccccgactgccgaaaaaagctggcaggcattttgttatccaatgagtctgtgggcctttttggcaaacagggcctacaactgattgaaaacgcaatacgaagtctccgccgcgctctactggaaaaacgcgccggtatttatcaaccatggaaattcaaatatacaaagtgggctggctattagtgacttttgaccttcctgtgggcacgccagcccaaagaaagatcgccacaaactttagggagtttctaaaggatgacgggtttctcatgcttcagtggagtgtctatgcacggccctgcgtgagcttcgcaaggcaggaaacccatctggcgagggtggttactaaggtgccagaagagggaaacgtccgatgcatcttcatcactcaggcccagtgggaacgttcctacatcctcagcggccagccttgttctaggcagccagccgaaggtctacccgagcaactgcaactctggtaaagccctcattttgagggctttaccaccaacaagtttgctcgcctaaaaattggaatcaaggcaaagctgaaaatcctcgctggggcagaacgcaccaagtttgctcgcctaaaaattggaatcaaggcaaagccggccggatcctaccctgcgaaaactatttagtttgctcgcctaaaaattggaatcaaggcaaagcagatcgggcacgggtagctctttttctaaagtttgctcgcctaaaaattggaatcaaggcaaagctgaatgtccccacaagcgacaaacttaattagtttgctcgcctaaaaattggaatcaaggcaaagctagaagctcaaatttggctgatggagttaagtttgctcgcctaaaaattggaatcaaggcaaagctcaatagctacgccatcaatgtgatagtaagtttgctcgcctaaaaattggaatcaaggcaaagcaccgttaggatggatacgttggaaagtttgagtttgctcgcctaaaaattggaatcaaggcaaagcgagtggcaggagcgcacgatgtacggggaagtttgctcgcctaaaaattggaatcaaggcaaagctgtgacggcatgcccgaacgggaatcagccagtttgctcgcctaaaaattggaatcaaggcaaagcttcatggctgccaacatcggctcaatcgcagtttgctcgcctaaaaattggaatcaaggcaaagcttccggcgggcgcaccgagcgagcctgtgagtttgctcgcctaaaaattggaatcaaggcaaagcagtaaggggcataccccgctttaccattcgagtttgctcgcctaaaaattggaatcaaggcaaagcactacgattgtgcctttgccagttttggtagtttgctcgcctaaaaattggaatcaaggcaaagcacccgcagcgtacggctactcgcctccgaagtttgctcgcctaaaaattggaatcaaggcaaagcagccagcaccgcacccgcttttgaaagttaagtttgctcgcctaaaaattggaatcaaggcaaagccaacaggcgttgcaggtcgccaactccatgaagtttgctcgcctaaaaattggaatcaaggcaaagccactcggctccgcacaggtgtcgaatgtaaagtttgctcgcctaaaaattggaatcaaggcaaagctagcctggaatggcggagttaagtttttgagtttgctcgcctaaaaattggaatcaaggcaaagctccttgccgataaaccgctccgggttggtagtttgctcgcctaaaaattggaatcaaggcaaagcactttccttcgcgaattatttatatatataagtttgctcgcctaaaaattggaatcaaggcaaagcaacttgctctttattggtggaggtaatgacaggttttaacatccagtagccttgcgcttgctaggcttgaatcggcttgccgtaatgcttttgaatcactccaaccccgttgcccatcagttcggcaagctttgggcgattctaataagcagccaaccagcagctcgcgtaggaggacctctttccgcttttcttaccccaaaacttcccttgatcactaaagcctaaacccctaacccccacacctttttccgcattacgcgtttttaaatcgacaatccgaaattcttaacaccttcaccccttcaccccttaatcccttcacccctatcaatccccgagccggctgtcggatttgaaccgacgaccagcggtttacaaaaccgctgctctacccctgagctaagcaaacctagacgttgtaggtcgaggaggacgtcgtccccccgtgaccagtccagttggtgtgaaaaaactctccccggggcttgtccaccctctcataggtgtgggccccgaagtagtctcgctgggcctgaaggaggttagccggcaacacggcattccgatagctgtcaaagaacgccaaagccgtgctgaaggcagggacaggaatgcctcgtttcgcggccgccgccaccacgtttcgccaacccttctgcgacttcttcacctcgccccggaagtagtcgtccaggagcaggttgctcaacttcggattcttgtcatacgcctccttgatcttccccaggaaccgcgaacggatgatgcacccgccccgccacatcagggcgatcccgccgtaattcaggttccacttgtactccttcgctgccgcccgcatcaacatgtaccctgtctcttatacacatctccgagcccacgagac

SEQ ID NO: 940 - DNA, 9856 bp, synthetic construct
  misc_feature 1..9856: note = Synthetic
  source 1..9856: mol_type = other DNA
ctggaccggttcgacttataaaaatgatttctttggattctcaatcaccgtaccggaaagttggcatattttcggaaaagaaaaaatgaaaacgctcatccaggaagggatgaagaaaacgcaagatgcaaatctcgttaatgagattgagatgaaaaaaatggccaaatcggcggaaatcacgtctgccagtttgttcctggtgatacgctatttgaatgaagaagtgatagaaaaaaaggtatctaactcaagtattactttgggagcggaaaatctttcactgcctggaaaaaaaatagatcgggcgaagtacgtcgacctgtttcgtcaaaacctcgcgaaggcgatgccgggagcggtcattaagacggaaaccagtaagatgctcggcggcagagagtttacgtcgttgaatattgaatacgaaaggcatggaattcacatttacgaggaatatttgatttgcctgaaaaatgattttgccgttcttttttccctgacttggactgacgattcggataaaaagcaactggacgccgttatggaaacgcttgcgtggaagtaaaagccggagcgcagtataccgtagccggtatgggcgactatccaaagttatcaaatcatccttcataaaacagcaaagcatgggaaaagtgggggatcaaatcaaacctcattttcacctcatttttctgacaaaacaacctcagtagccaaaatctccaaaaaaattaacctcattcaccttattttgtgacaaagcagacaaaataaggtaaatgaggttgtttttatagtaagactcatactactgaggttgttttgtttaggaaaatgaggtaaaaataaggttttggcggttgtcaacattgatgaattgattatcccttgagatcgtcaattcaggggaatccggggatagcttttcttattccgtgatcacagatcatggctcgtatgcttcatccccggctttttacggcatgtcattttctgatcaactcaaagatggcgcggtcggcgtcttgggtggtcatgaggaatgtgttgaccgctttcccttccttgtcgagcaggataaagaacggctgaacgttgattccggcatacaccgccggacgaccgtcaaggccgccttgttcgtgaatctgcggaaatttgaccggattggcggtcaaataggccgtcatcgcttccggggtgtcgtcgagattgacgccgatgattgacaaaccgtcccgttcgtacaatgtttggatacgcttcatttcttcggcgagctcccctttggggtccgcccaggccgaccagaagtagagcaacacgatctttcccttgtactggttgacatcaatggtcgaaccggcaagggtgcgaccttgaaacgcgaacggtttgccggcggcgtcgatgcgccggagcacgccggcggctttttccgcaatgagcgtattcggataattcttgttgatcaagtcgacggtctccctgagcttttcggtttgcgccgacatctcataatcgttgaccaattcgaaaagcactctggcggcagccgtcgtattggggaaatctttgacgagttgttccaaccgtttgagccggtccgcataagctttgaccggatctgtcgcctgggtggtgataaactccgcctcgccggctttgaattgcatgtaagcggcaatttcgagatttccctgggctttcaaggtgtccgccattttccgcattttttcgatgccgcccggaaaattatcgaccgtcacggcggtgtacatgaagtcagccatgtcacggagccatttgtcacggctctcgggatcagggttcggatttccttctttcgtaaaagaaagggcggctaaaatccgcagttttgcaatttcttcaaaaagcggaacccgtttgtctttgtccgttgatgcgattttttcttccaattcctggatttgtttgctgatttgcgtgatttcttccgtgtttccaccaccggaagtgctattgtcccgttcaaacggtgaaacgtaatggacatcctcggtaaacggcatcggggcgtccgtgactttccaaacgtcccccactttgaccatggcaccaatgagaatttgtacattgttgttctccccgttgttgatgagggctacgacattcggataaaccgtcaaatcggcggtgtttcccatatctccctgtggaatgagactcggacgcaaggcaccggattgcccccattccgcctgcggactcaacttgatgctgttgaccgcatcctggaacgctttattgaaatttccggtttgggcggtgagtttttgcgttaattccgggccgcattggatcgttttgagatcgttcgcgtcaagggcaacccgcaaaaaacgattgaaatcgcgcgtcaccagtgcaatgacgacttcttccgacacttcttccggggaaatgcttttccagtaatcaatcacgccgtctttgttggagtcgataccccagcgggttccagcggtgttgagccagcgcatctgatcggggattttatcctgatccgtatcgatgtcacgatacacttcgatcccccctttgaaaaacgaccattggttgatgctgccacttccattggcgtcgtaaagtttccggatcacgacgccgcccggatttttcaaggtaaaccctttgcttccgtcctggatgagcgttgcattgggaatttcggcctccgtcagggtgtcgacgtcaatccctttctggctgggggaaaccaaagccaatcggattttctggatttccgattccgatttttgctgggcaaaagcggcctgaaaaaaaacaaaaatcattgcaccggcaaggatgcaggagaatgcgttcaaatatttcatatttcattcgccctatcgaaagaaaaacaaccacagaaagccatcagaatgatgtggcctgtggttgtttgccaatatttatttttgaaaagcacacaattcatcttgaatagacgacgttactcgaatttgtcatggaggcggattgcacaatgcgctgattttgcggattgatttgtccggagacctgtcgaatcggattgccttgctgctgaccgccgattaccttgtcctgcaacacgatttgacgcatctggggattgaaaccattggcctgctggagtgcaatcattcggttttgccggaccggaaccatttgattctgcggttgcacttgttgcatgaccggggtgctccccgaagtgtaaaacgtgttcccctggccgcacgatttgcatcccggctgggggacgaccatcggctgggaaaccggctgagccatcggcgacatgacgggtggagccgaataaacgtcaccgcatgtcccggaagcacaaccgcccgtgtacccgccgagatttccgtactgatcgcacggttcacaacaggatgcgcgattattgatataatcaccgtaatacacctcgcagtcgcaaccgcaatcggacgtcccgcagagggaatgaaacaggcagccgagcggtgagaaaagaatacgtcccgaaccgccgccgcacccgccgccgcaacttccgcacccgccgcatgaggagccgcactcgccaccggcataatattgaccggcataaggactttgataatgcgtccttaatccgcagcctgtcggacatgttgggcatgtctcctgacaggaagaacatcccatcatcggttgtgaacaaaccccgctttgaaacccgcaacatgcgcagccggttgcaaatgatgcggcaacaagcagtgttccaagaagaagcagtcgcttcataacgacaccttattaatatgtattgttttttccaaacatcgtatgccacgaagaaaacacggatgaagaaatccggacgaaatcgaatgccgttttcctcatttccaaatttcctctccgattaaatcgacacgatacaagcgaaaaattcaataaaatcagaataaaccccaaagtttaacatgaaggtgtgttaaacgtggatatttgggttgtataaaaaaggatggttttcaaaaaacaagagaatactgctttgaaaatcagtagacttcaagacgattgccgttcaatcgaaattttccgttgacaggctgaagacatttctcgaaaacttcctgaaaagtgttgttttcaagctgaaacgagacgggagtgttgattttaatcccgcgattcgcaaacgctttttcgttgatcaccagttccagttgcatcttttccgcaaaaaaacgaagcgttgcgtcgagaggttttgcgtcgattttggccgtgtaacggctgtctttcaaacgaacggccgcgtccggcatggaattgggggcatttgatattgtggaatccccgggttgcacggggggtgttgtcgaagttggagtcgaagccgatgccggttttgccgaaacttccgaaagacgttgatgataaaccgtatcgattcgggcaagttcatcgagcgaagcacggacggaaattccctgttgtgttttttcaataatcgcagtgggggcaatttgccggagatacggcaagtcaccggacaattgttccccccctttgccctgaaatgtgcgggtcaacaccaatcggtacggaatggggatcggcctgatttttttcgcattttccgaaacttcgtccgaaatcacaaaagtcgaatcaaatccgatcaggaaaagcgaaaagatttcaagcggcgtcgcttcaggaaaaacgatttccggccaaagatcgtgcggcaaagattgaaaatctgtgccgtccagtgccatttcttccgccagcgattgcaacacatccgccggcgttgcaagaaatccggaatgaaactcacgcggtgccgaaaactgacgtttcagatgatcggggaattttgccgcctgttccgcgcgaagcgtcacaagaaacggaaggattttcgcagcgtctttcggccccaggtacgcaatttgaccgattcggcaaaaaccgagttgatatttttccgcaatttgcgaaaaaacaaccgcgacaggctgccggctgacttccagatgaagcggcgtgcccggatcaatccgccggtcgaggatgaaaccgaatcgccggacttttgcaaacgtctccaatgactgacgaagtggcccgccgttccagctcacgctgaccggctgctcccaaacatcagtggaagcctgttgcgcaaccgtgacattgcaaaacaacagcaacacaacaaataccggtgttcgtttgatgatcattggactcaatttacagatatgttttagtctgtgtttaaaaatacaagatcaagtttggtgaagcgatgatcgcatacaagcgattttgaggaaggcatgataacggacggcgagattggctctcgcggttttgatttatctggctctggattttctctgtatttggatatttggatcgtgttcactcatacaagtattataccattccctccatgattttcaatggctttttgaatttcgctcaagttccccctcccccaagattgcgaaaaaacagccaagaaacaaaaaaggcacaccacagggatgtgccgagggtgcattgtaaaccgttaatgtttacaagcagttatgcctcacacaacgaaagttacttctttactaagatttgacgtagcaatcgctgctcggatatacaactttcattctatcagaaaaagattagcaagtcaataaaaaatttgttgatttttctattaatattcgttatgattaagtagtttgttggctttatttttgaattgttgcgatattatcaaaaaggacctgtgtgatgaaatataatcttggtcttgatctcggcgtccagtcgatcggctgggcgattattccggttgatgaaaacaacggtcctgccatgcgacttggcgttcgctgttttgacacagtgattgataatgtcaaggattggcaggaaggtactcttggaaaagatggtaaaccaaaggcacaaacgaacaaccgtaagcgaagtgacgcccgcggtgtccgaaaaaatcaatggcggcgcaaacggcgaacgctcaagctgttcaatctgctgcgcaatcacgggttgctgccgatgggcaaaggaatcaacgacgatcccctcgaccgtcaggagttgatcaaccaccttgacaaggagcttgcccgcaagttgtctctcaatgacgaccgagtctccgcccatcttttgccgtacaaactccgggcaatggcacttgatcaacaactggaaccatttgcgtttggccgtgcgttgctgcacctgtcgcaacgtcgcgggtttttgagtaataaaaaaactccgccaaaagacgacgaagatgaaaaagggctgaaaaaagacatctccgatctgcgcggtaaaattgctgaatgtggctatcgaacgcttggcgaatattttgcgtcgcttgacccggaggaaaaacgtatccggcagcgttggactgggcgtgacatgtttaaagacgagttcaaggccatttgcgacagccaggataagtattaccatgatttgctgaacaaaaaggttgtcattgacagttggaaaaacaaaccgggtgcgtggaaatatgatatcaaagaagggaaacgaaaaaagatattttcaaacgaacattttcgcgcaaaggaaatgaccttacaaaaagcaattgaacggactttgttttttcagcgaccgctcaagtcacagaaacatttgatcggcaaatgtcaattggaacgaggcaaacgtcgtgcgcaacttgcgtcgctcgaagcccagcgatttcgctattggcagaagattctcgacttgaaatacaaagatgttgacggctttatggtcccgttgtcaatagaacagcaagacattcttgccaaagaatttgaaaacaacgatcaccttacttatgctcagatccgttcattacttggattcaagcaaccgcgacaaagcaaggaagaaaaggaacgacataaaaaagcaggtattcaacctgtttatgcgatcaacttcgagatagatgatgagaatgaaaaactcaaaggaaacgtaacgtcagagcgtatcaggaaaatcattcccgaacgctggaatgccatgccggacgaggaaaaagaacagctcgtcagcgaaatcttgcaattcgaggatgaaaacgcattggccaggcgactcgaaaaggtgttcaagttcgattccagcaaggcaagcgaactggcgatggtacaattagaacgtggttatgcctcactttccaaacaagcgattgggaaaatattgccagtaatgaaggcaaaacgaattcgtttcgccacggcgcgtaaagatgtgtatggtgagcagtttgacgaagaacgtaaagatgtgaaaccggatttgccgcctgtcctcaatgtggtgaaagacttgaaaaacccagtcgtgactcgggctttgaccgaactccgcaaagtcgtcaacgccattattcggaaatatggtaaaccggatatgatctgcgttgaactgtcccgtgatatgaaaagaagccgtcccgaccgggaaaaacttgctgaggaaatgaagcaacaggaaaaacgacgggctgcggtagttgaaatcattcgtgaatatcgcaaagataaaaattatgaacccaagaaaaatgaaattttaaaggttcttcttgctgaggaatgtaattgggaatgtccctatactggaacggataaggacaaacattgggggaaaattactcttgatagtttacttggttcagagccacaatttgacattgaacatattcttccactcagccgatcattagacaattcgtttgtcaacaaaacactgtgtcggatttacgcaaatcgtcacgaaaagaaaaatcagacaccgtgggaagattatggccatgacgagcaacgttggcatgaaatcatggagcgagtcgaacggtttcagggtcctttggcgaaaatcaaacaccgacgttttgaaatgaaaaaaatccctgacggtttcacgaatcgtcacttgaatgataccaggcatatttcccgactggcgggcgaatatctcgcattactttatggcggacgctctgatgccgaaggaacgcaacgcattcaagtttcgagcggtggagtaacaaagtatcttcgtgacgaatgggggctcaacgcgatccttgatgatggtggcgacgaaaaaaatcgaaatgatcatcgacaccatgctgttgatgccggtataattgcagtaagtgccccaaaaattgtcaaaatgttaagtgatgccgcagaacgagggtggttggaaggaaggcaacgcttcggcaaaggaggcatcgaagaaccgttcccagacttttataaaaagatggaagcagccgtcaataaaatcaacatctctttccgcgccaatcgcaaagtcagcggcgggtttcatgaggagacaaattacagcaaaccgcagattgtcgttgaaggcaaagggaaaaaggcaaagcaggtcgagtatcggcatgtccgcaaacccattgcgagcatgtcgaagaacgaagtccatgatattgtcgatgagaaagttcgtaatcttgtcctggaaacactgaaatcactgggtacggacgatccaaggaagttgacggaaaacgatttgccttatctccgctcaaaagacggcaaacgcatgactcccatccgcaaagccaggattcgcaaaagtgacagtacaaggactatggggttggcaaaaacgaaaaaaggaggcaatccggaaattcacggtcgaacaggccgtgaacgccatgtggtcacgggaaataaccatcacatggagatatttgcacatcttgacgaccaagacaatgaagtgaaacttgattggaaggtcgtcaatctttttgactcggttcaacgtattaagcaaaagcaaccagtgatcagtcgctttcccgatggcgagcagacgagattgaagttttcattagccaagggtgagtatgttcttgcaacccctccgggcgaagatgatgttttgttgaaagtgtgtaaaatttccgaaggcgatttgtccttgtgtttgcatacggatgcgcgcccggaaaaagatcgagctaaaacaggcgattttcaaaaatatcggattgcgagtatcaaaaaacttgaacaattcaaattgcgtaaagtcacagtcgatgtcttgggcaatattcacccagctaatgactgatgtacgccggaatttttgtgaaaatcaggaatttgtcgggatattcgttcttatttgattaaaatagacaaggtggtcaaataagagaacatgattgtccgatattgagagactgcgcttatgtcgcaccagattcttgatttttctcaaaatcctctccggttaaggacccggctgaaacaactcgtcattcaaagggacgagcatccgccgacaacagttccgctcgaagatattgccgttgtgctggtgtcgcacccgcaggtcacgttttcgcaaagcattctcgaagggcttgcagaaaatggagccgtgttgatcgcctgcaacagaaaaagcctgccggtggggatgttttttccgcttgccgggcatcatcagcctgcccgacggattcaacttcaaatcagtgtcccgctgccgcttcaaaaaaaggcatggcggcaggtcgttcaggctaaaatcgcggcacaagcccaactgcttcgcaattgttttgataacgatttcggactcgaaacgttaatcccgatggtcaagagcggcgataccagcaacgtggaagcacgcgccgcaagacgttactggcaaagacttttcgacggtt

SEQ ID NO: 941 - DNA, 23018 bp, synthetic construct
  misc_feature 1..23018: note = Synthetic
  source 1..23018: mol_type = other DNA
acctatgatgtgatttatgctgtgcgctacgaaaagcaatttgacaagttcactaacgatgagcggaatgagattgtaaaggaagcgctctcacggcttgaaggcgaatatgccatagacctttttattgaagatcttagagagtattcagacgcttatcaagaccgcttcacaatcccctgcgctgtataggagaacgacatgaatttattgcacaacaaaatcattgcggcagccaacgacctgccggacgacacaaaggaagacagggagctgaagaccaaattttataaccttgcggaagacgtgcgggaactggtttacaagtttgaaacgctgaataccgattatcagcggttaaaacaaaagaagggttaattatgtacatgcataaatgccaaacttgcggaaagctgtatgcgaattatcaaaaaaaatcaaaatattgttctatggcttgttatgacaggtcagctcgtcaggaagccaaaagaaatatcgaacagccggcagaaccggctaaaatagaaagtcagtggtggtttgatgactgcccgtttcacaacggacagctcaaagccggcgaaatgaaaaacatgccggactggtattttatataaaaaaggagaaaccatgaaaatataccgcttttccaatcccaaacaacaaaatacagccttgcacagcagccttgccgaagatatccgccttattgccgaaggtatagacagagcggacaacatgcagcaggtcaaactattaatcgactcattgtatgaaaaagcgaaccttgtggaacagcttttagaaacgcccctagccccctgccgcccgcacaaaaaagagcttgttttttttgcaagcccctattctgcggacagcatggaacaaatcagagctaatttaaccgtgtccttgcaggctactgcgtatcttatgcagcagggttttgatgtatataaccctcttgcgcacggcagccatatacacggctttattgagcgctacgacatgagtctggcgaatacactcttaccttataacgcatggcatgaactcaactgtaggattatggaaagctgcgatgccatggtctggctgcatacctcccgcaccccccacagcgagggcatgaaagcggaaattgcgtttgcaaggcagctcaatctgcccattttagggctttattatgaggagtgccgcttcaaattctacaccgaagagcagtgcggaaatcttatctttcctgttaccgcagccgcaaaatagcgagggtcgagtatggaagaaaaacaaaaaaagaaccaaattgagcgcgccctgctggtgctggaaaccctttttctggatcctatcaacgggctttccaataaggaaattattgaaaaaacaaagctccccgctgtggacgtgtgcaggcttttaaagaccctgcacagctcaaaatgggcggaaaaaaacgacttggaacgctggacgccgtctgtcaagcctgttggtttgcttaaaaaatacaatttgtacctcaactcagccgcagagaagatagagagttttgaagttcgcaccaatgcatgggcacggcggtaaaactgctcacatgtgaggagttttggaaaataataaaattaaataaatcaatatattataaaaactagataaaaaaaaattgctcactgtgaggagttttaagaggcagatttatgactagggaacaagaaaagacattagacgttgaaatagtggaagatagcaacgcagaaacgcaagaattggcagaattgaatagttataaaaatgaacttatcgcaaaaagccgtgaaatagataaagaaacggtaatcaatacggcttccattttggaaattgtgggcatgctcaaagcccataaaatcagcgagcaatttaacaaaacgcttcgcactattaaacttcgtgaaatcaaggaattgaaggaatacaaagggctcactctgtttgatattaacgggcaagctgtgactgtcaactcatgggaggaattttgtaaagctttaggaacgtcaagtaaaagcgttgacagagatgttcaaaatttaaacaccttcgggcaggagtttatgcagctctccgaaagcatagggcttagctaccgagaacttcggcgcatgcggcagaacatgctgaaccccatgctttccgagcaggaaaagcttgcgcttgaagaagcgaaaggcaaagacccacaggaaatgcttactctcttggaagaattgcaggataagcaggcaagtttggaggaagaagtcaaggggctgaaagacgacattgcggcaaaagataaggtttcaagcgacaagtccaagaaaattgaaaaactggaacttgaccttgcgaaaatgtccggcaaaagccctgaaagcgccaagcaagcggagaaaaacattcttttcaacacgttggaaaacgaatttgcgaagagcatcagcttattgcaaaacgcaaaagtggcttttttagaagtactgcgcctgcaggagaacggcgaacttgacgagcaggagaacgatcgctttgacgagtcagttttacagtttttaaccaatgttatgcgcttttcctccgaagtgcgatccggcaagtataattttctcaatgctgcggacaatttaggactgctgccgcttttcagcctgtatattgagcagaacacccctaaatttgaaagcccggattttgaaaacccagataacgaataaatccctaaaaaaagactatagaccatgttgactgccgcacaaaaaaaagaactgcataccgccgcggaaaagctgaatagcgtcaagcccgccgagcgcaaggaaatactggaaaacctggctaatctgctggggctttccgtgaagtccgtacgcaggcacttggaaaaagaggcttactggaagcctgtgcagaaagttcgccgtgataagggcaaaagcatagtttcaaaggaatatgccctgctggcggcgggtatacagcaaaaggcaaagcgggcgacaggcaagctgctgcttagtacgaagaatatcaaaggaatactggaaaacaacaatatcctgccggctgatgaaaacggcgaggtcaagaccgtttcaacttccactctgcggcgcaaaatgatcgattataacctgcataatgcggtactcaaaaaggacagtcctgctgtctctcaaagaagcttgcaccctaaccatgtgtgggagctggacgcatccgtgtgtgtgcttttttatttaccgggcaagaaagttatgctggttgatgaaaaggcagcgtataaaaataagcctgaaaatttggaaaaaatcaacaaagacaaagtgatacgctatgtagtcaccgaccattactcaggttttatttacgtcaaatactcaacaggtgcggaagatgccaagggcgtgctggatgtgctcatagaagccatgagcaagcggtctgacagtgaccccatgcacggcgttccgaaaattctcttaatggataaaggcgcaggcaacacgtctggcatgattaaggatttttgtgaaaatctgcaaattgagcccattttccataagacaggcaatccgcgggcaaaagggcaggtggaaaacgcccagaaccttgtggaaaagaattttgaaggtcgattacgtttttacaatattgccaacttggcggaactgcaggcagcgtgtgacgcgtggcgcgtgcattataacagccgtgaaattttgcgccgtgcgggcagaccgcgggcaatgctgtggacaacgataaaacatgaacagctgcgaatttgtgaaaaggacgtcttgcaggaaatagcctgctggcaggacgtcacccgtaaaatcgacagcaatttcaatatttctgtttccaccaaaaagtttggaaaaaatatctaccatgtggcggacttatccctgcacggcgtgggcatcgggcaggaagtgcagtgttaccttaatccttttacagctccggatattactgtaaagacgaagaatatagacggcagccttgtgcagatggattttagcccgcttgtttttgacgaggctggttttagggaagacgctcctgtaatcggggaagaatttaacagttacaccaagcaggaaacagaaaacaatctggataagattgaaaagcttgcctatgcagcggaaaccggcaaggaagctgaacagaaaaaactcaaaaatgaaaagccgtttcaaaatatcgacttcatggctgacattaagaaaagccccagttatctacacgcagagggcagacaagtttttgaaaaggaaccgaagcagcttagcctggaagctatggctatggaaattgccagccgttctgccgaactttggaaaaagtcacctaagcaaagtcttgcctggctgagagcccaggaaagcgaatttaacgaaaccatggttgatacacttactgaaaagttcaaggctgaatttgaagcaaaacaagcaaacattatcgaatttcaacaaaaggcagcgtattaaatggaaaacaccttaaatcaagaattggctgttttatctgaaaagctggcaggttattcagtcagacagctggctgatatttcaggcgcaggcgcgagcactgtttataatctgctcaagaaaggcaaaatgccgcaaaataaatttaaaactatttatgagaatttatgcggttatttttccgaagatcaagaaataataacaatattaaacaatattaaagagttgcaaaacaaacaaaacaaagaggaggaacctatgattttacgcaagcaaaacttgtcccagaccgctaaaatgcatttcagccttataaagaacccgctggcagaccccagaacacccgatgaactctattttaacaagcgttccagatttatcagggaatgcctgctggacgctgccctgaacggtaatttccttgccctggtgggtgagagcggcagcggaaagtccaccctgcgcatggaactcatcgagaatttaaagcgcggcgataagcctgtgattgtgattgagccgtatactttgaacatgagccatgacggaaaagccggaacgctgaaagcccgtcatctcctcgaagctattttatcaaaactcaatcctgacacgtctattccgctctctccgcaaatccttgctaaaaaagtacataaggcgctcttggacagctatcacgccggtttcaagcactgcctgattattgaggaagcacatgacatttccatgcacacgctcaaggctctcaaaaggttctgggaactcacggacggcatggagcggctgctttccattatccttataggtcagcctgaacttagtcgcatcttaggaaccaacgcaacagaagtccgggaagttgtgcagcgctgtgatgtggtcgagcttggcattattgacgatatcgaggaatttcttaccttcaaatttaagaaggcagggcttgacgtgctggatttctttgaaaaagacgctttgccggctttatcggacaaactgcatgtagcgcaaaataaaaaaggggaaagcgtcttttacagctatccgctggcaattttgaacttggcaaccgcagcgattaataagaccgctgaacttggctttgaaaaggtcacgaagaatatcgtgaccggcatataacattaacattaatataaggagaaacgacatgaccagaattaaaccacaaatccaaaccgtaaatatcaccaccattgaagaagctgataacgcgctgaaagacctttgcgcgctcaaccgagaacttgaccttatcaatattgatacgcaggaaaaggttgacgcaatcaaggctcaggctcaggcaagcgctatgcctgtcaaccagcagattgaaatattgggcgctgcactcaatgccttctgcgttgcaaacaaaaaggaactctttgccaaaagcaaaagcaagcaggttaccttcggattgctgggtttcaggctttcaacaaagcttaaaactcagtcaaaagtaaaatgggatcaagtgcttggacgtctgcaagatatgaatttgaatgattatatccgaaccaagcaggaagtcgataaggaaaagctgaaatctgcaagcgaaacagtcataaaagaagcaggctgtcaactggtgcaggacgatgttttcttctatgagctggacaaagaaaatttcaacaaattaggtcagtagggcgctgtcatggctaacaatcgagaaacgcttataaaagccatacataccggcagacgttatttacagctggatgaagagacatacaggcagttccttcatagtgttacaaaaaagaactcctgcgtgcttatggatacgtctgagcttgaaaaggtgcttgcctgcatgcgcgaaaaaggctttactgcacaaaagcagaatttcaaaaacaggcaggacagactctttacagacagccagtaccgcaagtgttatagtctttggaaagatctttataatattggcggcgtcaaagtcagttctcccgttgctttgaattcttacttgaaaaaaatatgcccgcaatttcggaaaaagtttatcattaacgccgcagagtttcaaaacgctatcgaaatcttgaaaaattggcttgcacgcgtagaaacgaaaagcattgatgataatacaaaacagcaaattcaagacttgctctttccggataagactggaggctaacatgcgtgacagcgagcctgactttatggactacttgaccatgtatctgcaaaatgtttgcaatacacatctaaagaataaaagcattccagatgcggatggcattattcaaaagattgtctatgattttgtggagatcgttgaagaagaatacggaggtcaagccatatatataaagctcaattctcctgcaaaaaaacaacggatttataacgaatttaatggcagtaattataatgaacttgcaaaaaaatataaaatttcagcagtgcaaattcgcaaaataatcaaggaagaacaaaaaaaaaggcgtcaaaatttttcacaaggcagcttgctgtcataatccataaaacgcaaaactgcgtaaatctaatttataaaatgccgtaaattgcaaaataccaaaaatctaatttatacggcataaacattaaaacaaaacggacgaaaatcttcgtccgtttttcatttaaaatatacaaaatttttgctcgtttcttacgtttctataatttcatatactgaaatttaatttcattccatatcccagattatccctacatatcccaaattatcccagattaaatattatattatcccattcccttacaattattgtcttttttattggtatactatttattattcatttttataagatgatgaaattagagagaattataaatgaaaaagaggaaaaaataaataatattattacagagaagaataatgaggaattggaaaaagcaaataatattattaaagaaaaaaatgagaaattggataaaattcttgaaaagaatattgagcaagatattgaaatagaaagtatcaataaaaaattagaagattatggatatacagaatatgaagaagcaaaaaaagaaattaataaattaaataatcatattttagagaagagaaatgaaataagagaaatagaaaataaattattttactattataagatggagcctaaagttattagaattcgggaattagaagaaaaaataaatttattactgcaagaagaagaaaaaaagaataaacaattatcagcaattaacaattcaatttcaaagtatacagaagtgttaagagctattaaatatgcagaatcaagagctatcaaatatggagaagagtataattttgaagatataagtttatcagataaaatgtatattgataatttattacctaatgttattttaaagttaaattttatgaactttaaagaattaaaaaaagcaatgaataagaataataatgaaatttcaaaattattagaaaggtataagggcagatatacaactaaaacaaataaaacgatatattcactaatggtaatagctctcaatgctgaattacaaaatgttttgtataatttaaaatttgaaaaacttgataattctattcaatatataaaaaaaattactacaaaatacttatccattgcaagtgagggaaaccaaactattgcaccaacattaaaagggtttattggagaattagaatatttttttatcaattctattaaaatagaatataactattatgtaaaaaaagaacaggctaagcaagaacaaatgcgtataagagagcaaattagacaagaaaatgcagagagaaaagctttagaaattgaaaaaaataaaatacaaaaagaagaaaataaatttattgttgaaatttataaaattactgaaaaaatttcaaatagtgacgaacaaaaagaaatagaaaaattaaaagaaagattgtcatatctacaagcacaactagaagaagtaaaacataaaaaagaagaaattataaatttacaaaatggtaaagcaggaactgtatatattataagtaacttaggttcatttggggataatgtatttaaaataggaatgactcggagattagacccaatggatagagtaaatgaattaggagatgcaagtgttccattcaaatttgatgtacatagttttattttttcggaagatgctgttgatttagaaactcaattacataaaattttaaatattaaaagggtaaacaaagtaaacaagagaaaagagtttttttacacaagtattgatgaacttgagaaaattgttttagatattcaacctacagcagaatttaacaaaacaatgcttgcagaagagtttaaacaatctcaatcctatgaagaaggatatgctgatgattatgtcagtgagcttattgatgatgaagaataattttaagaaattttctcatgttaattataaaataaggggtacgcaatattctgcatacgtgggtttgtgtgtaccgctcatagtctaaaataaatagtgcgagccgtgttttatatatttttgcttttttcaacatttttttatatcaaaacttttttatttgagctatctagttgaaatataaaataatatacattaaaaatattgtatttttttaatttgtttatgtagggttatattggataatatgtaggattatgtcttgtaattaatgcacaatattatctaggcaaaaaggatttacccataaagtaaattgcctagacttgaattaaaaaaagtgtgtttgtccgcatattgaattttaggagaagcaagaacagccaaaacagaaaaatttatatgaatactgacaagaattttatttaatgctatactcattaaaggaagtgcagacaaaaaatttttacggtattttttacggtatcggaaaaaatgataatcaatatagttagtaaaatagataagttattataaatgttctgtagtcccccttgctaccacaaatttcaagggcttatgagtatttatgtcatgagtcctttttttgtggcaatttttcggcaaaatatttttctcttttttattttttttctctcttttcttattcccgttatcattttgaggacatttgcataattttatttattagacagtgtcgtcatttatttataacttattgattttattatataagattattttatgttttctgattttaccaataatttcaaggtgttgcatttataatgacgacacaccctagcatcatgctgtgttaaatttttcattgcttttaaataaaaagcagccgtaaaaacagctgcttgagaattatgggattgtaaccctactcgaaattctcatcgaactattatagttgcctttccaatttaaccatactaataaacaagaatttcttgttattttttatatactaatttataataagtcaagtaaaaatatcatgaggataagatatgaaaaggcgagtatttggttttgatttggggatagcgtccataggctgggcagtcgttgattttgataatgaatattatgacatggaaacaggggaaattttagcggataaagcaaagggcagcggagaaattgcgcagggggcgattgttgattgtggcgtgcgtgtatttccagtttccgaaaatcaaaaaggagctacattagcatcagtacggcgtgaaaaacgtttagctagaagagcttgtcggcgtaaagcacggcgcaaggaaggtttgcgaggtttatttgcggcaaaggggttagtggaaaatgccgacgcttttacaaaagaaatttgtaagcagcagattggcggtgatgtttggaatttacgggtgaaagcgttgcaggaaaagctttccaaagaagaactggcgcgagttttgtatcatttggcaaagcaccgcggatttaagtccgtccgtaaagcgcaggaagaaaatgacaaggacagcggcaaggttttgtctgctattcgtgcgaatatggcattaaaggaagacggcaaaagtctggcgcaaattattgtggaaaaagcaggggcaactggcaaaaagcgtaatttttcaaaagtaataaaaaaagataaagacggcaaagatgtcgtgaaagctgattataaaaattccattccgcgcagtgaaattgaagcagagcttgccatgatttttgccagacaaaaagaatatggaatttttacgcaggatttatatgatgattttgtaaaaattgcgtttcgtcagcgcggcataaaaagcgttggggatatggtgggaaattgtacctttgaagcaaacgaaaaaagggcgcccaaagaagcgcccactgctgaattttttgtcgcatggagtaaaatcaataatcttgctgtctatgaaggggatacaaaacgttttttaacaacagaagaaaggcataacttatttgaattattgaagaaaacaaaagatgtaaaatataaatctataacggcaaaactatttaaagataaagatattcagtttgcctgccttgattacagaccaaagcaaaaaaagaataaaaatggagaaatggttaacgcagaccccgaggatacgcttttttacagcatgaaaggctggcataaattacagtctgcgtttaaggctatgcctgatgtttttgaagatatagaaaaacttaataaggcagtaaccattattgcagaggaaaaagaagatacgaaaattcaggcaaaacttggtaagttaggttattcacaagaaataattgataaatttttaaccttgtcttttgataaatttattaatttatccttgaaagctttgtataaaatcaatccgtatcttgaaaagggcgaaaaatatgacaaggcttgcgcaagtgcaggctatgattttaaagccgtaacggataaactcgttaacgaaaaaggcttgctgcttgcagttattgacgaggaaaaattaacaagagttccagttgtcaacaggacaatagcccagttcagaaagttatataatgcaatcgtgcgtcaatatggtgcgcctgatcaaataaatcttgaaacaggcagggatctgaaaaaaagtgcagaggaacggaaaaaaattcaaaaccgtcaagaggaaaacagagacagaaatcaaagtataaaagaacaaattgaaaaaatgggttttgatgtgactggaacgaacattacaaagctgcgtttatataatgaacagcaaggaaagagtatatataatgtaaattgtaaagataatgatattaagatagagcgtctatttgaagacggttatgcagaaattgaccatattttgccgtattcccgcagttttgacaattcctacagcaataaagtgcttgtcttggctcgtgaaaatcaagaaaaaagaaatcaaacgccttttgaatataaaggaaagagtaatgccaaaagcaaggaatggactgattttatcagctatgtaacaagttttgcaagtatcccaaaaaataaaaaagaaaagctgctgctggaaacctttaatgatagggaacaggagtttaggaatagaaatgccaatgataacagttatattgcaacatatgtcaaacgttatcttgaagacggcatagattttagtaaaagtttacatacggaaattaaaaataaagtgcaggttcgcagcggcaatgtgacggcatttttacgtcatcaatggggcttggaaaaagataggggaatagatacgcaccatgcccaagacgcaatcgtgatagcctgtgcaacgcaaggtatggtgcaggcactatcaaaaatttcccgtaaagagggcttggtgcatacggaagctgtccatagaaaatatacgatagcagcgccttggaataattttagaaacgatgtgttgacggctttggaaaaggtttttgtttcccgttcaccacggaaaaaagcaagcggggaaattcatgacgcaacaattcattcattaaagaaaaagaaaaaacaaaatgaaaagaagaaccaacaaaaaacaagagagataaaaactggtttaattgttcgcggcggtatagcagaaaatggagatatgctccgaactgatgttttttgtaagaaaaataaaaagggaaaagaagaattttaccttgtccccatttataaaagtgatttgggcaaagatttgcccaataaagctattactcgaaataaaactgaagacgaatggacagtaatggatgaaagttttacttttcttttttccctatttatggatgatttagtaagggtacagaaaggagaaactgtttattttggctattataaaggggtacatagaggaacagcaggtataacgcttgaagaacatgacaaaaaacaaaaatacgagggtattggttctaagactcttgattatataaagaaataccaagttaattttttaggcgaatatacagaagtaaaaggagaaaaaagacaacttttaatgcataagaaataaaaaaggagttgtatgtcctggcgaatattgcagataacaaaaccttgtacgctgaagataaaaaataaacagcttttctatattccgcaggagggagaggaaatctcttttcctttggaagatttgagcgtgcttattttggagaacaggcaaattaccatgtataataccctgctggcagagctggcacggcatgggatttgccttttttcgtgcgatgaaaatcatatgcctgccggggcgtattttccttttcattcctattatcaaagctcacgcatagcgcaattgcaggtggaaacgcgaaagcctctgcaaaacagattgtggcaggaacttgttacagcaaaaatccaaaatcaggcaaaatgtttggaattattgcagctgcaaggcgctgaaaaactttatgcgtacagtaaaaaagttgtttcaggggacaagcaaaatattgaggcggcagctgccaattattattttaaaatgcttttcggttctttttcacggcaaaatgaagacgatttaaaaaatgcgtttttgaattacggctatgcggtcgtgcgctcatgcattgcgcgttctttggcgggagttggtctgctgccttgtttcgggctgcatcatgccaatatctataatgcgtataatttggcagacgatatgattgaaccctatcgcccttttgttgattatgttgtttatacgctttttcaagaaagtagtatcgaggagcttaattcccagtataaaaatcaattagccggcgttctcacaaaacagataagcttggaagaagaggaaataagcgtcttaaaagcaattgaatacagctgtcaaagcttggcaaaatcaataaaactgaaaaaaaacgtcttagccttgccctgttttttgcaataggagtttttatggcagtaaagggggagcggtatatgcgggtaattgttttttttgatttaccgactgtcagcaaaaaagataaaaaaattgcggctgattttagaagatttttattgcaggacggttattatatgctgcagtggtctgtgtattccagagtttgtaaagggcttgcggaagtggaaacgcatagcaacaggctgaaggctgttttgcctgattctggaagtattcggcttttaacggtcacggaaaaacagtatgcaagtatggaaattttggttggaactgttaaaaaaacagagaaaacaggggctgtccagctgcttttgctgtagtttttttacaaaaaaataaggtaatatctaattaattcaagatattaccttatttcagttgtagcatgtctaaattggaaaggcaactataactttgaatgcttgcttgcatgagcaaaaaaagttgtagcatgtctaaattggaaaggcaactataactattctaacgggtgtacgctcagaaaactggttgtagcatgtctaaattggaaaggcaactataacattcatgaagcgtttgcgtaaatatttcaagttgtagcatgtctaaattggaaaggcaactataactccgccggggcttttttcttcatgaaaagggttgtagcatgtctaaattggaaaggcaactataaccaaacatcaaatcagcagcctgaaaatgctgttgtagcatgtctaaattggaaaggcaactataacacagcagcggagacatgaataatgagccaagttgtagcatgtctaaattggaaaggcaactataacttctttgaaaaaaatgaaagcaacggacgagttgtagcatgtctaaattggaaaggcaactataactgtaatcataaaagatacagaattgagtaagttgtagcatgtctaaattggaaaggcaactataacaatgattgcaagacaagcacgtattgattggttgtagcatgtctaaattggaaagacaatattaagaaaagtatcatctctattcattttaaacattttgcataaaagcgtatgatgttgtcaagggcttgcagatcaaggattttgtgattggcgacgtgtttctttgtggctttgaggacattgccaaggcgtatgccctgggggagtcctgtcacttccattatgcgtttgccggtgatattttttgagaaaagaaaagttgtatttttaaattcttctaagtatttcaataaattattccattcgatttggctgaagcgttcgcctcgggatttgctgtcacaataggatgtttccactaaatatgcaaaatagtgattctccataagtgtaagcaaggtatagcctttgaggtttggggcttcatgcagaatcatatgcttttgggcgcaaaaaaggacaatgtcttttaattgatgggcccatttgagtctggcggcaacagtattgatcaagggggctgaggcggcatcgtgtttataataggtatgcacgaatccgccgtgtttttcgcgtaattgataggttgtgcctttgccaatatcatggaaaagaagggcaaataattgaaaactatctttcgaactgcaaactctcaatgtttctaaaacgtgtttgccaacggaattaaagctatgcttacaatttttgcagtacgcgttattttttgtatattctttatagtattcgcagtgatcgttcttgcaaagcccttccgggtggtgcttattggaatggggcaacgtaaataacaccgcaatttccggcaaaatatggtgtaaaatattgagctcctgcatgagttcaatagcatgggcaaagcattttccgccctcacttgccattttttcaagttctgcttgtatccgttctggtgcgacgtgcagtaaacattcgccgcaaagggaaattgcatcctttgtggcttcatcaaggctgaactgatagcgggcagtaaagcgaacagcccgtaaaatgcggataaaatcttcgtcaaacctatcgaaggcatagcccacagtgcggatacttttcttttgtatgtcgtctcttcctccaaaaaaatcgataatattaccttgataatccatgcccatagcattgatggtaaaatctcgctgggaggcgtcttctttgaacgtgctggctaaatttatttgttctggctggtttttggcaagactatgggaacgaaaatgggtaatttcgtatttaaatccattcttttcaataagataaacgcctacattcatatttttggaaatgtcctgcaaaaaatgaaaattttctttgagcacgtcaagaggtgcattggtggcaatatcaatatcatgaatgggattgtgcatgatgaaatcacgaacagcaccgccaacaatataggcttcatagtcgagggcgtgtatttctttgagaatttcttgtgcggtcgtgaacatttttataagtacaggtagttataggtaaatttagttttgcaaactgctgaaaaaggcttgcccaaggctgacagcagcatcgccggcaggtgcttcctgcgggaaaagcagggtaaattcaggagaaagttcgtgatacagggcacggactaaaagttcattattaaatacgccgccgcctaaaataagttgaggcagcgatacaggcagagaaaattcctttttgagaacacaaaggcaattgctcagggtatgggcaaggcttgcgtggaaaattcgggcaatatcggcaatactggtatttttttgcaaaagcttaaaaagttccgcatagagatagaccgtatcaatttcaatatagggctcataggaatgtgcgggagtattttcctgcatttccaataaaatttgttctttatttttttgattaaactggagaggaatttcaataacagtatcaagttgtgaggaaaaagcttcattttcaagcttgatggcagcctgtccttcatagctggtatgggtgcaaatttccaagagcgcagaaatggcgtcaaagagccgcccacagccgctgcttttggggcagttgatatttctattcagcatgagttcgcattgtgtgagtttttcctgatattcacttttctgagaaaatggaaaaatatcattttcagctaaatagcctttttcctgagcttttttgtgatacgcaaaggcaatgcgccaaggttcaaaattggctgtatcaccgccaatgagggcaatgggggagagacttgcaaggcgataatggcgtttttcctgagcaaaaagataaaaaatttcaccgccccaaatggccttatcatagcctaagcccgttccgtccaaaatgagagcaaaataaggattttttgaaagctccttttgttcagccagcacggcataggcatgggaaatatggtgctgtattttttctaaaggaacggtattctttttgctgtattcttctgccatatgggtgctgggaaagtccgggtgcaggtctgtggcagccttgacgggtttgacttctaatagcttttgcaaatgtttggctgtatcttcaaaaaaatccagtacttctaaattgtctaaatcgccgatatgctggctttgataggcttcgttctctttggtgaaggtgaaggtattttttaaaaatgtgcctgtggcaaaaacagaggaaagatagtttgcgtttttgggaaaacggacaggtgtgggcacatagccccttgcacggcggaaaaatatggttttgggcaaagcattattattttcaagaggggtattttttgcttcttcaaggctaaggcatacagaatcgtccactcgaataaggatatcccggtcgtggaaaagatagtaatcagcaatgttttctaaatcttgcagggcttgtctgttttgtatgcaaatgggcttgcccccttgattggcagaagtcataataagggcttgcggtggttgcaaagtggaattttctgctaaaatttccgggctgaaaaggagtaaatgcaaaggcgtataagcaagcataattccaattctgtgcgtatccggggcaatgcttttaggcaggcaggattgtcttgtagggcagagcacaatgggggcggagggagaagtgagcagtttttctgcattgctgtcaatatgagcaagttttttggctgtttcaaggtctttgaccataatggcaaaggctttatcaggtctgttttttcgttttcttaatgttaaaacagcctgttcatcgaaggcattgcaggcaagctgaaaacctcccagacctttgactgcaacaatttttccctgatttaaatattgaatggtgcggtagacagcctcattattttcagccagaatattttggttcttgggaagataagggggattttctgtgtcgcaatttgccccgtccgtgagccagatatgcggcccgcagtcagcacaggcattgggctgggcatgaaagcgcctgtcgagtggattggtgtattctgtatggcacgtttcgcaaagctcaaaacagcccatggtggtgacggctctatcataagggattgattttgttattgtatatctcgggccacacgctgtgcagttggtaaaggcataggcatggcggcgattgtttttgctgaacatgtccgctttacagtctgcacatattgccacatcagggctcaccagcacgctgtgaccttcgtgggtgccctgttcggaaaggataatttggaattcttcttcgcctgcaacaggggaaatttcttgttttttatgatcagatattctggcaaggggaggcagttttttgtcaaaatcaaggttgaactgcacaattttttgttcacttccttgaatttcaatcaaaaccccctggggggtattttgcacaaaaccggttaatgtatgctccaaagcgagtttaaaaataaaaggacgaaatccaactccttgaacttgtccttttacaatatgttgttcacgcttttgcatactaaatatctagtttaaaattgaatttaggtttttcatcacctttttgttctgaggtttgactattgagtttttcaataaatgcttcatctttttcttcgtcggtcatggcaacatagtcagcatcatcattaaggtttaatttgatacgtcttttatttttcaaaagatcatcaaattttcccagaacatattcgtcatcgtcaacagcttcatagttttcttcatcgaccatggtatagccgtattcgtcggttttatattttgcctccaagccctcatattcttcttttcttttcttggctttttgcatgagctcaaaaacaagttcagggggcagttctgaagaaaattcataatagttgtcaaaggcagcgtctttatcaacaggctgcttggtttgattggacaaattatagtcgtattcgttggttttatcaatatttgccatgaaatcaggcatactcatttcttcaatgagatttgaaggcaggaaattcgcaacatcatctgcaccaggctgaacacgccgtttcaattctttaatttttctctttttgcggtcagatttagtatttcccatggcatggtctgtgccgtcacccataaattcatttatattgactttgttaggatcaagctgtgcttcttcgatttttttggtttcttctggataggcgtcaggaagattgtcaagtacaaatttgttgatgatggaataacgaagcagggctaaaggatggaaattagacagcaaacgagaagcaggacttgtttcttcttcctcttcatcagaaatagtatgtgcatcatcaaaaagcttggaaaggtcaacttgctgataattataggtagattttggaatattggttatttggctggcagtgacatgctcttctgttccctttgtttcattaggaagcatggcaataagattattgaggataggcgcaatattttcatctgtgggaataagcggagcagcattttcgtcatggtcagcgtttttatttttccgcactgaattatttttaatgccaatttcatttttttggatttcaagaatgattttgtcaacaaggatttgctcattattgacaaacaaagggatttggcacaaacattcagaatcattgatataaaaaatcgttacacgaagctcaaaaggcttttctttttcttcggcaatattgagaatttggattttaatattttgcccggcgtgaagagaaagtgtttcaggttcacttgtgacatcaagggttaagctttgaggtgaaatttcaagaagccggcagggatttttaaaattattaatctttacccaagtatttttaggtacaatttttaatggcgtatccgctgcctggtcaaatgaaattgaaaagcttttcgctgccataacttgtgtcctatttcatcacttgtcgttcaaggcaaaattcaacacgtctgttctttgcacggttttcaggggagtcatttggaaaacgcgggttcaaatctcccatgcccgttgctgttattcttaatggatctatatcatgttcaacaagccaacgcaagacatttacggcacgcagtgctgataattcccagttatttttaaaccgcgcgccttcagggattgggctgtcgtctgtatagcctttgatattaatcgtcatttctcggtttgactgaataacctcaagcacggtcataagctgttcttctgcttccggaccaagctcttctgagccttctttgaataaaaggctgtcgccgatagtcagggtaatagttccttcgtcaagaactgcgcccacatcgccttccacattttttttggataaatagctttggatagcgttaaaaacgttttcctgatttttgagtaattcctgacggatacgcattaaatcctgtacggattgctgcgcattgttattaatatttgccatggattgcccgccggcaacttcactggctgtaagaccgccaaaagccatacgcatagagccgaaaacgctttggaaacgttttacttcaaccgttgacatggatacaagcagaacgaagaatacgaggagcagggtaaccatgtcaccatatgtcgccagccacgaggtgtcttcaggttcttctggttctggttctggaatttgactcattgtaactgttcctatgcgttatgtgagaatttacgttattgcttattattttgcatcatcgtgctttcttacagaaggagcaaggaaggatgataacttttcataaaccaaacgagggttgttgttttcaagaatagatttagcaccttcaaatatgatggataagttcatactttcctgggtacttctggatttcagttttgtggcaagaggagagaaaataaagtttgcgagaatggtaccatacaaggtcgtaatcaacgcaaccgccatagcaggaccaagagcggatgggtcgttcaactggctcagcatttggataagaccaatcagcgtaccaagcatccccatggcaggagcaagagctgccattttgttaaatacaccaatattaataccatgccgtttctgcatggaggaaatttcgataaccacggtactgtgaataagttctggatcagcgttgtcggcaataagctgcatagcttttttcaaaagcggattgtttgtttcaacacgttccaatgccaaaatcccttcacggcggctgatttcagcaatttgaaccataacatcaacaacttcttcaggcatagttcttttactggtaaaggttttggatgcggctttaaatgcttgtaaaaattcttcaaaagggaaacaaatcaaggtcgcagcaaaagtaccaccaagaacgataaggatacttggaatatctataaatccacttggatcggggcccagtgcaatggtcgttcctacaagtccgaacccggctaaaatacctattagagtggctaaatccatatttttttcaccagttaactattgattaaaatgcaaatgatgagtaaaatatttgcagttaattaataaacgtaatagttaaaaatgtctagtgtttttaactatcaaataagagtatgttcagcatattcttttacacaaggaaggttttgtgattacaagaaataatgccattcgcaatattgctattattgcccatgttgaccacggtaaaactacgctcgttgacgggctgtttcgccaaagtgggttgttccgcgctgaccagcaggttgatgaccgtattatggacagtatggaactggaacgtgaacgaggaattaccatttctgcaaaaaactgcgctgttttatggaacggtgttcgtatcaatattatcgatacccccggccacgccgattttgggggtgaagttgaacgggctttgtccatggttgacggggttgtgcttttggtagactcctccgaaggcccacttcctcaaactcgttttgtacttcgtaaagctcttgcgcttaagcttcctgtgattggcgttatcaataaaattgacagaaaagacgcccgcccagatgaagttttgaacgaactctatgagcttttcatcgaccttgacgccagcgacgagcagttggaatttcctgtgctttacgctatcgggcgtgaaggtgttgctatgtataatatcggtgataaatccgaaaaccttagccccttatttgaaacaattttaaaacatattccgggccctgcctatgatgatgaattgcctttccaaatgctggtaactgacttggattattcagattatttgggaagattggcagttggtcgcatcagaaacggacatgtgcagggcaaagacagtttggtttgcataggggctgacggtgtggcaaagccgcttcgcgcaacaaagcttcaggtttacaagggcaaacaaatggttgacgtggaaagtgctgagccgggcgatattattgttatggcgggcattgaggacgcaactatcggcgataccatctgcaccaaagaaaatcctgctgtgcttccccgcattcatgtggatgaacccactgttgccatgaatttttccatcaatacttcacctcttgccggacgcgaaggaaaaattgtgcagtctcgaaaaatc

SEQ ID NO: 942 - DNA, 23009 bp, synthetic construct
  misc_feature 1..23009: note = Synthetic
  source 1..23009: mol_type = other DNA
ccgcaatatgaatcaaccgtgaccggaaagttgcttgaggccggcgcatcaattctgggcaagctgaatttggatgagtttgcaatgggcggaagcaacgaaaccagttattacggtccggttattaatccgcataaggcaaaggacagtgatgcagatttggttgccggcggttcttccggcggttcggctgctgccgttgccgcagatatgtgcgccggtgcgaccggaacggataccggcggttctatccgccagcctgcggctttttgcggcgtgaccggaattaagccgacttacggccgctgttcccgttacggcattattgcttttgcttcatctttagaccaggccggaccgattgccaaagatgtccgcgactgtgccattatgttaaacgctatggccggctatgacccgaaagattcaacttcggccaagatagccgttcctgattttgagagttttctcggtcagaatatcaaaggtttgaaagtcggtattccggcagagtaccgtcctgacggtttgaatgcggaaatttccaaactctgggatgacggaatagccaaattaaaagagcagggcgcggagattgtcgatatatctctgccgcataccaaatatgctttggcagcttattatatcattgcgccggctgaggcttcgtcaaacttggctcgttatgacggtttgcgttacggattgcgcgtgccgggcgagcatttggacaatatgtatatcaacagccgcaccgagggtttcggcaaagaagtcaaacgccgtattatgatcggcacttatgttctttctgccggatattatgacgcttattatctgaaagcgcagaaagttcgccgccttatccgcgaggattttatcaaagcctttgaaaaatgcgatgttattttaacgccgacggctccggttgccgcttttccgattggagacaaatccatgcaggaaaatccgattaacatgtggctgaacgatgtgtttacggtttccgtcaatttggccggactgccgggtatgagcctgcctttcggcgttaatgcccaaggtttgccgctcggcttgcagcttatcggcaaggcatttgacgaagggactattttcaaaacagcgagcgctttaatgacggagaagaaataagatgacgggaatgattattgaaacggaaaaaggcaaatgggaaattatctgcggtttggaaatccattgccagattatttccaactctaagattttttcaggcgcttcaacgcattacggttctgatgctaatgaaaacgtggcctttattgacgccggcatgcccggtatgctgccgagcttaaacgaacgttgcgtttatcaggcggtcaaaaccggtttgggcttaaatgcgcagattaacaaatattccgagttttcgcgcaaaaactatttttatgccgatttgccgcagggttatcagattacgcagttccgttatccgattgtcggcgagggtaaggttaccgttgacttgagtgacggaacggccaaagaaataggcattgagcgtatgcatatcgaacaggatgccggcaaatccattcacgatatggcgcccgataagagctttattgatttgaaccgcgccggcgtcggcttaatggaaatcgtaaccaagcctgattttcgcgctcctgaagaagcaggcgctttcctgcgcaagctgcgttcaatcctgcgttatctcggaacctgcgacggcaatatggatgaaggttccatgcgctgtgacgtgaatgtttccgttcgtccgttgggcagcaatgagtttcgcacccgttgcgagatgaagaacgttaactcggtcaaattcgtgatgacggcgattgaaaacgaagcgcgccgacatattgaggtttatgaaaacggcggggaaatcgcgcaggaaacgcgccagtttgatccgtctaccggcaaaaccaaagcaatgcgcaaaaaagagtttgcccatgactatcgttattttcccgagccggacttgctgcctttggttttggatgatgactatattgcacgcattaaagcggatatgccggaattgcctgatgccaagaaatcgcgttttgtcaacgagcttggcctgacggcatatgatgcggaagttatctgcgaaaacaaagaaacagcggatttctttgaaaaagccgctaaaggccatgatgcgaaaaaggttgccaactggctgatgggcgatttcttcggcatgttgaatgaaaagaaagttgagttgaaagactctccggtcagtgccgaaaatctcggaaaactggttgaactggttacatcaaacgtgattaacggcaaaacggccaaagacgtttttgcaattatggccgataccggtgcagaccctgaaaaaatcgttgaagaaaaaggtttgaaacaggtgacggataccggcgcgattgaagcgattgtcgatgaagtaatcgcttcgtctccggataatgttgccgcttataagggaggaaaaacgaatcttatcggctggtttgtcggtcaggtgatgaaaaaatcgcaaggcaaagcaaatccgggggttgttaacaatctgcttaaacaaaaacttggataagaaagagcttgattaaaaggattatcttatggattttttgagctttttgaaaaattataaagcatatgatgaagaagaggaggcagaacgcctctcttttcttcagtttttggaagctttcggcgataaggcgtatgatagggataatctggtcgggcatttttctgcttcctgctggattgtgaataaagagcggaccaaggctttgatggtttttcataatatgtataaaacttgggcttgggccggcgggcatgccgacggggataaaaatcttctgcatgtcgctttgaaagaggctgcggaagaaacagggctgaaatccgtaaagcccgtttttgaaaatccgatagatttgaatgttatggttgtgcataatcattacaagcgcggcaagttcgtgcccagacatttgcatcataatccggtttatctgtttgaggctgacgagaatgagcctgtccgcataaaagaagatgaaaattccggcgtggagtgggttccgtttgagaagatcagagattatgtttcaaacgaatatacgatagtttattatcgccgaattatggataaaatcagaaaattcggctggtagaaaggaattaaatgtttagcgaaatttttgttcagggaatattggcgtcgctgtttgccggtttggtaaccggagtaggcggctttatgatttttttgaagaaaaaatattctgaagaaaatattaatttcatgctgaatttggcggcgggcgttatgctgtctgcgtctttttttgcgcttttggttccggccatgcagaaaattacggaattttcgccggatatacatgttgccggattttggtattgcggagcggtgtttgtcggagtgcttttaatctggctgttgaatacgattttgcctcatgagcataataatatggggcagcacggcatgcatttttcattaaaaaaagcgtggctgtttataattgccattactctgcataagttgccggagggtttggctgttggcgtggcttacagtgcggaagattttatgaatccggacagtttggttttgggaattgccctgcataatattcccgaaggtttaacaatagccatttcgttggtcgcagcacattattccaagcttaaggccgctttgacgtctctgcttatcggtatggttcagccggtgggagctttaatcggtttgctgacaatggatttcagcgataaaatcgtgcctttgggaatggctatggccggcggaacgctgctgtttgtggttattaatgaaattctgccggaaacatatggcatgaaaaaaactgaaaaatcggcttttgccgtttttgccggttttattttcatgacttatctgaccatggttttgggcgagtaaaaaaaatcctcaaacggcggagtccgaatgaggaaaaaaattttttattatttttttcttctgaaataaatcaggagaaaaacaatttgccaaattactctggcggcaaatactccggcaaggacgagccaatgccaggctgcgacatattgttgacaatggtttctatggcccagttcttctacataccagaaaccgtttattttaccgcttataaaagcgcaagcaaaaacgattatggcgcaagtggcgtggagcgacaaccaaatcagagaattttcgactttttgtcttgtcaacttcatgtttatcagggtttctgcaaatatgcagagagcgataaggaaagttcccgctaaaaccccacacaagtcggtcataatcagatagctgaaaataccgacaaagattacaagtaaacttactaatagagcggctaaatttttcatattttttttattagttaatattcattataaaaaatatgccctgttattataaggttatatggatcagcataattatagacatatttttattttttatatttaaccatatcataatagcattaattcttcaatagacaaaattttaaggttttatgaaaaaatatcagtaatggtttttctgaaaggtatagggaagaggttttataaaatttttgaggtaaattgaaaaaaagctgttgacggagcttcaaacataatataaatataactccgtaccacatggagagttggcagagtggtaatgcagcggattgctaatccgtcatcgtgaatagcgatgcacaggttcgagtcctgtactctccgccactaaaaaaatcccggcatcgtccgggatttttttagtggttgaacggcgaggcaggctcgaaccgagaggctcgctaagcaaaaaatacaatgatttgtattttttgtctgcaagagcatagatggtcttattaagcaaaggaagtgtaacgactgcggcgaaattagagctctatgagaaagagcagcgaagctgcgtagtcctgtactctccgccattaaaaaagcggtatccttaacgggtaccgcttttttatgagagctttataagctgagcaataacattccgccgaaacaagtccataataaaatcaaataaagcgtgaaattgctctcattttcgttaacatatttgttatttctgtaaccacagcgtttgcaccgcttataatcaatgattaatccgatgatgccgattataacaaagccagcaacgaaaataattgcttttgtactagttgtaagtaaactttcattcataagaattttattttaagtaatacaatagataatcgattttgtttatattttattctatttggaaaaatttgtcaataacgtaggaaattagagttgctgcagtttgttttaattgtatttgactcttgagatttttttttataacctgattttgcatcgggtgattaccggtgtgaggtttagaaccctctgttgatagttgtctgttcgacagacgtaaaactaccttttggtcgtttgactggaaggtagctaataaggtatatttataccaaatacactacactattctatcaaataggttctaacttccagtcgcctctcatcaaggcgattaattttttatataaaaggaagttatcaaatgaagaaaattatcacaggcgtttgtcttctgtttttatcagcctgcggcactgttttttgtggttcgactcaaaatattacgttcaattccaatcttaaagaagtgaaaatttatgccaacggggcattggtttgctcctcgatgccttgccgagtggatatagaccgaggttcttcagccctgacgattattgccaaagctgacgggtatgatgatgaaatcagccagattaaatcaaaaatcaatcccgcttcttggggaaacctaatttcagcttacagctggacgacggattttgccacgagttctatgtggaaatacagtgaagacggcgtttatatcaacatgaaaaaaacaaatatgaaaaaggccgagcaggatgctttcaggcgcgaagctcagataaagcactttgctctgttaaactatgccgaaatcaaaatcggaaatccggaatatctggaagctttgcttagcttgagcggtaaaagcaaaacggatttgcagacaataatcgccaatgcggctacggaagttgaactggctgagaacttggccaagttatagcgcgttatgttgtaaacaggctggattttatgtccagcctgttttatatcgggcgtttttttgggcaaatttttggtttagacagcgctttttgtcatgtcgtatagccggttttatgtcattttttgtttatctacaggggtattaaaatatttgcttctcttgtctgatctgcatataattttattgcaattacggggtaggagagttttatgttatcaacaaaaatggatgattgtgtcggttgtggcgcttgtgaaaatatttgtccggctaaggcaatttcgatgcaggaaaacaaggaaggttttttatatccggttgttgatgccgatttatgcgtttcatgcgataaatgcaataaagcctgtcctgttcaaaaagattacacaaaggccgttgcgtctacggcttatgctgcatggaacaaagacgacgaagttttgcaaggcagttcgtccggcggcgttttttctattctggcgcaatatgttttgaataaaggcggcttggtttgcggcgcagctttagttgagggcaatgttgttaagcatattctgattgaaaatgctgatgatttggaaaaattgcgtggttctaaatatgttcagagcgaaacaggcactgtttttgcgcaaataaaaaatttgctcaaatccggccagcaagtgcttttttcgggaacgccgtgccaagtggccggccttaattcttatctcggaaaggagtttgacaatttgctgacggttgacgtggcgtgccatggcgttccttcgcccaaagtgtggcggaaatatgtttctgaattggggaatgatatttctcaggtcaatttcagagataaggccggcggctggaaaaagttttgtttttcttatttggcagaaggcaaaaaaacatgtatgcccgctacggaaaatatattttttaaaggttttttgagaaatctgtttttgcgaaaaaattgcggatcttgtcggtttgcaaatatgaacaggccgggcgattttacgctggcggatttttggggcattcaaaagcttaataaaaagcttgataattttcagggaacgtctttggttttgagcaatacgcccaaagcagaactggtgttgagagaatgtcaggacagttttgccaagcttcagaaagttgcgcttgaaaaagccgtccgcaaaaataaggtcttgtatcagcccttgaaggccaatccggcccgtgacatttttttcagcgagtttgccgggcaaaatatttccgaattgacggctgccaagctttataaagacgagtatcatcaattgttgaataataaggcagatgataaaaaagtcggaattatgaattttcattacagcaataccaattttggcgcggtgatggtgccgtatgctttgtccacaattttgaaaaaatatggttatcatcctgaaattattaattttattcctaagtttaaggaagataaaaatggagtttttgaaacttttcgagagaaatatctcagtcggacttttatttgccggtctctgaaggatttggagattgtcagtaagaatttctgtcggtttgttaccggaagcgatcaggttttccgctggcaccgaaacggtaaatatttgtttaattatgtttccggtttagccaatatcatttcttatgccggaagttttggcaaagacaggtatgaaggaaaagatatttcttatgttgcggaattgttcaagcgttttgacgctgtttccgtcagagaaaaatccggcgttggcattttgaaagaaaagttcggaacggatgcagcctgggttttggatccgaccttgttgcttgacagttctgattatgagcggattatcgaaaacgaacaggttataacgcccgataaaaaatatatcggctatatgtttttgaacaacagcataaaagaagattcctttgttcgcctgcaagataaatatgaacttgttaactgtctgaaaactaatggtaaatttcacagtgtggctcagtggctcaattatattaaaaattgtgattatttcattacagattctttccacggttgcgtttttgcaacaattttcagaaaacaattcgtttgtatttcgcggaagaaaggcggaaattcccgcttggaaagcctgtttgagcgtttgggaataaatccgaaacgtttttatagcgagattagcgatatcgatatgaattcttttgatgaaaagatagattatgaaacagttgaaaaacggttgcaaaccgcaaaagcggaatctttggattatctgttatcttctttgcggcggccattgacatataaacagcgtctgaatcttccgtttgaacatgaatttacttattctttttgcgggattccgtttttaagcagaaagatcagagaatacagcgttatttataaattgttcggatttttgccgatattgtcgcgttatccgagcaaaaagaatgctgtttacaagcttttcggaattttaaaatttatgacggctaaggaaattaaagattgtcgggtttataaacttttcggttttttgcctgtattcaaaatcaagtctgcttattaatgtcctagggggtgcttaaatgaagaaagtttctcttgtttctccatgttataacggagagtctcatttggcgtattttatcgaatctctgttggcgcagacttatccgaatgtggagtttatttttgttgatgacggctcaacggaccgaacaggagagatattttcttcttatcaaaagcgtttggaagccaaaggctggacggtacaatttattcgtcaggagaacaaagggcaggcggccgccgttaatgccggtttgaagcatgtgagcggggattatctcatttggccggacagcgatgatattttgtatcctgaacacattgccaaaaaagcagagtttatggagaaaaatccttcatgcggaataggcttttgcctgttggacaaggttaatgaaaataatttggataaaattgtcggacgaatggggcgccggccggaaaaagaagataatttgtttgaagatttgctgacgaacaataatatcctttggccgccaataggttctattgtcagaatgagcgcatttgatgaaactaatccgcaaagagaaatttatgaagggcgcggcgggcagaattttcagatgatgttgccggttgcttccaaatatccggcgggttatatgaatgaaagccttggaaaatatgtggtcagaaaatcctctcacagcaaaaccaaaagcgatttgttgcaacagaggcatttcaaccttttgagtatttggataaatacaattcaaaatttgcacggtgtttctgaagaagtcaaggtacagagtttggcaaaagcctgttcatattttgattttgtttgtccggcagttaaaaaggtcagatttttaggaataccgcttgtttccgtggtgacgagaaataacaagaaaaaagtcaagctgttcggtttgcttaatattatgacgcttgttaaaagaggtcgtcagataaaaggccgtctgttcggaatttttcctttttcggtcaaataattttattttgctcagtcgggagatataaaaaaggggatgactacctgctaaaaaacagtttgtcagagccccactcgaaatttttcgattattatagcttcctttccaaatcagatacataatcaaaaacttcttgcataaatactattagttgataaactcaatgtcaatagtgttttttggggatgtgcaatgaagaagaaaatttttggtttcgatttgggtattgcttcaatcggctgggcggttatcgaatttgataatgagtattttaatcctgaaacaggggaaattattgacggaaaaatcattaaatccggcgtgcggtgttttcctgtggctgaaaatcctaaagatggttcttctttagcggctcctcgtagagaaaaacgtttggctcgccgcatatgtcgtcgtaaagccagacgaatggaaagcataaaaaaattatttattgctaaaaatttggtttcagatttgaaagaattagacgctctttatgccgaacagcaaggtggtgatgtgtggaatttgcgcgttaaaggattgtttgaagaattatcaaaggaagaacttctgcgcgttttaacccatttggccaagcatcgaggttttaaatcttatcgaaaagccgcagaggaaaatgatgcggaaggtggaaaagttcttaaggcaattaatgaaaataaaaagttattgacggccaaccagactttagcgcaagttattgttgaacgagccggggaaggcggtaaaaagcgcaattatacagaaacggatgccaaaggaatggctaaagccgtttataataattcaattcctcgtaatgaaattgagcgggaattggatttgatttatgaaaagcaaaagcagtatggcatttttagcaaagatttgtttgacgattttaagaagatagcgtttaggtatcggcctttgggaagtgttgccgatatggttggttattgtacatttgaaaaaggggagaaaagggcgcctaaagaagctcccagttcggaattttttgtcgcttggggcaaaatcaataatatggccgtttatgaaaattctcaaaaaagatttttgcatcctgaagaaaaagttgctttatttgagcttcttaaaacgacgcaaaaggtaaaatatcaggcaatttctaagaaaatttttgccggtaaagatattcaatttgcggatgttaattataagcttacagagaaaaaagccaaagacggcagtgttaaagagataaaccccgaagatgttttgttctatgaaatgaaaggctggcataaattaaaagctttgtttgataaagaagaatggcttgatgttagcagagatatttctttgcttgatgaagccgttaatgttgttgcctgtgaaaagaacgatgaaaatattacaaaggggttggaactcataggcatatcagaaaaatatatcggaaagtttgtttctcttacaacagacaagtttgttaatttgtctttgaaagctttatctaaaattattccttatatggaacagggaatgaaatataatgaggcttgtgaaaaagcaggatatgatttcaaagaaaatgttgataggctcgttgataaaaaaggaattttactgggggtgatttctgctgataaacagacaaaaattccggttgtgaatcgtaccgttgcacagtttagaaaagtttacaacgctatggttcgtcaatttggcgtaccagaccagataaatattgaaacaggccgcgaattgaaaaaaagttttgacgaacggcgaaagataattaacaaaaataaagaaaatgaacaggaaagaagagaggctcgagaggaattagaacaagaaaacatcaaaggcagctccaaaaatattttaaaatatcgtttgtatcaggaacaagacggaaaatgtatttattccggcaaaccgatagatttacatcgcttagacgaagaaggttatttggatgtggatcatattattccttattcccgttctttagatgattctctcaacaataaagttttatgcctttcttctgaaaaccggatgaaaggaaataaaacgccgtttgaatatattagagataaggacagttgggaggcgtttgaagcaagagttaacctattgcgtaataatcgtaaaaaagaaaatttgttaagtaagaattttaatgacagagaattggaattcagagaaagaaatgccaatgataataattatattgccagatatattaaacaatatttggaagatggcatagattttaattcctgtaatcgtcaggatattaaaaatcgcgtgcagatgagaaccggatctttaacatcttatttgcgccattgttggggattgcgtaaagatcgcaatgaaaatgaccggcatcatgcgcaggatgcaattgttattgcctgtgcaactcagggaatggttcaatatttgtcgacagtttcaaagttatgggagaataagtggcaattggcacaatccaaagaagacggagaagcttggtataagtctctgaaatataaattctctgagccatggaacggttttagagaagatgttcaaaaatcgctggatgaaatattcgtttcccgtccgccgcgtaaaagtgctacaggatctgttcataaggatacgatagataagtgctcggaaaatataagtaggctttctgttcgtggtggagaagctataaaggagaatatgtttcggtgtgatgtatataaaacgaataccggttataaaattgttcctatatatgttgttgatttagttaataaagaatttaaacattatattcaaccttatgaggagattgatgggaacaaaatagaggcacaggaagcagattttttctgtagtttatataaagatgattatatagaaatttatgttgataaagatgaaaagtacgggggatattttaatcaatataatgctcaaagtggacagatatatttggggtctgtagataatgcctctgtttataaaataagagacaaaaaagaaacaaatgggtatcatttagctaatgaaaagaaaattagtttatcaaaatgtgttaagttacaaaaatatattatttcgcctcttggagataaagtattagttcaaaaagaaactcaacgattttctaatattacaaaatccaatgcgcaaaggcataaagaacgacaacaaaaagggtaaataatggggtggcggattgttcaaataacaaaaccttgtcgattgagtgttaaagacaggcaacttctttatgtgccgcaagaaggtgatgaattgaaaattccgctggaagatatatcagttcttattttggaaaataaacaaatttctttgaacaattacttgttttcggaattatctgagtatggcattgttctcttttcttgtgatggcagccatttgcctgcaggtgtattttttccgtttcataatcattccagatattcagaaattgcttggcagcagattgaaatgtcggagcctttgaaaaaacgtctgtggcaggagattgttaaagctaagattaataatcaggcgatgtgtctagagatttttaactgtgctaatttttcaaaattgcgggaaatttcaaagcttgtccaatctggagatgttaaaaattctgaagcctttgcagcaaatatttattggaaaagtttatttgagaattttaatcgtaataatgatacagattttcgtaattctgcgttaaattatggctatgccattatacgcggttgtatggcaagggcgattgttggggcaggattgttgccttgtttcggtgtccaccatgccaataaacttaatcaatttaacttagttgatgatttaatggagccttttcgtccatttattgattatcaggtttataaaatggacgttattggtaaaacagaactgacatctttagataaaaactatttagttggtgttttaatgcaaaactgcatttttaataatgaagaagtgaatctgctaaaagcctgtgaattggccgctataagccttgtgaaatcaattaaacaaaaagatgtgaagcatttacaaattccgatattaaaaaaattaccactttttgaatgaggttgtggataaatggcagtcggaggagaacgttttatgagaatgatagtcttttttgatttgccgactttgagcaaaacggatcgcagaaatgcgagtcgctttagaagtttccttgtgaaagacggatatacaatgctgcagttatccgtttattcacgaatttgtaaggggcaagatgatgtggataaacatgcaaaacgccttaagtccttgattccaaaggaaggaagtgttagattacttactgtaactgagaagcaatatgtttcaatggaaatattagttggaaccttaaaaaaagaggaagaaataggtgataaacagcttttattgctttaaaatttttgttaagaataaaaataacctgttggaaaatcaacaggttattttgtatctagtatagcatatctgatttggaaaggaagctataaccctacttttgataatgatattattagccaaagtatagcatatctgatttggaaaggaagctataaccaagaaaaactcgctgaacaaacaaaacagagtatagcatatctgatttggaaaggaagctataaccacaaacacagttaaacactctcacacacaagtatagcatatctgatttggaaaggaagctataaccgctattgcagaatacaataagcgaatcgaagtatagcatatctgatttggaaaggaagctataacagcaatcaacgcaatgttgcagaatgtagcagtatagcatatctgatttggaaaggaagctataactctgagacgattgatttaactgggtacgccagtatagcatatctgatttggaaaggaagctataaccaacggttatcacttacgaagagtctttaaagtatagcatatctgatttggaaaggaagctataacagcaattaatgcaatgttacagaatgtagcagtatagcatatctgatttggaaaggaagctataacattgacaccagatgaaaacggtatatattaagtatagcatatctgatttggaaaggaagctataaccgccattgcagaatataacaagcgcattgaagtatagcatatctgatttggaaaggaagctataacgcaaaagccgcagataaactccattctattagtatagcatatctgatttggaaaggaagctataacttgtaaacattgccccgtgtgcgtttgctgagtatagcatatctgatttggaaaggaagctataactaatggaagatgttattaaaatgatactagagtatagcatatctggttttgttttacatgtttaatgattttttatattgaaattttttgtctggggattatttttttattgacaaaaaaaattgtgatacataaacttatttggtaaatttaattcaaggaaacaaatgaccaatacaagtcataacatagccatttttcagaacgcagctcgtttgagcagcggtattttggcatgcattatttccttgcttctttctattttgcttttgattatcagccgctgagcattttggccctttgaaaattaaagtgtgggtgctcagtgggataacgctttacacactttaagaagtttagggttaattttgataatcaagagaaaacaaatgaataattcaatcgaaaatacagttaatgacgttaaagccggttttgccgattattttgccatgaccggtcacaagaattttaaacaattctactatgattggcatgttgacaatatgctggctccatttgccggagtggttcaatatttccatgaaaattacgggagcgatgcgccgaagaagtttcatgaatttgtggctgatgtgggcaaaagcgttgaaaattataatggtgacaagccgcaattgagcgttttggcaacatctgattattcgaaaacagaagacggacgcttggcttctttattagagggggttgaaacttttggttttgagttcaggcagtttatttatagttttgcctcaaaagaagaccatgcaacagagtttggtaattggcctattaagacaaatatgccttattccagccagcacggggttatggttggggctgatattctgaattttatggataaacatttcaatgagattgtcagaaaaggaaatgtttatcagcgggcattatatgcaggtgacgaatatttacgcgagacgattgtcaaagattatcgttatcaaggcaattataatttttcagaacgtaagaaactgatgaagcgcctgcatgatttgcgtgacggtttggctcagtcttataccggcatgcttcagggaacacctgcaataaacgatatgtttcaacgagaagggagcgcttctccggcaaaggtatccggatattggccgagcggttttgagctggaattttatgttccggaagaatataaagattatggcttgctgatagattatctgaaagagaaaaacggctgggaaagattatattcaagcaaccatgacgccagcgtttatttagatgcaaattcggccggcgtaatcatgcgtgacgaaagccttgccagatacagcggtttggcggcggttgaatatgcaagccggattatgcgcagcaaagaagacgaagctagttgtttgaaaattttggatgcttttaatgaggggcatgtgaatgtgcattgttctttgcaccagcatttatcagcggaaaactttgatttggatacatataaacgtttggtcaaacgtatgatgcagcacgaagacgaaatcgtcggcgcttttgccgcgcctgagcggcaagacaataaattgctttacgccacctatatcagccgcaatttgagtgctgacggtaagagagattatccgtttttgtgcattatggttgatttatgcgatgataaaaaggagctggaagaaatggtttcattcggcaataagtataaaacgctgaatgtgatgcccaagcatacggtagaaatgagatttatgaatgcgaattttaacaagcgttttgtcgaggcctttttacagtttaaccgcgaatttgtgaccgctgccgttcaaaattcgccgagccatatgaatcgtccgttattgaatatgtatacttggaaaaataatcgcgcgacagacagaaaaacggttattcacggattatcttattactatcaggttccttatgattcttatcgcccgatgaaacgcagcgtttcaaaatcagccattgaaggcgagcagaaatatgcgcgtttggttatgcatgccttgactgagacaggaaaactggcttatcttaatccgagttataacaaaaaggtgagggaggcaatggcccgtggctgataaggtatttacacaactaaacgaaaattcggattgtccgctgattttgacttgtgagcatgcttcggcgcaaatccctgaggaatatcataatctggggctgccggcggaagagttaaaccgtcatattgccagagataaaggcgttaaggaaattaccgaactgctggcaaaagaattaggctgttttgccattatgggcggctattcccgtttgctgatagacttgaacagacggccggaagaagatgagctgattgttaaaaccagcgacatgacacatattcctgagaatgaaaatttaagcgatgcagagcggcaaaaacgtcttgatgtatattacaagccttattatgcggcgattgagcgtcagattgaatatttgcagaaacagggaaaaacgccggttattttttcaatccacagttatacgccgcagcttaaaggcggcgattatcgtccgtggcatgcaggcattttgtggcacaagccggcaaaactggcttcctttttgtttgaaaatcttagcaagaataaagataaatttattggcgaaaacgtgccgtatgatttgcgtaaatataatacaggagcggctgttatttgtggagaagaaaaaggctttgattacggattaattgaaatccgcgatgacgagttcgataatttggagcagggtgcggcgtattggagcaacagacttggcattttgttgaggaagtttttattcgaataacttttttatgccggcgttttgaacgcgcagcctttggtcttttatattttgtaaacgcagctggtttcgccgggtttttgcagatatttttggtgatattcttctgccgtccaaaaacgagaggccggcgtaacctccgttacgacaggattagcataacgtctggaagtattcagaagcgctatttgggataaagctgcggttctttgatcttcattaaggtaaaatatggcagagcggtactgggttccgacatcagggccttggcgatttaaggatgtcggattgtgtatggaaaagaagatgtttaacagattgtcaaaattggtgattcccgaatcaaaaatgacttcaaccgcttcggcgtgtccggtgtctcctttagctacctgcagataggtcggattttccgtctggccgccgatataaccgacaacggttgcaataaccccgtcaattttttcaaatgcgttttgaacatcccagaaatttccggcggcaaaaattgctttggacggcatggcggttatctcccttaaatattttattatgtatggatataaaatcccttgtttatttttaaagggggttcagccttaaaaaaatgtccgctctctttaagtcttttcttcaagctattatatcaatggcaacaaacaaaacattaaggagagaagaatgaaaaacataaaattaaatattgataccgatatgcctgttatcggtctgggaacatggagagctgcgccggggcaggtttattcggctgttcgctgggcaatcaaactcggctatcggcatatagactgcgcttcaatctacggcaatgaggctgaaatcggccaagcgctcaaagatgccgttaatgaaggggatattaaacgcaaagagctttttgttacttcaaaattgtggaatgattctcatgcaccggaagatgtccgtccggctttggaaaaaacgcttaaagacttgcagcttgactaccttgatttatatttgatgcattggcctgtcgcacagaaaaaaggaacaacacatcctcaatctgatgatgatatggtttctcttgaggctttgccgctggatgtgacctgggctgaaatggaaaaggcttataatgacgggttggttgaatctataggcgtttctaattttggcgtaaaacatctggagcagttaatgcaaaaagctcagattatgcctgctgttaatcaggtagaatgtcatccgctgttgcagcagaatgatttaattgatttttgccgcaagaataatattgccgttacggcttattctccgctcggttcccagcatcatgatgccgaacagagtgttttggataatcagacgattaaagaaattgccgaacgtttgaaaattacgccggctcagttggttcttgcgtggcagcttaaccggggcgtttcggttattccgaaatcagttcatgaagaacggctgaaagagaattttgccgcacaggttgtggagcttgaccgagcagatatggataagattgcgtcgcttgatagcggatttcgttttattgacggttccgtttttgaacgcggcggatatgctgaaatttttgcttaagggatatgccgttataagaaaagcctcaaaattgaggcttttcttatatatgtttttttagaaaatctgttaattcggccttgttttcccattgaatgccaatttccaagactttgaaatttttttgcaatttcgccggaatctttacaaaatcttttgaggtggtataaagctcggctcgttgtttttcagccattgcaatcaggttttcaagttcttgttgcgtatattgatgatgatccggaaaatctacggtttttaataagttgaaccccatttcgcgcatggaggcataaaatttttcagggcgtccgataccggcaaaagcaattgcgtcggaattggctgtttcaatttttttaggcgtaacggttcctttgaaaacgggaaggaaaccaaattcttcggccagattatgtttatcttcgccgataataatgactgcctgtgcccgttttagcccgtctgataatgattctctgagcgggccagccggaattcctctgccgttgccatagccgaaaccgccgtcaaaaaccagaaaagacaagtctttttttaatcccggattttggaaaccgtcatccataatgattaaatccgcgccgttttctaaagcttttcgagcgcccagaaagcggtccggattaactatgacaggcgcctgacgagagagcagcaaaggctcgtcgccgacttccgcggcggtatgtttccgattgtcgacaacgacgccttttaagcttccgccatatccgcgggagatgaaaaacggattttttcccaaagatcggataatttcggccagagatattgctaccggtgtttttcctgtgccgccggctgtcaggttgccaatacagatgaccggtttgtcaatgcttttcgggcgggaaaatttgatgtttaattttgtcgccagattatacaggcagcctaaaggcaaaagaatattcgaaataaaattctttttattccaacaatccggcgtcttcatttaaatatatcctttaactttttcaacaatgccgtctaagacttttgcttctccgtaagcccagttataagccaaacttctcttagcctcaagcaggtctttatttgtcaaaagttgcagcaaggcttcttcaagttctacaacgtcattgacttgaataacggcatcggcttttttggcgcggttcatggcatcggtaaaattatgcatgtgcggtccgaccaaaacggcatcgcggaagcgggaaggttccataaaattttgtccgccgtgcggaatgagcgaacctccgatgaaaacaatcggcgccatatcataccagatgccgacttcgccgattgtgtcggcaatgtaaacgtctgttgttttgctgattttttcgcctttagagcgcaaagcggtttttaatcccaattcgttcaattgctcttggatttcagggccgcggttggggtggcgcggcgcaatgattgtaattaaccccggcactttttcaataacgcgtttcaaaaatttgccgatttttaattcttcgtcattatgggtcgagctgacagcccatagcggccggccttcgatttgttccataatttcggcctttttttctgcgtcgacaggcggattgataccggcgtacttcaagttgccgaggcacatggaatcttttgcgcccagaacgcgcaggcggtaagcgtcttcttctgattgtccgagacaataagtgaagcagcccagcaactctttgctgatgaagtcaaattgctgccagcgtttgaaggatttattggaaatgcgcccgttaaccaaaatcagcggaatatttttgcgcttaatgccggaaagcaatgccggccataagtcagattcaaaccacaataccaaatccggatgccaatgcttgataaaacgggagacaaatttgggattgtcaatcggaatatattggtgaaaagcccgttcaggcaaacgtttgcccataacctcggcagaagtgacggtgccggttgtgaccataatatgcgcgtcaggataattttccagcaatttgttaatcagcggcagcatagataaagattcgcccacggaggcgccatgaaaccaaatgagttttccgtccgggcgtttcattttgggtttgccgatacgttcgttgaagcgttttatatcttctttaccgttttgttggcgctttttaatatagcggcggataaccagcggatataaaatgcggataagagtgttataaatgctgataaacatatctaatttcctttattggttttcggacggtcgtttttgttttttatttcgcttcccggtttggtgggcgtgatgcccatttttttatcggcgtcataatttaatttattcagttcattttcaattgtctgccgatattgttcaagttcttcatccgtagcgtctgccggaatgtaaaatggtttgctgaagcagcaaatgcctttgttaaaaggatagggaaccatcattttatcccatgcgctttcaataattttacagcgtttggtgctgtaagtcataccgattatcggtttgccggttttttttgcatagtaaagcgggctgattgacaaatgcattctcggaccgcgcgggccatcggggatgatgcagattgacgtgtcgttctgcagagaagtcataagccccagagctgcgccgcgggcattattgttgcttgaaccgccgatcgtgcccagtccgtatttttgcaaaacgccggcaatcattctgccgtcattgtgcaatgagacaagtgcattgagcggaaaacgataatctctgaaggccggaagcatcaaagcgcgcccatgccagccgatgagaatgaaatctttgccggcttcccataatttaacgggattttcacgcccttttatctgccatgaagatgtataatataccactctggtataccaatatataagtgaactgatacagtttatggccgtatctgatttaagcatgtctttcagtttttttttcaggcgttttttgatgttgagcataggcgggctatttctttgtggtatccgtaatggcaatgccgattttgtcggtttcggtaataacgacttctccgtgtccgattaaaacatcattggcatatatgtcgacataatcatttacatcgcggtcaagctcgacaaccgcgccgcggccgagttttaaaagctggtgaacccttaaatcggcggttcccaaagtgacagagatattgactgatatttcttctccgatgtcggcgtttttcctgatatttgccattaaaaattttctccgttaataaatctgtgcctatcatatataatttttttatttaagcaaattcaaattatgcacttatcaaaccttattttacaattacgcagcttgttgtggattaaaaagtttagacattgccctgaaatgaga

SEQ ID NO: 943 - DNA, 22997 bp, synthetic construct
  misc_feature 1..22997: note = Synthetic
  source 1..22997: mol_type = other DNA
gtccggggcaatatcgtgagtccatcgctattgattctttgctatcagagcgctatgtattacgtctgattgtcaatggcaaagtctatggcgagaaaatctgagtaccgaccactatattcaaatactattatgaaaaatttatcaagcctttatcaaaccgccactcttttattgttcgtctgtataggattctgcgaaacagtctctgccgataatcccatcaaaatctcccaacctcaaatttcgcctgtctctccggaagcggcggctgtacaaaaatatatttgctatccggttaaccatagtacaggattggccgatatcaccattccgctgtataccattaaagccggcgatttagagcttcctatcactttgacctatcattctgccggaattaaactccatcagtcaagcggctgggtgggtacaaactggacattaaatgccgagccttccgtcatgcgggaaatcaaaggtattccggatgacgcaaaacgcggaggatacagaaccttggaatatcttaaaaacaaaaataacagtaactccgatgaactaacccgcttcttcagacgaattgaagacaaggattgtgacagcgaacccgatcatttctattataaattacctaaccgaagtggtactttttatttaggagtaaaatatacgggatacaacaatgctccgtacaatgcaggctttggtatctatccgtatacgcctctaaaaatttccggttgggaacttattggcgaaaatggtgtcgatatagaggacgaaaatggtgtctggtatgagtttggtggagaaatggacggatatacggagaagaccggaaattataatacccgctggctgtgtaagagcattaattcccgtcagacaagagcgtgtatatcatttagatacagcggtttacagcgaaagcgaattaatcccagctattcttctgattatgttgtattggaagatcaaatggaatataatgttggcagcggcagaagctctgtatctgatcctacttggtttccaataaaagagaacactttcttacgtcgtccggacagtgtgaatgtccctatgccccgttctaattattatggaggctatagactactaatcaagcaaagaggccgggtctattatggaaatatcacagatggaaaagtcgagatactcaattcatcttatcccagcgaacgggaatatgcgattttcaacccttacgattccgactttgtggacgaacgcaagccaacgcgtattgactttgacggaggtatcgttttatttgagcaggacccggaagacaacctaagtagcattacagtcaagtcaagagacggaagtattatccggaaatttcaattctatatctcccggtacaatgcatacacggaactcacaaaattagattcaatcgctgttactgccggtagagatcccgagcgccgtttatactcttttttatatgataaacctgataatgttcagcctgtatccagcttggcaatggatcattggggatattataatggtcagcatgaattaaacaacggcacccggctctttattccctacggccgttattacgtaaacgacgattattacttccattatggagatagtgcccgcgaatgcaatgaataccatatgaaaacaggtgtcctaaccgatatcttctcaccggagggagtacgtacaaacttcagttatgaagccaatcggtacggaaaggtattcagcggtgctgcgaattaccaaaagaaagtctatttggcaggaggactgcgggtaagcatgatcagagagagcgatatgcatggtggcctttccagagttcgttattttcagtatggtctttctgctccggaaggaaaatacgggaatgacggtaccggacttggtgtagccaagatagcagtgactcaacgagattattgcacggtacaggagcgactgactattgaccagctcggtggaagaaatctttgtcgcacacacacgtggggcgcgactcctgtttccaatatctcgttcggcaatggcaattcagtgatttatccttatgtgagggaacgagtgatcgccgggggagcagaaattcgtacagactatcatttcagtgctcctgagtgggatttatatggtggcattccgcaggatcctttctctccaaggcaagttcgccaggatatttcaaagccctttgatcccgacagaggcgaagacgctttacgatacgggcaccttataaaaaaagagatatacagtggagatacgttggtagaaaagcacgaatacgaatattccatttaccaaaagccactcaaagaggaggatgatcatactttcgcagttgtttttggacggccctataagactcgtgtttgtaacgttcaggagtatgatagtcgtcctcaagaattatataaagattatacgtggatgaaagaacgaggcgcttcccgtttgaagcgtgaacgcaccacccgtttttcggatacaggcgatacaagcatcctgactcgcgagcatgtttatcatcccgacagtagtaatgtatacgatggatttgatgcagagttaaatggaggaggtacactttatgcaaccaaccacttaaatccactatggacccgaacccgaaccggcaacagtgagattatggaacagtttatatatcctgaagaggcaaagaagaatataacaataaatttggggcaagactttctactgtcatgcaatgcgatcaataaattactggtttataaacgcgtttgcggaaaagatacgacctctttaaggaatgtatatgcggggctcaatatttacgccgttcaagcttggaacccaacattatcccaatacgaagatcgcctcaaatacacctataatgattttggaaatatcagttcggtcacttccgatggcaagatttacaccagctatctttggtcgtattacaatcagtatcctgtctttaaagtagaaaatgccaatattgccaaggtactttccgcactcaataaagatcaggcatggcttacacagttggaagcacaagggcagcccgatgtcttcgccttatccggcaccagcctcccgcataccaccttatatacctatcggcccttgataggagtttcctccatcagaggtgccgatggagttaatacctattttgagtatgattactggggacgtcttattcgttcgtatatccttgaagatggagttgaaaagactatttccacattcacatacaatactcccggttatcatctatagtataaaagtataatcaataaaagtaaatcaacatgaatcgaaccattcattttacacttctacttttgtgcatatccctgtctctgccttctctgctaaaggctcagaacaaacacaaacattatgtgcaaactcatctgatgacagaggaggacggtagccgttcacgcgagacagtaacatactacgactctttcggcctggaatatgaaacactggaagtaggtgccaccccacaaggaaaagacctgcagactcccattggctatgatggctttttccggaaaacgatggagttccttccccgtcccgccgggaatactgatttttatgcggatgccaatccctatcattacacggtatacgaaaactccgagttgaaccgagtccgtgaagcatatggccccggacagacctggcaagagaacggaaaggcggtgaaatatgcctacctggtcaacaaagcgtcgggggttctgtcctgctcctattaccaggtggaagagctggatcgtgatataaagcttacccgttccggcaattatacacccggcgagctaaccatcacccaagtcacggatgaggatggacatatcacttacactttttctgattcttccggacgtttagttttaacccgccaaatgaatggaaccgttgcccatgacacctatatcgtttatgacgacagagggcgcaaacgaatcgtcctccccccttccgccgccgatgcgcttaccgctgtggaaagttggctttgcagtcagaacgaacctatccaattgtatggatatatataccgatatgacgggagggaccgttgcatcgaaaagaaacttccgggctgcgcaccgatctactacgtctatgacaagtccgaccgcatggtgcttaagcaagacggcaacgacagagaggtgaaacggtggcagtcttatcaatatgatcacttggggcgacaggttatctggggattcttaaaatcacccagtagtcaccaatactggataacattctgtcagaataaggtactatctgttggatatacaggggctcaaacacctatggaaaattacgggtattcttcggtatcacaaatcagcctccgatgcaccccactgattattaactattatgacgactatgactataccaacatctttagtgagtttatcggttctcaaaaccgcccgggttattattcctctttcgcgtcctcgccaaagtcctcgtacgggaaacttaccgggcaggttgtcgcactattgaatgatccctctaaaaaggactacatcgcctactattacgaccggcggggtcgtgaagcgcagcgtacggcaaattccacttttggtttcaagaactataccttcactaattacaattttaccgatcagcctgtttctgttcgtaaggaacatacaagtatttatccggacgctgcttccggctcgacaggagttgccagccatgcaaccacgtatgaatatgagtatgaccctgccgggcgtgtatcaaaattgtatcatacattcgacagtgatccccgtgtattgatggcagattatcggtatgacgaggtaggacgtttagaaacaaagttgatccacaatcacgctgatacggcaagttataaatacaatgtcagggggtggcctacggagatcaacgaaccgggcatgagagagaagatttactacaatgaagatcttccgcaaggagtgtctcctttatataacggtaatattccctgtctgtcaaattcggtaaatacaattccggtcgctcgttttacttacgacggactcaatcgtttgctgagtacccgcagatataagatggacggtaggccgacggaacacggggagaattttacatacgataaaatggggaatctacttacctaccagcgtgtctttgaggacttttaccctgattacacaaccaaattggctattaagtatcatggtaatcaaattcagtctgcaaccgatgaaaggcgctctgttggttattacaatcttcgttatcttgatgaccaaaatgctgatgttgaatatttctacgacagcaatggtaatttagtgaagaaccttgataatcggattggaaagatcaagaataatatcctgaatctcccggaggtagttgctttcactgatggaaacctcctcacgttctcctatatggcggatggccgcaaggtgcgtgattcttatggttcttaccctattaaaccgacgacccctttagatacggtggtaaacaacactgacccctatattaccggaattaatgactggagtgaagactattattatcagtcgaaaaagctccggcgggtcaccacatcggatggtcatttgaatttttatgattccccggatcataccacgtattacactactaaagatcacattggctgtacatggcaacgcaaagtaggtagtaggaacgctttgatgtatccgaactattacccatccggtataatggatttaaaaccttacccgacttatccgtttggtttgggtggcaaagaattcatgagtacgaattacttggatgaatattactttggcgcgcgtacaatgtatgccatcatgaaccgttttaatcaggtagacccgttgtgcgaggagtactattcggtgagtccgtatgcatatgcattgaataatccggtgagatataaagatccgacggggaaatatgtagaatcggcatgggatatttttagccttgtcaccggtgttgaaagttttgttagcaatgtacaaggtggtaatattgttggggcaattgttgatggagtagggatagtgcttgatgccgctgctgttgctttacctgtgattccgggtggagcgggagctgcaataaaaggtgttcgtgctatagataaagcagttgatgttgcaaaggctgttgataaaggatgtacgttgataatagaacagagtaatcttgtttccttgaatgattcttcagaattccgctttctggatgaacaggtattcgtacgctcgtgccggcagctcaaagaagaaagctatgatattttctatgcggcggaaaatcagaaatgtctgaaagagaatgccaaacaaatgcaaaagctgtccgaacagattgagcagacgaatgatttagttaagaaagagaaacttcttgatgacgtattggcaagttctgaaaagtttgatgcctgtaaaatatctaagaggttaacagttgccagttttgctaaacaatctaatgacagcgctattgcatactgggagcgtgataaaataatcgcttattttacccaagcctatcagatttgtgaaaacggagaatattttgataagaatgacggaaaccgtattgttgcggattatcaaactgtggcgcggcaaaaagagaaaaatacgccgaaaatagaaaaagttaaggaattaaaaagcgaaatttcctctcaaaatcagatgaataaaaagattgcggcgcttttagccgaggacaatccgattataagaaaaatgcaacaggcggctccggattttatacgggtaaaggttaataagtgtccgattatcttctttgtacagtttcttaaagaagatgcggcaaagtttaattctgattttgcttctgcaaacaattatcaatttaagaaaaaaggcgcagatacgcttgttttgactgtcggcgatattgaatatactttcctgaaaaaaggaaaaaacagcgcggatgtcatagttgtcaaagatgttgaccaatggggcaatcagataatcaataaaagcactattctgaataatattgacgtttcctcatcgtgttgggggtatgtgagacatcgaggaaaagcaaattataatttctattagtgctttcccaaaaagatatttggtgataaaatttaattttattttattactgtgaaaacatatatgtttttttgtaaattagaaaccttatcaatttattgcaatgttaaatagttttttgtatttatttaataaatcctgacaatcatcatcacaaatatctacattaattttttcaagtttttcatctatacgtctatttgcgttatcaataatttctcgccaagttaagcaatcgataatgtagttccctctcgatttttcttctagatgcccgtctttagtgaattcaggtttgagagtatccgagataacgttagaaaccaaacaatacctccattgatgagtattcgaaatttctactccaccattattttgagaagctcgtaagataccgttgtaaacatttaaggcctgtttttggcattcactatcaatctttacagttggtttctttagttcaattattaaatgtttataaaagttttcttttgcttcctttttgcataatactaaatctggaattttatttaagcagctatctatgtcatctctattttgtttgatgtattcttcaattttacttaatttttgatcagatatatgatcttcaaaatagagattctctcttaagtttaattgtcttatgacagttactattgatttatcacttgttactaagtcttcattttcaaattctaccccaaaaatccaactttcttccgcaacaattttatgtagctgtgtccgttcttcgagatgctgagctattgtatcgtcaaagactaaagtttctaatgtttgaagaaatgtctttttatgaagaagttgattatatttttcgataatttttgataatttaattctattaaccattctattatacttattggactcttctgcagataaatctaatattttatcgatattttctgaaagaatatagtctccggaaaaagttctttttaacaaaggaaaaataactttcaaaatttgagtctttttttctgatacaactttactatcgtttaataataaattatataaacaggcattgtaagcagtttgttctgcatcttctatcgctgtttgaaccttttttctaaatggataatctggattttcgatgattgagttgagttgctcgcttaaatgggtattttttacacgggctagtagctttatggcatctagctcataagctttttctattcgtgaaaatataggagagaaatttccattaaacgaattgtaattattgaataactttgattttataattatcgtatgtgcaggaagatgtgtaccggcgggtattcctgaggctttatgctcaacatactgatttttatcattgtaataaaaagtatgcttgtgatcaacaaatgaaatgtcttttttccagactactatctcacaattgacttctatctcatttttattttgatcttcaattggatatacgaaagttttttcttgttctatgatattttctaagataactctattattttgaatagaaatctctaaatttttattagctaattttaaatcaagaagtagtccacttattaactcattttttatattagattttttgcaaaaattttcaaatttaggtgtcaaagttgttatagtcaattttgttcctgtagaaagtccagatatttctgcttcctgtgttatttctaattttctagggctattaacgttaaatgaaattgaatattgataaaacttattatttttttcataaacggtctcccaagtaatattttctccaagtgctaaatatttgaatcgtccgctaccatgacatccatggtaaggtcgatgaaatatcggcgtggtttctttattttttttccaagaatcttctaaaggaagaaaaacatcatctaatttttcaaaattaatgccacttccgttatcttctattataatctgtttacacgaggactcatcatcagttctatcaaataaatctccctgattattttggatatacatctttatagatgttgaatctgcatctatagaattataaattgcttgcaataaagcatcgggaattgttgcatttttgtatttttttacagattcatctgttaattggatagacttagttattgtatttgttttgataagagacatgatgtaaatccaaatttgagtaaaatatattttatgatactaaagattttttttatttcaatctaaattccagattattccttcctgtttctctctaaataattccctgataagtttgtggttgattaggtgttatccaagtaaaacagactgtttgtgggaattttgcatataaaatccactaaaatttccctgtagattccctgttattagaaaatgggtaatgatgtatttgtgattcgggagtcgaaaagattggtggtcatcggtttagaatattgatgaaatttcgctctttcgtatgctccataccgttaatatttactacaccgccattttaattaaaaagacgcttttaataagcgtcttttttcgtatccggcggaaatgcgggtgttgccggcggttgactttgccgaaatgactatggtaagcttattttaaattaaaaatcgcaaaattttcggcagttacatacaatgctgatttttgaagagtcacttcaacaaaaaaggggatgactactgccaaaaaacagttcgtcagagccccactcgaaatttttcgattattatagcttcctttccaaatcagatatataatcaaaaatctcttgtattaagattattagttgataaacttaatgtcaacaggattttaaggaaagcacaatgaaaaagaaaatttttggttttgatttgggaattgcttcaatcggttgggctgttgtggagtttgataatgaatattttgatccggaaacaggagaagtggttgaaggaaaaatcgttaaatcaggtgtgaggtgtttccctgttgcagagaatcccaaagatggttcttctttagccgctccgcgcagagaaaaacgtttagctcgccgtatctgccgtcgaaaagcaaggcgtatggagagtataaaaagattgtttgttgccaaaaatttggtttctgatctgagagaattaaacgatctttatgccagtcagaaaggtggagatgtttggaatttgcgtataaaaggtctgtctgaaaaattatcaaaagaagaacttttacgtgtcttaacgcatttggctaaacatcgcggttttaagtcttatcggaaagcggtggaagaaaatgatgctgagagaggaagggttctcaaagcgattaatgaaaacaaaaagttgctttcgaaagacaatactttggctcaggttattgttgaaagagccggaaaaacaggtaaaaaacgcaactatacggaatctgatgccaaaggaatggcaaaagccatttataataactcaattcctcggaatgaaatagaacgggaattgaatttgatttatgctgaacaaaagcaatatggcatttttagtgaagatctgtttgaagattttaagaaaatagcttttagatatcggccgttgggaagtgtagccgatatggtggggaattgtacgtttgaaaaaggggagaaacgagctcccaaagaagctccaagttcagaattttttgttgcttggggaaaaatcaataatatggcggtttatgaaaacgctcaaaaacgatttttatccatggaagaaaaaaaggctttgtttgagcttcttaaaacaactccaaaagttaagtatcagacaatagcaaagaagatttttgtcggaaaagatattcaatttgctgatgttaattataacttaattcgtaaaaaatctaaagacggaagctctaaagaagttaatccagaagatgcggttttttatgaaatgaagggttggcacaagttaaagtccttatttgaaaaagatgcttggtcagaaattagcaaggatatttctttattagacagagttgtcaatgttgtcgtttgtgaaaaaaatgatgagaatattataaagggtttgaaacatataaacgttcctgaaaaatatattgaaacattttcttctttgacaaccgataaatttattaatctgtctttgaatgctttgtataaaattcttccttatatggtgcaaggaatgaaatataacgaagcttgtgagaaggctgggtatgattttagagaaaagacggataaattggttgaaaaaaaaggagtattgttgagtgttattccggcggaaaaacagacaaaagttccagttgtcaatcggacaatatctcagttcagaaaagtttataatgccatggttcggcaatttggcgcgccggatcaaataaatattgaaacagggcgtgaactgaagaaaaattatgaagagcggcgcaagataattaataaaaataaagaaaatgaacaggaaagaaaagaagctgaagaagaactgaggcaagaaaatattaaagaaacttccaaaaatatttggaaatatcgtttgtatcaagaacaagacggaaaatgtatttattccggtaaatctatagatttgcgtcgtttggatgaagaaggctatttagatgtagatcatattattccttattctcgttctttagatgattcctttaataataaagttttatgtctttcttcggaaaatcggatgaaagggaataagacaccgtttgaatatatccagaataaagatgattgggaggcttttgaggcaagagtaaatcttctgcgtaacaacagaaaaaaagaaaacttgttaaataaaaatttcaatgacagagaattggaatttaaggaaagaaatgccaatgataataattatattgcaaaatatattaagcagtatttggaagatggtttagatttcagctctagtaaccgtcaggatattaagaatcgcattcagatgagaacggggtctttaacgtcttatttgcggcattgctggggattgcacaaagatcgtaatgaaaatgaccgacatcatgcccaagatgccattgttatagcttgcgcgactcaaggaatggttaaatatttgtcgacagtttccggtttgtgggaaaataaatggcaagtggcacaactcaaagacaatggcgaagcttggtataaatcattaaaatataaatttttggaaccatggaacggttttcgagaagatgttaaacaatctttggatgaaatatttgtttctcgtccaccgcgcaaaagcgcgacgggagaaatacatcaagagacaattcgttctttgaatcccaagcataaaaattataataaaaaagatattaaatcaggaattttggttcgcggaggtttggctaataacggctctatgctaagaacagatgtttttgttaagaaaaacaagaaaggtaaagatgaattttatcttgttccgatttatttgtcagatatgggaaaagagttaccaagcaaggctattgttcctttaaaatttgaagatgagtggttgcaaatagatgacaacttttcttttaaatttagcctttatatggatgatttagtaaaggttaaaaaaggcgaaaaagaaatatttggctactttaagggtactggtagaacaacgggctctatcacaatagaagcgccggatagaagtatcattacccctagtattggcgtgaaaactcaagatgcttttaaaaagtattctgttgatcctttaggaaattatacagaagtcaaacatgaaagcagaattcctttaacacttataaaatctaacgctcaaaggtataaggaacaacagaaaggatgatatatgggatggcggattattcaaataacaaaaccttgccgattgagtgttaaagataaacaacttctttatgcgcctcaagaaggtgatgagttgaaaattccgctggaagatatttcagttcttattttggaaaacaaacagataactttaagcaactatctgttttctgaattatccgaatatgatatcgttttcttttcctgtgatggttgtcacttaccttctggagtattttttccgtttcataatcattccagatattctgagattgcttggcaacaggttgaaatgtcagagcctttgaaaaagcgtttgtggcaggaaattgttaaagcaaaaattaataatcaggcgatgtgtttagaaatttttaattgtgctaatttttcaaaactgcgggaaatttcgaagtttgtccaatccggagatgtaaaaaattcagaagcatttgccgcaaatatttattggaaaagtttgtttgataattttaatcgaaacaatgatgctgattttcgtaattcggccttaaattatggctatgctattattcgcgggtgtatggcacgatcaattgtcggtgccggtttgttgccttgttttggtgttcatcacgtcaataagctgaatcaattcaatttagtagatgatttgattgaaccgtttcgtccgtttgtagattatcaagtcaataaaatgacttttacgaataaaacggagttaacacctttagataaaaactatttagttggtatattaatgcaaaactgtatttttaacaatgaagaaataaacttgctaaaagcctgtgaattatcagcgataagttttgttaaatcaatcaaacaaaaagatgttaaatatttgcaaattccaattttaaaaaaattaccactttttgaatgaggctgtggataaatggcagtcggaggagaacgttttatgagaatgatagtcttttttgatttgccaacgttgactaaaacggatcggagaaatgcgagtcgctttaggaatttcctcgtgaaggatggatatacaatgttgcaattatctgtttattcgcggatttgtaagggacaagatgatgtcgataagcatgcaaaacgtcttaagtccttgattcctaaggaaggaagtgttagactgcttactgtgaccgaaaagcaatatgtttccatggagatattggtcggcaccttaaaaaaagaggaagaaataggtgataaacaacttttattgctttgaaattttatttgaaaaacacaataacccgttgaaaaatcaacaggttattgtgtatgtagtatagcatatctgatttggaaaggaagctataacaggttctcctgacgatgcttacattcaggcagtatagcatatctgatttggaaaggaagctataactttgccgggaaatatcatggaacttcttaagtatagcatatctgatttggaaaggaagctataacgactatttcgataccgatgacgccgaaaacagtatagcatatctgatttggaaaggaagctataacgttccaacaatgcaaatcttataccggttaagtatagcatatctgatttggaaaggaagctataacgagttctccgatgataacgaatcctttgccagtatagcatatctgatttggaaaggaagctataacctttaaacgaattaaaatctgaatttgtgcagtatagcatatctgatttggaaaggaagctataacttgatcttgtttctatttttggcttggtcgagtatagcatatctgatttggaaaggaagctataacaatgcggattcaagagctgagggagttgagagtatagcatatctgatttggaaaggaagctataactccgtaggcgtgcgcttccgcgtggcatttagtatagcatatctgatttggaaaggaagctataactccatatcctgccattatttacctcctgctagtatagcatatctgatttggaaaggaagctataacgttcaggccaacatagatgcgttgccgcagagtatagcctatctaattttttcgtatgctcaataccgtttaagtttactacaccgccattacaaaaaccctcccttgcggagggttttgatgtaattaacgaaagagatgcaaaaggtcgggaacggccaccgtaatgccccgacttttacagtgtctggttttattcgtttttatcttcagatgacgattttttttcgccgttaagattatccaaaaactggttttcgattttcatatattgatgcagcagccaccgcgactgggaaaataaaaacaacgttcccagaaccagcaaagcggttacctgcggattagtcgtcaaaaatcgatgaacaacggcaaaaacaaataacgaaattaccagcagtctgactgcggtcaggataatcaaaggaatacggttggattttttatcgtgccagagtttataataaataaccgcaaccttattgttggaaataaaaaagtttttaaccgattcaaagttttcttctccgccaagacaagacaacgccttatcctcaatatttttaatgacggccgtccctgttggatgttcccggctcaaggcggaaagacgacagaaaacatctgataccttgctcttaatatatcccggcaagacggtttcccatccgataagagctttcagaaacggagacattgctcccagggtcaaaagcgtgattgcaatacgggacggccaatcgggcagaaaccgcaataaaaacggttcaaccacatatgacgccaatgcgaatatgctgtaaagaatcattgaaaaaagaatcaggcgggcaaaatagtttttgaacaaaaggcgccacaattgttcctctcgtttggtttccggacgggaagaagtgttttcttcaatatatttattccaagaatcgggaaagaaacgggtgaccgatttgtaaaatttgggagcggctttaatcatcatcggcgtcaaaaacgtcgtaataaccgaaacggcgacaataattgggtacactttggcactgagaacaccgatgctcattcccaaactggcaataatgaacgcaaattcaccaacctgagccaaggaaaaaccgccttgaaccgccgtttttaaaggctgtcccgaaataacaaatccggcgcaggaaaaaatgactttgccggtgacgacaataaccgtaattaaaaaaatcggccaggcatatgttataaacatcgagggatcaaccatcatacctaccgacacgaaaaataccgcgccgaaaaaatccttcagcggcttgatgttgttttctatccgttcaatcaatccggtttcggccaaaatcgaccccataataaacgctcccaaggcggaagaaaacccggaataggttgccagcaaaaccattccgaaacataagcaaatggtaatgagcaatagcatttcatcatttagaaatacggtaatttttcgtaaaaacgtcggaaccagaaaaatgccgatgataaaacacaataccaaaaagaaaataagtttgaccgtgctgagagccagcgcttcgctgttaatgtcagaacccaacgcaatcatgggaagcagaaccaacagcaaaatgccaacgatgtcctcaaccaccaaaacaccgaaaaccaagtcggtaaagcgttgcttttttacgttcaaatcgtcgaacgccttgataataatcgtggttgaagacattgaaatcatacttccgagaaagaaacagtccattaccggccagccaagcaattttccggtataaaaaccggcaaaaagcatcaaaacgatattcagcaaggccgtaatcatcgccgattttcccacgcttatcatctttttgaaactaaattccaaacctaagccaaacaacagaaagatgacaccgatatctgcccacaatgtcaggttttcgttatcactgacggtgggaacaaaattgaaaaaaggcccggcaaaaattccggccagtatgtaaccgagaacggtcggctgtttcagccatttgaacaacagcgtggttattccggcataaatggttatcagcgttaaatcgactatcagcgcatgaatagaatgcattgttttcctataaaaagaacagaatattgacctggcagtaaacataattgcaaaagattaaatttttaataaaaaaagccagctttcttttggacaaaaattatagatttttaatttcaggtatgttatccttaaaaaaggagaaagttaatgtatcaatttctgataaatccggacaatgaagttctgctgatgattgataccatatcaggcagagaagaagagccttacgccgaatacgaacgcagccggcgttcgctgcggctggtgaaaaatccgtccgaggcaaaattgttttcccgcgtgaacaaagacgttgccgaaattctgaatgaaaaaagcgatatctgggtcatggaacaaaaagaaaacggcaatgccggcgacacataccgggtaaagctgaaaataatttaggggaaaccaaatgagagccaatttattttcatggtttgcaggcgacaatgacgacatacgaatctttgagggggcgtccgaccggcaaccgctgaaaatccggggaaaaatattaaaggctgtttttcctcaaatagtgggcttttcggccttgcttggtttttcggcttcgtgtgaagaatccaggccaacgcccgaagactattattttggccggacggttaccgcgattgacgattcaagctacaaccatatccttcatgacagcgtccattttctggatgtggtcgctaaaggcggagaatacctcaaaaatcttgattactgcgactctctttcttccgagcaaaagtcaaccctgaaaaattacttttccgaaaaacttaagaaaatcaaacgttccgatgacggctctctggatttgacacatccgcagacattaaagacatttctcgcttttgagaaactgaattattacaaaggcgattttgacaacgtcatgttcagagaaaacggttggtttgacgaaaaaaacgacattctcggctgttattatcaggatatgctgcaactttgcgaaaccgcgaaaaaatatccgcagatcgtagagtttgccaaaacgctctataacagtgaaaaacgttttatgataagcaaagaaatgctgccccgggcaaacgaaataagtatgcagggactgtccgaatggctggaaaaatatggacaaaccatggaaaacactgtttatttcggagcagtaaactttttgggcagcgaacactccaatatggttatttattatgacaaaccaggagatgacctgggtgctgatttgtttattgacaaagaaggcaactgcggcgatgactcttatgctcccgtcggctccacgataaagcacgaatgtctgcaccttatgcaaaagactctgggacagaagcgcccggaagaatttaaacacttggaggaactgggaccaacgctgcattcactggcaactgaagatgcaatctacaagcaaattaaaggaattcctttggagcaggaagttgattacggctttttgaattttggaaaacacaaaataagcttgggaaaaattgccaacgataccagagaacttatgcaaaaagcaaaaaatcccgaccggatggacctgctgatggccggtccagacggcatcagcctcattaaccggtggatgggcaaaagcaacgtccaacctatccgacgtcaacagaaaacctatcagtaaaaaaaaacactgcctttatgaaaggcagtgtttttttcattaaaccttatttagaaggtgtaacgggcaccgagcataaactcattagcgtctacgtcaaatttgtagctgctgcccggttcatagtttttcttaacattacccatatcaacgtatctgtaacccaagtcaagagacagattgtcattgacggcataggcaacaccaacgccggcctgccaggtgaactgataatcagattcgctcaaagtagcattttcagccgttaaggtgtaacttgcctttaacttggaataaccgataccggcaccgacatacggcgtgaatttcgtaccggtgtcaatgtcgtaataagcgttcaacatcaaagactgagattcgagtttggtaaagtcagtaccgccctttttagcgccggtagtgcttttggcatcttcattgcggctgtattccaattcggttcggagagagccgtaatttaattgggtagaaacaccggctgcaattttgccgccccaaacattattatcgtccaaattttccttatgagaacctttaccccaagaatcttttcccgaaacagacatatcggaataagataattttgccgaaacgtaaggatttaattctactgcattggcattaactgcaaacaagcaggccacaccggccataagtaatgtttttttatgtaagtttcctcaagtagttgtaactaaattacaacaaaacactaccaagcaatagttaacaaaaggtaacttccttatttcagccggaataacaagaaattagaattgggatctattccgcgaatcttaagttcggccttttcatcccaaacggccagcccgtcaccggcgactaacggcctgtcattcacggaaacagccccgtaacaaacctgaatccagtatttatgttcgggcgaaacctgataatcggccgacttgttttcttccaaaaggcattgatagacttcgacatcctgattgatgcgcagagaatcttcccggccatcgccgctgacaatcaaaaccggctgattttcaatcaacgtacaggcaaaagacttttgtccatactgagggcggtgcccccgcctgtcggtcataatccatatttgcaaaaaatgcaccggctccgttgaagagggattaaattcactgtgaaaaattcccgaaccggcagtcataacctgtacctcaccgggattcagaaccgcaccgctgcccaaactgtccttgtgttccagagctccgcttaaaacaatgctgataatttccatattatcgtgcggatgcatatcaaaacctttgccgggagcaacaacatcgtcgttaataacgcgcaaatcgccgaaacccatatattgcgggtcgtaatattgtccgaaagaaaaggtgtgaaagctgtccagccaatccgtcagagtatgtccccgttcatttgcagggcgtaatgaatacatttgttttctccttttgctaaactctgtcacgataaaaaatgcgccgcagaatcgtaatggccagattaacggctacgcgtgtcggtttggaggcggccaaagcgtttaacatcacaaaatcatgaatggtaccgttaaagcggactgacgcaacgtcaaccttggcatcattcaacttgcgggcataggcctctccctcgtcacgcaagacgtcattttccgccgttattatcaaagccggcggcagaccttccagttcggcaacatcggcctgtaacggcgaggccgtaatttcccggcgcatttgagcgtcaggggcataagcgtcccaaaaccactgcatggcttttttagtcagccaaggaccttccgcatattgattataagaatcggtatcaaaagaagcatcggccaccggataaaacaacaactggaaaaccagcttgggaccattgttttcttttgcaagcattgccatcacggtcgccatattgccgccgacgctgtctccggccacgacgaccttggaagtatcaaacttaaacgcgtccgcctgtttgacaatatatttgagaacggcgaaaagctcattaagagcctgaggatatttagcctcgggagacggcgtatagagaggaaacaccacagcgcattccgccccgaccgacaaatcgcgcaccagacggtcatgtgtggcggcatctcccattacccagccgccgccatggatataaaagacaaccggcagccgttcgcgagggctcttgtgaggacggacaaaacgaaccggaatcgactttccgtcaccgacaggaatctgcatatcctcaattaaagcatccgctttggccgtttcaacatcctgagcatccaacaacacctggcgcgcctgctgcggcgtcatttcatacaacggcttggcatttccttcggccagaccgtcgacaaaacgctggacttcggttacgagatgaggtgatgacatcggcattctccttataaaaactgacgattactgctgatataagacgagaagcgaaagtttcaagcaaagccgctgatataaaaaaagcactctgcagagtgctttcagaaaacttacatgtaaggccaccccaaaacctgagtcacaatgacatcgtcgctcttaacgttaagagccttggccaatccgtctttatcaaaataaccgcgtacaacattgttcaatccgcgggaagcggcgtatagcccgacattttgataagccgaaccggcatgcagcggagagttcttttcatcagtgccggtataaaccaaaaccaagggagcatctttcacatagtcctgtttggccattaaggggcgcaaatctttatcgctgacctgtttcagcgtgttggtttccgcctgataaagccaggcaccgtctgccataaccgcataaacattcatattctgtttgttcatcgacgtcggaatcgtgcgtttgccgtcatgagagattccccaggcaacatacaaaatgtcactcaaggtctggtcatcaacagccttggggctgaattcgcggcgcgactggcgtctgttgacggcttccattaacgaaacctcgctttcggttgacggcgcaggaagcttttttactttgtcttccgcggccgcatttacacttaaacccaccaaaaccaaagctgcaagcaataactttttgagcatcttttttcctttcattgttaaaaaatcgtaatcagtgtaggatgccggtaaaataatgtccatattttaattaaccatccgttaagtaaaataagctatgtttaatactgttaaaacccctgcaaaggggcttgcaaattcgattattgtgtgctacatcaacgttatggaaaaactatggatgtcataaaatgataattgatagtaataacaaaaagcaaaagagcattctgacgaacaaatgcttttatcagacgacggcgcgcattatgcgcgactttgaagagaaaggctatgccaactcagctgacgaaactgctaaagttattgccgcgtatcacgatatcgtcagaaaaaagagcaaaaacaatttcaacgaagactacaatgccgcttttaaacgcattgacggcgccatccagtctttggccaaccaggttttttacgactgtgacaagaaaagtctggactacgcttatcattcatttgaagaattcgatcatatcggtgccatcgtcacccgtcaaagagccaaaaaaggctctctttaattatcccccgtatgtcaggcttgtgtgtttttgcaataacccggttgcaaaatgagctattatgcagtagtgatagatattatttgtaactgttatgaggtaatctcacatgaaaaaactttctttaatcggctgcggccgctggggtacttttttgggctggtatgcagccaactactgcggtttcgacgttgatatgtatgatattccgacatcgccgaattttattgaactgcgcgataccagaaaaaatccttatttatccttaagcgacaatatgcacctgcatgacaacctgccggcagtgttggaaaacgacattattatcgtttctatcggttgtcagtattttcgcggcttatgcaaagaactcagccaatacaagctcagcggcaaaacctttttgctggcaatgaagggattggaagaacccagcgcaaagattatgtatgacgttatgattgaagaaatttcccaggacatcaatattgcggttttagc

SEQ ID NO: 944 - DNA, 22997 bp, synthetic construct
  source 1..22997: mol_type = other DNA
  misc_feature 1..22997: note = Synthetic
ggttacctggtctttgagaagtttgaggcggaaaaagtctggtcagctgtattttttgatgcagaacagaattattactatctgaagcgttttcggtttgaagattctgccaaattaaattcagttatcggtgaaacggaaggttcccggttgatatgtctgagtggtgaacgttatcctcgttttgaggtgatgtttggcggtaaatatgaagcccggccgcctgaaataattcttgcagaagaatttatcggggaaaaatcatataaggcacggggtaaaaggattacgacttttgaagtaaaagagatacgtgagatagagcctttagtgaaagaagaagaaatagaaagtataaatactgaggtagaatttgaaattaccaatccggaagaattagccggagaggaacagatgaagctggattttgagtagggattatgaagtattttctggtgggttatatggcttgtggcaagacgcgtcggggaaaaataatggcagaagagttgggggtccgatttatagaccttgatgtttacattaccaaacgggaacaccggacagtttttcagattttttctgaggagggagagcatgggtttaggaaactggaaacccgttatttacaggaaatttgcggactgtacaaggattttgtgctttcaacggggggagggacgccttgttttaacggtaatatggcatatatgaatagtcaggggcaaaccttgtttttgaatacagacctggaaattatcattgaacgtttgatacgggggaaacacaaacgtcccgtggttagccgactaaatgatgcggagctccgggtgtttgtcaggcggcattggaaagaacgtttgcctttttatcaacaagctaaggaagtggtcacaggatgatgcacaggtgaaagtgcatttacatatagcaatagataaagatatgggagaacgaatcacttttcggcgaaatgagggattgattacagtaaaaccttactggcgggggaatcctgtgataaaaggacgttttgtgaatcgtcagcaccgggctagtcatggaatcgggaatgtgatgaaatggcgtttctgcctgaatccgcaacggaaagaaaaacggagggagaattgggctccccaggtattttctctttataatttggagcaggttgcaggggatgcaatggtgtggctggggcataattctttttttatgcagttagcaggaaaaagaatcatgtttgatccggtgttcggtaatataccttttgtgcggcggcagagtgtatttcctgctgatccggatatttttcaggagatagattatttgttgcttagtcatgatcattttgatcatatggataaacccagtattgtccggttgtaccggaataatccgtccatgaaagtattttgtgggttaggtaccggagaattaatcaagggatggttgccggaaatagaagtgatagaagccggttggtatcagcaattggatagcgggactttaagaatgacttttttacctgcccagcattggagtaaacgttctctgagcgatggggggctccgtttgtggggggcttttatgttagaaggtaatggtctgtctgtgtattatggcggagatacaggctattcctcccattttacggaaatacaggaattgtttggtgcacctgattatgctttgctggggattggagcttataaaccccgttggtttatgcagcctaatcatatatcgccttatgattcgttgacggcttccttgcagatgcaggcacgggtgacgataccaatgcattacggtacttttgatttatcggatgaacctttgagcgagccaccggctgtttttgccgatgaggcccgtaaaagaggtatccgggtgatgattccgtcactaggggaagtggtgaaattgaaaaaagtgaataaaaattgcagataaatgtatgattatgaaaatgaacaatttgttggtagttactctaattttatttgttatgtcggcttgtgaattgaagaaagaagagaataagtttcaaacgcgggatgcattggaaaccatttttgcccggaaaagtgtccggaaatatttacccaaaccagtagaaaaagagaagctggatattctcctgaaagctggtatggcagcacccagcgggaaggatgtccgtccttgggaatttctggttatcactgaccgtgttgttttggacagtatggctgcagctttaccttatgctaaaatgctgaaagacgctccgatggctattgtagtttgcggagatacgacccgttcttcctactggtatctggattgttctgcggctactcagaatattcttttagctgcggaggctttgggactgggagctgtatggacggcaacttatccttatccagaacgcatggaagtggttcggaaatatgtggtattgccggagcagattaactctttatgtgttattcccgtcggatatcctgctttgccgcatagtcccaaaaataagtgggatgaagcaaaagtacactataataaatggtaaagtttgtattatccctcgttctggggatttttgcggtaggataaattattactgaacatcagtcgggaaatccttttttgaaagagagaaaacgagtttcatttatggaactcgtttttcttgtttagaagctatcttaaatcaggctgtctcgtttttacggttgttttcataacttattgctatgcgggccgtataatgagaaataatagcatttgtttgtattgtttttataattacaatattttttaacaccttaatcggtctgctgacttagcttttgtagataggggcccaaatttgcgtacaaaataaaaagttaaaataaatattaatcatgaagctgagattaagtattatttccggtttatgtgttattctgggattctcctgcgggggaaaaaaaaggagctatcaggatattgtcagaccggtacatattgtaaaagtagagacgttgggggctatgcaaaggatgtatacaggtgttgttgatgctgaagaatatagtaagttggcttttaaggttgctgggccgttggtagagatgaacgtagatgccggccagaaagtaaaaaaagggatggttattgctgctatagatccgctggattataatttgcagtatgaagctaataaggcggcatacattacagctaaatcgcaaatggaacgaaataagaaattattgtctatgcaggctatatccaggcaggattatgaaatagggtatgcaaattttataaaggcaaagtctgcttatgagacttctgttaatacgatttcagatacaaaactgagggctccctttgatgggtttgtagaacagaaatatgttgaaaattatcagaaagtacagccgggagagtctattattaaattggtgaatccggataaactggaagttagttttatacttccggagataaatgtgcgtctgacccgggaaacaatgcaggtggctgttgaatttgatacttataaaggaaaatggtttaaagccaaggtaaaagaatttgtggatgcttctcccgaagggagtggcattccggtacgtctggctattacggatacagctttcagacgggatatttataatatttatccgggtttttcctgtaaagtgagattgagtattgataacagtaccggagatggttattctgtgcctttgagtgcagtatttaaagacctgaaaacaaatgagacctcggtgtggttgtatgacagtgcggaggggacggtaaaacggcagtctattgtagcagaacagttgtttgggactgataatgttcagattacttctggtttaaaagcagatgatatcattgtcgtagctggagtgaattatatcacccagggacaaaaggttagcgttataaataattaaatacggaaatacatgaatatagctaagtattccttagataatccgaaagttatttatttcttcctggttgttatgctgatagggggaatactctcttttggttcgttgggaaaaaaggaagattctccgtttgtgattaaaacagcagtgttagttactcaatatccgggagcttctccgaaagaagtggaagaactgattactgaacccatagagcgggaaattcaatccatgcgccgggtttataaaatcaaatctgactcctattatggtatgtctaaaatttccatcgagttagatcctgcaactccgccggacgaaatgccccagatgtgggatgaactgcggcggaaagtattgaatgtgcagtcgcaattacctcagggagcttctgtcattaaggtttctgatgattttggagatgtttttgggatttattttgctttgacagcagatgatggttttagttatcatgacttgagagaatgggggcagaaactcaaaacggatttggttactattgagggagtccagaaggtagctttgtttggggaacagactgaggtggtgaatattttcatttccatgtctaaactggcaaactcagggattaatctgaattctgtaatgcaaactataaaatcgcaaaattctttaatcaacacgggagagaaaaaagccggaagtatacagttgaaagtgttggccgaaggaacctataaaaatttgacagatatcagaaatcagttgatttccaccgagagcggacaacaaattcgttttggggatattgcagttgtagagaaaggatatttggaaccacccagtactctgatccgggtaaacggaaaaaaagccatcggtataggagtttctacagctcctgattatgatgttgtgaaagccggagaatcggtaaggatgagattggcccaaatagaacagcaaatacctgttggtattgaaatggtgacactttatccggaagatcggattgcccgtgaagccaacaatggttttatcctgaatttgatagaatctgttgtgattgtgatttttatcattctgattgtgatgggaataagagccggactgctgattggcagttctctgatattttgtatcgggggaactttactgattatgcagtttatgggagttggtctgaatcgtacatcgctggctgcttttatcattgcaatgggaatgttggtggataatgcaatagtggtaaccgacaatgctcaaattgctataaaacggggtgtacgtcgccgtcaggctttgattaacggggcaacaattccgcagtggggattattgggggctacgatgattgcggtgttctcatttttgcctttatatttggctcagtcttctgtagccgaaatggtgaaacctttgtttattgtgctggctgtttcattgatattaagttgggtattggcattgtcacagaccactgtattcggaaactttattttaaaagagggggatggggaaaatggtaaagatccctatgataaaccattttaccacaaattcggtaattttctgcgtttactcattcgttataaagtggttactttggtggtcatgattggtttgtttatgttgtcgttagtggtgatgggtttattgccgcagaatttttttccgaatatggacaaaccttatttgcgggcggattgctttttgccggagggatatagtatccgggaaacagaaaaggatatgggcagaattgaagacttcctaatgaggcaggatgaagtggtgaatgtatcaggaacgtatggaagttcgcctttacgttattatctggccagtacttctttcggaccaaagcccaattttggtaatttgttggttgaagtaaaagataaaaaatatacaacaactgtggaagctcgtctgaatcagtatgtccgggagaattttccgaatattctgatccgttcttccttgtttaaattgtctcctgccgttgaggctaatatagaatttggttttatcggggataatatagatactctgacaatgttgacagaacaggctatggctgttatgcgggagtgtgacatggccactgacgtaaaaaatagttggggtaataaagttccggtttgggaaccggtttattcccaggaacggggacagcgtctggggattaccaggcaggcagttgcttatgccttgaaaattgctactaacggtctggctttgggagattaccgggaaaaagatttatttatgcctattttactgaaagaggataatataaagacttccggtattgataatatgaggactttgcctgttttttcgcaatccgggtatgcagtgcctttagcacaggttgtagacagttttgcctttaattttaattataatgtaattaaacggtataatcgggaaaaagtgatgatggctcagtgtgattccaaaagaggagccaatacaatggctgcttttactcagataaaaaatgcattggaagaaaaaatggttcttccgcaggggtacaggatgaaagtgtttggcgaggatgagagccaagcggaatcaaatgctgcaattgaagctaatttacctttaacgtttattctgatgtttattgtgttattatttttgtttaagacttatcgtaaaccgactattatattgttgatggtaccattgatttttatcggtgttgtatttggtttggttgtaaccggtaaaatgcttgatttctttgctttgctcggagtgttgggattgatagggatgaatataaagaatgctattgttctggtggaccagataggtatagaagaagaaaaaggtttgccgcgtttggaggctattattgaagctacaaaatccagaattgtgcctgtaagtatggcttccggaactactattctggggatgttgccattgctttttgatgctatgttcggtggcatggctgcttgtattatgggcggattgctggtggcaagtctgctgaccatttttgtactgcctgtcacttatagtttattgttcagggtaaaagtaacggatgttgttccacagatgacaaatgaggaatgataaatggaataaattatatgaaaaaaataggtttgataattgtagttgtgttttgggtaaacggtatgtttgctcagacattgtctgtcggacaataccgtgccagagtgctggattataatcaggatatccggaaatcacaacaggcagcagagggagccctttattccttaaagagcatcagaaccggattttttccgaaattggatgcttccggtaactattcttatcagattgagactattgagttttttcccggtactgatttgaaacatgataattacgggatagaagcagatttggttcagaatatttattcaggtagtgtggtgaggaaacagtatcatgtagctaaattgcaacatgctatcgctcaattggcagtagagcatactattgacaatatgatttacgcagccgatgtaacttattggaccgttgctgcaaatggggatttactgagtttatcggaacggtatgtgcagttggttagtgaattgtatcatgttgtcagtaagcggtttgaagaaggagctatcagcaagactgatttgctgatggtgcaaaatcgtttgaaagaagctgaattgcagttgaatacttcttctactaattataaaatagcattacaatccctgaatattatgatgggtatggagcccgatgctaaagtggtgctgacggattctatacaaaaagttttgtgggttcccgggcaaacaactctggataaagcattggaaaagcgcgccgattatcaggctgctattatgaatattgaaatagccaggatgcagaccgggttggtacgctccaggtttttgcctcagctggtggtgggattgaaagaaaaatatggtacaacactcattaatattgatggaaaatcaaagtggacaactacagcatatgctcaggtgaatattccggtttttcattggggggaaatgcggcagaatgtgagaatgagccggactcaggaagagacaagagaactggaaagaagtcaattgaaagatcaggtgagtaaggagctgaataacgcttgggtaaatgtgattgaaatagctgataaactggagattgtttattcttcgctggatattgccaaagacaatttgattttgaatacattcagttataatgaaggaaagctgccaattctggatgttctatctgcacaagtgagctggttgcaagcctataccaatgttgtgtcggtcaattatcagtttaaaatagctttggccgaatatgcaagagcgttgggtggcggaaattattaatttaaggtatttttcagtttgtttgcaggatagaatcagaagaggaaagtcaatataattgtaaaaattcaataaatatatttggaaaatcacgattatagcgtatatttgcaccgccaaaccgtaaaatgttggttcagtagctcagctggatagagcaacggccttctaagccgtaggtcgagggttcgaatcccccccttgctaccagaaatttagaggacttatggaatatttttcataagtcttttttgttattatactatttcaaataggtcattcttttattgtctggaggaagactgggatatccctcatatatgatgcctgtgagatagaaatagccatttttataataaataacaggtcctccgctcattctgcgtatattaatttgaattgccggcaatggctatcctttataaatgctgttattaatagttgattattgagttatttttttgaagttaaagtatatttacctgtggattgctatttacatttttttatataagagtacttttaagaaaaaaggcagtaataaaatgaaaaatacgtataaatatttatttggaccggtgccgtcacggcgtatgggaatttctttaggggtaagtcccattcctgagcgcacgtgttcctattcctgtgtgtattgccagcttggcagaacaaagcacatgcagtctgagcgaaaattattttttcctgtacaggatattcttgatgaatttatccattatcaaaaaagtcttcccaaattagatgttgtttccattgtcggcgagggagagccgaccttatacagtgggcttggtgagcttattacggagctgaaaaaggtgacgactgttcctgttgctgtcatcaccaacggttctttattaacccgaccggaagtgcaggaagctctcttgcatgcggatattgttctgccttccatggatgcctgcaatgaaaaggcattcaggcaaattaaccgtccgcatttttctgttaaatatgaagaggtgcaaaaggggcttattgaattttcccaaacgtatggcggtcagctttggcttgaaattatgtttgttgccggaataaatgataacagtgcttctttggatgaatttgcggcaatgcttcccaaaataaaatatgatcgggtgtatattaacactcctgtgcgcccgccggcagaagcatttgtaaaagctccgagtaaagagtttattcacgaggcggtgacaagactttccgcaatatctatagatatgttgagttccggaagtttttacagtgatgtgacggataattatgaggcagtcaaaagcatttgcaaaagacacccaatgaacagctttgaactggaagcttttttaacctcacgcaatgtcagtgatattgatacgtataaaaatagaataaagaatgaccccttgtttgattgcattgattataaagggattattacgtatcggctcaaataagatatattatcattgcagaaatttttgcaaaaaaagaagcaaccggcgaaccggctgcttttcggataacgtgtaaacgttagagccttactcgaaatttctcgattattatagtcgcctttccaatttaaacataataaacaagaatttcttgttattttttatatactcttttataataagtcaagtaaaaaatatgtggggatagaatatgaaaagacgcgtttttggctttgatttgggcatagcatccataggctgggcagtcgtagagtttgataatgaatattatgatatggaaacgggagaaattttagctgacaaggtcaatggaagcggagaaattgcgcagggaacaatagttggctgtggagtgcggacttttcctgtggctgaaaaccctaaagacgggagttcattggcagctgcacgacgggaaaaacgtttagcgcgcagggcttgtcggcgtaaggctcgtcgcaaaaaaggcttgcagggcttgtttgctgcaaaaggtttggctgaaagccctgctgcatttactgatgaaatttgtatgcggcaaatcggcggtgatgtttggaatttacgggtgaaagcgttacaggaaaagctttccaaagaagaattagcgcgagttttatatcatttagcaaatcatcgcggatttaagtccgtccgtaaagcgcaggaagaaaacgataaagacagcggcaaggttttgtctgctattcgtgcgaatatggcattaaaggaagacggcaaaagtctggcgcaaattattgtggaaaaagccggtgaaacaggtaaaaaacgtaatttttcaaaggttgttaaagttaataaaaaaggtgaagatgtaaaagaagctgattatagaaattccattccgcgcagtgaaattgaagcagaacttgccatgatttttaccaagcaaaaggaatatggtatttttacacaagatttatatgatgattttgtaaaaattgcttttcgccagcgcggcataaaaagcgttggggatatggtgggaaattgtacttttgaaaaagacgaaaaaagatctcccaaagaagcgccgacagctgaattttttgtcgcatggagtaaaatcaataatcttgctgtgtatgagggagataaaaagcgtgagttaaccccagaagaacggcagactttatttgatgtattgaaagtaacaaaagacataaaatataagacaatcaggtcaaaggtatttaaaggaaaagatattcaatttacttgcttaaattattcgccaaaacagaaaaaaaataaaaacggtgaactggtaacgattgatccagaagatgtgcttttttataatatgaaaggctggcataagctgcaatcaatatttaaagctgagtacagcgatatttttaatgatattaaaaaattagataaggctgtcacgataattgctacagaaaaagaagatgtaaaaattcaagaaaagttgcaggaacttggctattcacaagaaaaaattgataaatttttgactttgtctttcgataaatttatcaatttatccttgaaagctttgtataaaatcaatccgtatcttgaaaagggcgaaaaatatgacaaggcttgtgcaaatgcaggctatgattttaaagaaataacagataaactcgttaacgaaaaaggcttgctgcttgctgttattgataaggaaaaactaacgaaagttcctgtagtcaatagaaccattgcccaattcagaaagttatataatgcaatggtgcgtcaatatggtgcgcctgatcaaataaatattgaaacaggcagagatctgaaaaagagtgcagaggaacgcaaaaaaattcaaaagcttcaagaagaaaacagggataaaaatcaaagcataaaaaaacaattattggaatggggtgttaaagataatggaacgaatattacaaagcttcgtttatataatgaacagcaaggaaagagtatctatagtggaaatgaaataaaaattgaacagttgtttgatgatgggtatgttgaaattgaccatattctgccgtattcacgcagctggaataattcccaaagcaataaagtgcttgttttagcccgtgaaaatcaagaaaaaggcaatcaaacaccttttgagtacataggaaagagtgatgcaaaaagcaaggaatggactgattttaccagctatgtaacaagttttgcaagcatagaaaagcataaaaaagaaaagctgctgctggaaacctttaatgaaagagaacaggagttcagggatagaaatgctaatgataacagctatattgcactgtatgtaaaacgttatctggaagacggcatcgattttggcaaaagtttgcatacggaaattaaaaataaagtgcaggtgcgcagcggtaatgtgacggcatttttgcgccgtcagtggggcttggaaaaagacaggacggaaagtgataaacaccatgcgcaggacgcaatcgtaatagcctgtgcagcgcaaggcatggtgcaggctctctcaaaaatttcccgtaaagagggggtagtgcatactgatgctgtgcatagaaaatatgctatagctaagccgtgggataattttagaaatgatgtgttgacagctttggaaaaggtttttgtttcccgttcaccacggaaaaaagcaagcggggaaatccacagtgagacaatttataccttgaatgaaaagaaaaaacagtttgaagcaaaaaatgcaaaatccggtttttatgttcgcggcggcatagcaggaaatggcgatatgcttcggactgatgttttttgtaagaaaaataaaaaaggcaaagtgcaattttatcttgttcccatttataaaagtaatttgggtaaagaattaccgaataaagctattgtcgctaataaaaatgaagatgaatggacagtcattgatgaaagtttttcttttatgttttccttatttttggatgacttaataaaagcacaaaaagatgaaacggttacttttggatattataagggcgtagacagggcaaatgctgcaataacaatagaagtacatgatagaagtcaggataatgccagaattggcacgaaaacacttgatagtattaagaaatatcaggtcaatttattaggtgaatattttgaggtaggaggagaaaaaagacaactgttaacgcatgaagaataaaggagttgtatgtcttggcggatattgcagataacaaagccctgtacgctgaaaattaaaaataaacagcttttatatattccgcaggaaggagaagaaatatcctttcctctggaagatatcagtgtgcttattttagaaaacaggcaaataaccatgtataatacgctgctcgctgagcttggtaagcatggtatttgccttttttcatgtgatgaaagccatatgccgtgcggagcgtattttccttttcattcctattatcaaagctcacgcatggcgcaattgcaagtggaaacgcggaagcctctgcaaaacagattgtggcaggagcttatcaaagcaaaaatccaaaatcaggcaaaatgccttgcattactgcaattgcaaggttcagaaaaactttatgcctacagcagaaaagttgtatcaggggataaacaaaacatagaagctgctgctgccaattattattttaaaatgctctttggttcgttttcacggcaaaatgaagatgatttaaaaaatatatttttgaattacggatacgctgtcatacgggcatgcatatcccgttccttggtgggtgttggtttattgccctgttttggaattcatcatgctaatatgtataatgcgtttaatttggcagatgatatgattgaaccctaccgcccctttgttgattatcttgtgtataccctttttaatgaacagacgcttgaaacgtttaattctcagcataaaaatcaagtcgttggagttttgacaaagcaaattggtttggaaggagaggaaataaccgtcttaaaagctattgaatacagctgccagagtttggcaaaatcaataaaattaaaaaagaatgtcttagccttgccctgttttttggaataggagttttcatggcagtaaagggagaacggtatatgcgtgtcattgttttttttgatttaccgactgtcagtaaaaaagataaaaaaattgcggctgattttagaaaatttttattgcaggacggttattatatgctgcaatggtcagtgtattcaagagtttgtaaggggctggcagaagtggaaacacattgtaacaggctgcgggcagttttaccaaattctggaagtatacgtttattaacggtgaccgaaaaacaatatgccggtatggaaattcttgttggaacggttaaaaaagcggaaaaaacaggggctgtccagctgcttttgctgtagtttttttacaaaaaaataaggtaatatctaattatttcaagatattaccttatttctgttgtagcatgtctaaattggaaaggcaactataacgtcaatagtggccaacagctctatgttcacgttgtagcatgtctaaattggaaaggcaactataacagtcctaccgggtgatagttttttgcaggagttgtagcatgtctaaattggaaaggcaactataactggctccgtctggaaggacgcattagaaaagttgtagcatgtctaaattggaaaggcaactataacgtgacggagcttcagtgaagtcgtcttctcgttgtagcatgtctaaattggaaaggcaactataacagctttatgttcacatgcctattcctgagcgttgtagcatgtctaaattggaaaggcaactataacttggcggcggtcaaagaacaattcaattttgttgtagcatgtctaaattggaaaggcaactataacatagtcaaagcaatgtttgcctccttttggttgtagcatgtctaaattggaaaggcaactataacctgtgctaagtgacactaaaaggaatttttgttgtagcatgtctaaattggaaaggcaactataacatcccgttcatgccgaaattcggtcattttgttgtagcatgtctaaattggaaaggcaactataactataacccttataaacggcatgataattttgttgtagcatgtctaaattggaaaggcaactataacatccttgtaaatactgtataaaaatacagggttgtagcatgtctaaattggaaaggcaactataactcccgctcgtgcctataacgctatttttaagttgtagcatgtctaaattggaaaggcaactataacagaatatttgaaaacatggaaagagctttagttgtagcatgtctaaattggaaaggcaactataactgatacagaaaacacaaaacttggtgaactgttgtagcatgtctaaattggaaaggcaactataacagtacatgttggcacagtcactccatcttcgttgtagcatgtctaaattggaaaggcaactataacgacagtgcgggcggttccgcaaaatccgggttgtagcatgtctaaattggaaaggcaactataactaatctgtaatgagataatagtctttcttagttgtagcatgtctaaattggaaaggcaactataacttctctcaacctcacaactaaacaatacacgttgtagcatgtctaaattggaaaggcaactataaccagactattatatcttctttgacaaaatgttgtagcatgtctaaattggaaaggcaactataacaatgaccttgcacattttgaaacaatgcaagttgtagcatgtctaaattggaaaggcaactataacatacagatttgagctgtgccaagttgagctgttgtagcatgtctaaattggaaaggcaactataacttgccataaaatgatttttggttgctttgcgttgtagcatgtctaaattggaaaggcaactataacttaaaatgttaaattttatgacaggtcaaggttgtagcatgtctaaattggaaaggcaactataacccaaagactgctaaataaccctcaaaagtcgttgtagcatgtctaaattggaaaggcaactataacaaaagacaatgtcacaattaacaattttaagttgtagcatgtctaaattggaaaggcaactataacgtccgttataacacaaaatacggcaaaggcgttgtagcatgtctaaattggaaaggcaactataacgagtaaaaaattgagaaagacagtagaagagttgtagcatgtctaaattggaaaggcaactataactccattgcctgcggtgttttgcagaagggggttgtagcatgtctaaattggaaaggcaactatggttcagtattgcagcagtatttttaggtcatggtgaatagtaaaaataactctataattttctgcgttattttatacatttttcgtagaatcgaatagtcttgtccagagtttctgtatcaagtattttgtggtttgcagcgtgttttttcacagccttgagaatttttccaagccgtataccttgttgtattcctgttatttccatgatatgttttccggtaatatgccgggaaaaagcaaaaaaagtatttctaaaatcatccaagtaggcaagcagtttatcccattcctcctgcttaaaaagcccgcaccttgctttatcatcacaaaaggaagtttcgactgcgtagctgaaatacttattctccatgagagtaaggagggtatagggttttatttttatagcttggtgtaaaatcatatgattttttgcacaaaaaatgacgatttccgttaatttatgggaccattttagccttttggcaatggcagtgattacttcttttgaggctgtgtcatgcctgtaataggtgtgtttaatttctccgtttttttctaagggcagataggttattcctttgccaatatcatggaaaagaagggcaaataattgataaatatcgtttgagctgcaaacccgcagtgtttctgctacatgtttccccacagaattaaaagcatttggacaagtattgcaaaaagcatgattggctgtatagttcgcaaaatttttacattgcgaatttttacaaaccccttcggggtgatgtgtatctgagtgcggcaaatcaaataatatgtcaacttccggtaaaataaaacgcaatacatttaattcccgcatgaggactattgcatttgcaaagggttttccgccttcgcctgccatttttgcaagttctgtctggatacgttcagggcttagctgcaataaacattccccgcatgcggaaattgcatcggctgttgctgtatccaagtgaaaagtatagcgggaagcaaagcggacagctctgagaatcctgataaaatcttcgtcaaacctgtcaaagggattaccaacagtgcggatgatatgattttcgatatcctttttccctccaaaaaaatcaatgatattaccgtgataatccatgcccattgcatttatggtaaaatctcttctggacgcatcatctttaaaggaatggatacaattagttgcttccgggcagtttctgttttgtgtaacggtatgcatgcggaaattggcaatttcaaatttaaatccgtttttttccagaagataaacccatacattcatatttttagaaatatcacacagcgtatggaaatggcttttgagaacgtcaaaaggggcgtttgtggcaatatctatatcatgcagcggtttttgcatactataatcacgaacggcaccgcccacaatataggcttcatagcctaagaaattgatttcttttaaaatttcttttgcggttgtgagcactctttttccttttatattctttcaaaaatcaatgcaattcaaaataacgagcaaattattgcaaactgctgaaaaaggcttgtcccaagcttatggaagcatctcccgccgggctttcttttgggaaaagcagggtaaactgcggggaaagctcgcggtataatgcacggagtaaaagttcattattaaaaaccccgcccccgaaaataaggttaggcacgttgttttgggcagaaaagaaaaattcttttttcagaagggataaacatcggcataaagcatgggcaaggcttgagtggaaaatccttgcaatatcaactggttttgtaccagcctgcacgtgtttgaaaagttcggcataaagataaacagtatcaatttcaagatagggttcacaggaacgtgcaggtttattttcttggatttcctgttttatttgctctttcttttcttggcagacatgcagggggatttcgatgcaggcagtagtgtctgacaaaaatgcctgtgtttcaagcctgatagccgcctgtccttcatagctcgtatgggtacaaattcccaagagggcagaaatagcatcaaaaagccgtccgcagccactgctttggggacagttgatatttttttccagcatgagttcgcattgtttgagctgctcgcagtagtcctttttatgataaaacggaaagacatcgtcttttgataaatagccttttttctgtgcctttttatgataggcaaaggcaatgcgccatggctcaaaatttgctttgtcgccgccaatcagggcaatgggactgagccttgcaaggcggtaatggcgtttttcctgtgcaaacagataaaagatttctccgccccagacagtgttgtcatagcctaagcctgtgccgtctaaaatcaatgcaaaatacggggcactgcatagttctttttgttctgcaagcacagcgtaggcatgggaaatatgatgctgtattttttctaagggaattgcgtggtttttgctgtattcttcagctatgtgcgtgctgggaaaatccgggtgcaggtcagtcacagtttttacagggtttacttccaaaagtttttgcaaatgcacagctgtatcttcaaaaaaatccagtacttctaaactgtctaaatctccgatgtgctggctttggtaggcttcctttcctttggtgaacgtaaaggtatttttcaaaaatgttcctgttgcaaaaacagaggaacaatatgcggcattgttcggaaagctgacaggagtaggcacatagcccctcgcacggcgaaaaaatatagtttgaggcagcagattttctcggctttggttttgcggatgcgtgttgttttcctgttcaaggctgaggcataccgagtcatcaacgcggataagaatgtctctgtcatggaacagaaaataatcagcaatattttttaaatcatgcagtgcttgcctgttttgaatacaaataggcttgcctccctgatttgcggaagtcataattaacgctgtcggagcttgcagggaaggctgaacctgcaaagacgtttgttcttctatcacttcagggctaaaaagcaataagtgcaaaggtgtataggcaagcataatcccaattctgtgcgtgtcaggagctatattttgggggagtacgcttttttttacagggcaaagcacaataggagcggaaggggacgttaataatttctcagcatttttgccaatatgagcaagtttctttgccgtttcaatatcttttaccataatggcaaaagctttatcaggtctgtttttacgctgccgaagcgtttggatggcattttcgtcaaaggcactgcaggcaagctgaaaacctcccaatcctttgacagcaatgatttttccctgatttaaaaagcgtattgcctgaaaaattgcttgattattttctgctaggattttttgcttttgcggaagataaggaggattttttgattcgctgtttattccgtcagtttcggttccgtcactgagccagatatggggaccgcacgtggcgcaggcattcggctgagcatgaaaacgcctgtccagcgggtctgtgtattctttatggcagttttcacaaagagggaaacagcccatggttgtaacaggtctgtcgtaaggtattgattttgttatggtataacgtggaccacaagctgtgcagttggtaaaggcataggcatagcggcgatttgtttttgtaaacatatcgtttttgcagtcagcacaaatcgcaacatcagggctgacaagaacgctgtgtccctcatgagagccttgttccgagtggattatttcaaattgcctttcgtctgctttcggggaaatttcctgtttgctgtgcgcggaaatccgtgcaagaggggggagtttattggaaaaatcaagattaaaccgtgcaatattttgtgctgttccctgtatttcaatcaaaaccccttggggagtattttgcacaaaacccgaaagcccatgcgctaatgcaagtttaaaaacaaaaggacgaaatccaacaccttggacttgtccttttatcaaatgttgttcacgtttttgcatattaaatatctaatttaaattgaaattttgccttatcatccgtcgttttcgtttggtttttcaatttctcaataaatgcttcgtctttttcttcatcggttttagcaataaagtcaggatcttcattcatattgagttcgatacggcgtttatttttgagcatttcgtcaaatttgtccatgacaaattcaccgttgtcagtattttcatagttttctgaatcaaccatggtaaaaccaaattcgtcagtctggtattttggatccagcccttcgtattcttcttttttttgctttgcctttttcatgagttcaaaaacaagttcaggaggcaaatcagaagaaaattcataatattgttcaaaggcagcatctttatcaacagtttttttcttatcgcccaatatatagttgaattcgtctgttttttcaatatttgccataaaatcaggcgtcatttcatccataagattggagggcaggaaatcctcaatatcatcatgggaatgtttgatttttttgtgttttttgattttctttttctttgttttggaaatggtttcaggtatgatgcctttttcaagattttccggatccagctcggagatatccaaatgtgcctgttcaagggcagatgtttcttccggatacggatcttcaaaattatcaagtaaaaatttattgctgatagaatagcgtaaaagtgtcagcgggtgcactctgggcggaagtttcggtgcgggagcatcatcaaattcattttcgtcttcgtattcatatttgctttcttcatcatcgttgccgctgtcatttttaagagcgtcatcaaaaaatttagtcagatcaaactgcttataattgtaggtagattttggaatatctatcagctggctagctgtaacctgttcctctttattatccttcgtttcgtcaggaagcatggcaataagattattgagtatgggagccatgtcttcatccgtgggcacagaaccggaacgttcttcgggactatccggatttttaccggctcggggaggaacaggagcttttttaaccccgatttcatttttttggatttcaagaataattttatcgacaaggatttgttcgttatcgataaataaaggaatttggcaaagacattctgaatcattgatataaaaaatagttacttgcagttcaaaggggttttcattggaaaaatttaaaatttgaactttaatactttgtccggcgtgtaatgtcagtgtttccggttcgctttttacatcaatggttaaactttgggcagagatttcaagaagacgacaaggatttttaaaattattaatttttacccaagtgtttttaggtaaaatttttaatggcgtatccgttgcttgctcaaatgaaatggaatagctttgttttgccatatttacctttcaagtgtatttatttcatcacttgtctttcaagacaaaattcaacgcgtctgtttttagcccgattttcaggggagtcgttagggaaacgggggtttaagtcacccatgccggttgcggttatccttaagggatctataccatgttctacgagccaacgcaagacatttactgcacgcagtgccgataattcccagttgtccttaaatcttgcatcggcagggatagggctgtcatcggtatagcctttgatattgactgtcatttcacggtttgcttcaatgacttccaaaatggtggtaagctgttcttcggcgcccgggctgagttcttcagagccttctttgaataaaaggttgtccccgatggtcagggtaatggttccttcatctaaaacagcgcccacatcgccttcaacattttttttggataaatagctttggattgcgtcaaaaacattttcctgatttttgagcagttcctgacggatacgcattaaatcctgcacggactgctgcatattattattggaattgctttgcatttgcccgccggcaacttcactggaagaaagcccgccaaaagccatacgcatagacccaaaaacagtttgaaaccgttttacttcgactgtggacatggaaacaagcaatacgaagaatacaagcaataaggttaccatgtcactgaaggtcgccaaccacgaggtgtcttcagcttcttctggttctggttctggaatttggctcatagactatccctatttatcgtcatgctttcttacggaaggagcaaggaaggaagataatttttcgtataccaaacgggggttattgttttcaagaatagattttgcaccctcgaaaataatggataagttcatactttcctgagtgcttctggatttgagttttgttgccaaaggagaaaaaatgaagtttgcgagaatggtaccgtacaaggttgtaataagagcaacagccatagcaggaccaagggcggagggatcatccagctggctcagcatttggataagaccaataagcgtaccaagcattcccatggcaggggaaagggcggccattttattaaataccccgatattgatgccatgccgtttttgcatggaagaaatctcgataaccacagtgctgtggataagttcaggatcagcattgtctgcaataagctgcatagcttttttcaaaagcggattatttgtttcgacacgttccagagcgaggataccttcacggcggctgatttctgcgatttgaaccataacatcgacaacttcttccggcatggttcttttgc

SEQ ID NO: 945 - DNA, 13827 bp, synthetic construct
  source 1..13827: mol_type = other DNA
  misc_feature 1..13827: note = Synthetic
tcccccaaccgcctgcataaaaaagcagacggttgtttgttattgtgtgacatgtaaagcaactgtataaaacagctgctttgccaaaccctatccccaaacagcccttcataaacaaatgaaagggctgtttggagataggggtggtttgtaagttgatacgtttttctcacctgtatttcttgctttttgggggagcaattaaggagtgtttctaaatttatttgtttagttctgttgggtcacatcgacctagtataacggtatatttttattctttctttgagccagtcaagaaaaccttctttttcataggtgacattacataaatgcttctgcaatgttatcgattactataatagtcgttctatattataggtaaatgacagctttcatctgaaatagcttatcattaattcgttttttggtttttattttaatatgttaccatatgtattatgcctatttctattatattgatttatatgcgtaatttttttgcatgttctatgcttatgtaagtaatatgagaattggaaaaattgctttttttgatgtttttgtttgccgtaattgcaatatgctattggtatcagaggggcggagaaattaaaacagttttacttttgaattggtattacaaaaaaagaagcaactgtaaaaacagttgcttttcggataacgaaattgaaatcgttagagccttactcggaatttctcgattattatagttacctttccaatttagacataataaataagaattccttgttattttttatagaatattgtataaaaagtcaagtgttaaattttgtgaggaatgtatgagaagacgcgtctttggttttgatttggggatagcttccattggttgggcagtcgttgattttgataatgaatattatgatatggaaactggcgaaattttggcagacaaagcaaaaggcagcgttgaaattgctcagggaaagattattgactgcggggtacggtgttttccggttgcggaaaatcctaaagatggcagttcgccggcggctgcaaggcgtgaaaagcgtttggttcgcagggcatgcaggcgtaaggcaagacgcaaagaaggcttgcgtggattatttgtcgcaaagggtttggttgctaattctgaagagtttacggaagaaatatgcaaaaatcagtttggcggcgatgtttgggatttaagggtaaaagctttgcatgaaaagctttcaaaggaagaactgctccgtgttttataccatttggcgaagcaccgcggttttaaatcggctcgtaaagctcaagaggaaaaagataaggatagcggcaaggttttgtctgctattcgtgtgaatatggcattaaaagaagagggtaaaagtttagctcaaattatagttgaaaaagcaggtgtgaatggcaaaaagcgtaatttcacagtatcagtaaaaaaaggaaaaaatgaaaaaaaagttgaagctgattatagaaattccattccccgcagtgaaattttagcagaattgaatatgattttcgcagagcaaaaagaatatggaatttttacgcaggatttatacgatgattttataagaattgcgtttcggcaacgtgggattaaaagcgttggcgatatggttggcaggtgtacttttgaaaaagacgaaaaaagagccccaaaggaagctcccacttcagagttttttgtggcatggagcaaaatcaacaatcttgccgtatatgaagatgatgaaaaacggtttttaactacggaagaacggcagcttttatttgagttattgaaaaaaacgaaagaaataaagtataaggctatttctgcaaagatatttaaggataagaatatacagtttgcttgtttaaagtatagttcgaaatcagaaatagatgataacagagaggaaaagaatgcagaccctgaaaatgctgttttttatagcatgaaaggctggcataagctgcaatcggtatttaaggcactacctcatatttttgatgatattgaaaaactggataaggctgttacaattattgcagaggaaaaagaagacagagaaattaaagaaaaacttgaaaatttgggttattcacaagaaataatagcgcagtttctaacgctgacttttgatacgtttattaatttgtctttgaaagccttgtataaaataaatccttatcttgaaaaaggagaaaaatacgataaggcttgtgcaagtgcagggtatgattttaaagaaatttcggaaaaattggttgagaaaaaaggaaagcttcttccggtaatagataaagataaacagacaaaagtgccggtcgtcaatagaacggtagctcaattcagaaaggtctataatgccttggctcgaaaatatggaacgcctgaccaaatcaaccttgaaacaggcagggaattgaagaaaagttttgaagaacgcagggaaatcagtaaacggcaagaagaaaataggaataaaaatcaaagcgcggtaacacaaattgaagaaaaaggttataaagcaaccggaacaaatatattaaaatggcttttgtatcttgaacaagactgcaaatgcatatacagcggaaagcctatggatattaatcgcttatttgaagtcggttatgtcgaaatcgatcatattttgccgtattcacgcagttttgacaattcgtacagcaataaagttttggttctgtccactgaaaaccaagagaagggcaacaggacgccttttgagcatatcggaaagaataatgttgggagcgaaaaatggatggaatttatcggacgggtgtcaagtcatgtgaacttgcatagaatcaaaaaagaaaaacttttgaatgaaacattcaacgaaagagaactggaatttagggaaagaaatgctaatgacaacagttacatagccttgtatgtgaaacgatatttagaggacggcatcgatttcagcgaaagtttgcatacgaatataaaaaacaaagtgcaagtccgaagcggcaacgtaacggcatttttgcgtcatcaatggggcttggagaaaaatcgtgaagaaagtgataagcaccatgcacaggatgccatagtgatagcttgtgcaacgcagtcaatggttcaggcattatcaaaaatatcccgaaaagagggattggtgcatagggagcatgtgcataaaaaatatgttatagccaaaccatggggtaatttcagggaagatgtgcttattgctttggataaggttttcgtatcccgtccgccgcgcaaaaaggcgacaggcggacttcatggggaaacaatttatactttgaatgaaaagaaaaaacagtttgaggcaaaaaatgtgaagtccggtttttatgttcgcgggggcattgcaggaaatagtgaaatgcttcgtacagatgttttttgtaaaaaaaataaaaaaggtaaaaatgaattttatcttgtgccaatttataagagcgacttaggtaagaatttgcctaataaagccattgttgcgggtaagggtgaaggtgagtggattgtcgttgatgaaagttttactttcatgttttcattgttcatggacgatttggtaaaagtacagaaaggcgaaacagtttattttgggtattataaaggtactgatagagcaacagcagctatgacaatagaagctcatgacagatgttggaagcaaagaagtatcggggtaaaatcacaagatgcaatcattaaatatcaagttggtttgcttggtgattatacagaaatcaaagaagaaaaacgtttatttttaatgtctactaagaaaagaatttaatatgtcttggcgaatattgcagataacaaagccttgtacgttgaaaattaaaaataaacagcttttatatgttccgcaggaagaagaggaaatttcttttcctttggaagatatcagcgtgcttattttggaaaacaggcagataaccatgcataatatattgctggcagagttggcaaagcatggtatttgtcttttttcgtgtgatgagagtcatatgccttgtggagcgtattttccttttttatcttattatcaaagttcacatatggcgaaactgcaaatagaaatgcggaagccattgcaaaataggctgtggcaggaacttgtccgggtaaaaattcaaaatcaggctctatgtttgaaaatattgcaaagacaaggtgttgaaaaattatttgcttacagtaaaaaagtggtttcaggcgataagggaaatattgaggctgcagctgcgaatcattattttaaaatgcttttttcgtctttttcacggaaaaatgacgaggatttgagaaacatatttttaaattacggctatgcaattcttcgtgcctgcatcgcacgttccttggtgggagttggtttgctgccttgctttggacttcatcatgcaaatatgttcaatgcctataatttagcagatgatattatcgagccgtatcgtccttttgtggatttcagcgtttatacactttttcaggaaaatagcattgaaaatatcaatacgcaatataaaaatcaattggcgcgagtattgactaaacagataatgatagaagaatcggaagtcactgtattgaaagctattgaatatacctgtcaaagtttggcaaaatcaataaaattgaaaaagaatgttttagctttgccgtattttttggagtaaggttgtatatggcagtaaaaggagaacgttatatgcgtgtaattgttttttttgacctgccgacagtgacgaaaaaagataagaaaattgcagctgaatttagaaaatttttattgcaagacggatattatatgttgcaatggtcggtatattcacgggtttgcaagggtatggcggaagtggaaacccatagcaacaggttgcgtgctgttttgcccgataccggaagtattcgccttttgactgtgacagaaaaacaatatgcaagcatggaaattttagtcggaactgttaaaaaaggagaaaaaacaggagctattcaattgcttttgttatagttttttaataaaaaataagataattacttattaattcaagtaattatcttattcgattttagcatgtctaaattggaaaggcaactataactcgtttcggtttgatatgaaatcgaaatacattttagcatgtctaaattggaaaggcaactataacggaaaagacagtattgtcacgcttaagcttattttagcatgtctaaattggaaaggcaactataacgcaatatcttaaccaaaaagataacccagaattttagcatgtctaaattggaaaggcaactataacatataacggcaaacacgttaaagatttaaaattttagcatgtctaaattggaaaggcaactataacaggatattaacatgcaaataaatttaaaccattttagcatgtctaaattggaaaggcaactataacgattttctcctaaaatgcgtaacgtgttacattttagcatgtctaaattggaaaggcaactataactattgccaagtccctttttctcgagccaatattttagcatgtctaaattggaaaggcaactataaccgggctcatgcaatccttcaaaaacggtcaattttagcatgtctaaattggaaaggcaactataactgaaaggccgtcaatggcttgcagcaactcattttagcatgtctaaattggaaaggcaactataacaaccataaaagaaaaggaagaaaaactgcaattttagcatgtctaaattggaaaggcaactataactgttaagcactatttagctgttgatgataaattttagcatgtctaaattggaaaagcaatttgttttatgttgtatagttatatttcctgcaatgctgtgtagaaggcttgaccgaggcttatgcaggcatcgccgggtggtgtgttttgcggaaagagaatttgaaattctggagaaaggttgcggtaaagggagcggagcagaatttcattattgaatacgcccccgctgaaaatgagtttacaggaattgggatttgccaagtaaaattcttttttcagcagagtcagacattcgtttaaagcatgggcaaggcttgtatggaaaatttgggcgatatcggcacgttttgtgtttttttgcagaagtttgaaaagttccgcataaagatagacagtatcaatttcaatatagggctgataactgcttgcaggctttttttcttgcatttcctgcaaaatgagttttttattttcttggtcgcagtgcagagggatttttataatcgtatctgttttgccggaaaaagcgtattcttcaagtctgatagccgcctgcccttcataacttgtttgggtgcaaatttcaaggagggcggaaattgcgtcaaaaaggcgcccgcatccgctgctcagggggcagttgatatttttttcaagcataagttcgcattggctgagttggctttgatattccggcttgtcataaaagggaaaaatatcgttttcagccaagtagcctttttcttgggcttttttgtgataggcgaaagcaatgcgccatggctcaaaatttgctttatctgcgccgattaaggcaatggggctgaggctcgccaagcggtagtggcgtttttcacgggcgaagagataaaaaatttctccgccccaaaccgtcttatcatagcctaagcccgttccgtctaaaatcaaggcgaaataaggatgttccgaaagtttgttttgttcggcaagaacagaataggcatgggaaatatggtgctggactttttccaatcctatgttgtgtgtttggctaaaaacttccgcaaggtgggtgcttggaaaatccgggtgcaggtcagctgcggttttttgcggttcgacctctaaaagtttttgcaggtgttttgctgtttcttcaaaaaaatcaagaacttccaagttgtctaaatcgccgatatgctgactttgataagcttcattttctttggtgaacgtgaaggtattttttaataaggttccggctgcaaaaacagaggaaagataatttgcgttgtccggaaaacgcacggggcttggcacatagcctcgtgcacgcctaaaaaatattgggttcggcaaggtttcttgttcagtatcttccgcattaagggcgaggcaaacggaatcgtcgacacggataagaatatccctgtcatggaaaaggtaataatcggcaattttgcgtaaatcccgaagagcttgccggttttttatgcagataggtttgccgccctgattggcggaagtcataatcaaagctttaggagctcgcagttttgtgtttccttctaaggtctgagggctgaaaagcaataaatgcaaaggggtataggcgagcatgatgcctattctgtgcgtgtcaggggcgatgttttcgggcaagccggaatttttggcagggcaaagcacaatgggggcggaaggcgaagtgagaagttcttccgctttggaattgatatgggcgatttcttttgcgttttcaaggtctttgaccatgagggcgaaagctttatgaggtctgttttttcgttttctgagttcttcaacggcattgccgttaaaggcgtcgcaagcgagctggaaaccgcccaaaccttttacggcgatgatttttccttgattgagataagaaattgtttggagaagcgcttgtttgttttcagcaagaatattttgttcttggggaagatagggaggattttggcttgtatttttttctccgtcactcagccataaatgcgggccgcagtctgcgcaggcgttgggctgggcatgaaaacgccggtcaagcggatcggtgtattcgatatggcaggcttcacagaggggaaaacagcccatggtggttactggtctgtcgtaaggaattgattttgttatggtatatcttggtccgcaagaagtgcaatttgtaaaggcataaacataacggcggtttgtttttgtgaacatatcgtttttgcagtccgcgcatattgcgacatcaggactgacaaggacgctgtgccctttatgaccgctttgctccgaatggatgatttcaaactgtttttctaaagcacggggagcgatttcctgtttttggtgttcggaaattttggcgagagaagggagtttttgtttgaaatcaaggttgaatcggttaatttgttcctttgttccctgtatttcaattagaacgccttttgcggtgttttgtacaaagccggttaaagaatttgccagggcaagtctgaaaataaaaggacgaaatccgacaccttggacttgtccttttataatatgttgctcgcgtttttgcatattaaatatcgagtttgaaattgaacgttttttcttcgccgttttggtcttggttttgattgttcagtttttcaataaaggcttcgtctttttcctcgtcggtcattgcaatataatccgggtcattattcacgttaaaatggatgttccgtttattttcaaggagcttgtcaaatcttcccaaaacagaagcttcatcttcgctggcgtcataatcgtcttcgtcaatcatggtgaaaccgaattcatccgtttgatattttgtgtccaagccgtcatattcttcttttttctttctggcatcttccataagtgcaaaaataagttccggaggcaattcggaagaaaattcgtaatattcgtcaaaggcggcgtctttgtccacagttctgcttttatcggtgaggttatagtcgtactcgtttgtgcgttcaatatccgccataaatccgggagtattcatttctgtaataagattggtcggcaggaaattggaaatatcattggcaggtttatgctgcgcttttttctttttatgcactttttgaggcattttaaaattttttgtcacagctttcacagcgtcggtcttattggtatccgcaatattgatgttatagtcttccagtttttttgtttcattcggatagggatctttcaaaccgtcaagtaaaaacttattgacaatggaataccgcaaaagcgttaatgggttgacactgggaatttcggcttgcaacgttccgtcttcgagattttcttctttgtcggagtcatgctctgttttttctttgtcaatattgtaatcgtcatcgtctgctgtttcaaaaagccttgcgaaattaggctgttgttgatacgtgaaagaagatttcgggatattgtttatggagtgcgcaacaactttttcctcttcgctgtctttcgtttcattggggagcatggcgacaaggttgttgaggatggaggctatgtcttcatcggatgtcgcgacattgtaattttgttccgctgcattgtccgagttgtcgttattgcgtgtaaagctggaaaaatgtttgtcgccgatttcatttttttggatttcaagaacgattttatccaaaaggatttgttcactgtcaacatagagcgggacttggcaaaggcattccgtatcattgatatgaaaaatagtcacatggagtaccagaggatcttcgccggaagcgttcaatacttgtattttgatattatttcccgcctgcattgttgaagcttcgggcaaattttttatttcaatatttaaactttgtgtggagatttcaagaagccggcaaggggtgtcaaaagtattgatcttgacccaagtattcttgggcgagatttttaatggcatatctgttgtttgctcatattttattgaaaagccttttttagccatattatgttctcgcggtttgctattttaagacttgtctttcaaggcaaaattcaactcggcggttttttgcgcgattttctggtgaatcgttcggaaaacgggggtttaaatctcccatgcctgttgcagtaactcttaaagggtctataccatgttccacaagccaacgcaagacattaacagcccgcagtgccgataattcccagttgtttttaaatctggcgccttccggaatggcgctgtcgtccgtgtatcctttgatgttgacagtcatttcccggttggattcaatgacatcgagaactgttttcagttgttcgtccgcttccgggctgagttcttcggaaccgggggcgaaaagaaggctgtcgccgatggttagggtgattgttccctcgtcaagaacggctccgacttcgccttcaacattttttttggataaatagctttgaatcgcgttgaaaacgttttcctggtttttgagcaattcttggcggatacgcatcaaatcttggactgattgctgggattggttattgatgttcgcctgcatttgcccgcctgcgatttcacttgcggtaagccctccgaaagccatgcgcatagacccgaaaacgctttggaaacgttttacttcgacagttgacatggatacaagcagtacgaagaatacaagcagtagggtaaccatgtccccgtaggtcgcaagccacgaggtgtcttcaggttcttctggttctggttcaggaatgttgctcatacgttattctcttgatcttacttgtcttcttcatgctttcttacagaaggagcaaggaatgatgataatttttcgtataccaaacgggggttgttgttttcaagaatggatttcgcaccttcgaaaataatggataagttcatgctttcctgtgtgcttcttgatttcagtttggtggcgaggggtgaaaaaatgaagtttgctaaaatggtaccgtacaatgttgtgatcaaagcaacagccatagcgggaccgagggctgacgggtcgcttaattggctgagcatttggataagaccgataagcgtacccaacattcccatggcgggggcgagggcagccattttattgaatacgccgatattgatgccatgccgtttctgcatggaggaaatctcgatgaccacggtgctgtggataagttcagggtcggcgttgtcggcgatgagctgcatggcttttttgagaagcggattgttcgtttcaacgcgttcgagagccaatatcccctcacggcggctgatttcagcgatttgcaccataacgtcgacaacttcttcgggcatagttcttttgcttgtgaatgttttgcttgcggctttgaacgcctgcaaaaattcttcaaacgggaaacagataagcgtagctgcgaaagtacccccaagaacgatgagaacactaggaatatcaataaatccgccggggtccggacccatggcgatggttgcgcctacaagcccgaatcctgctacaatacctattagagtggctaaatccatattttttcaccagttaactattgcttaaaatgaaaatggtgcgtaaaaaccatttgcacttatttaataaacgtactagttaaaaaagtccagtgctttttaaactataaaaaagagtatgtccgcatattctcatacacacaaggaagattttgtgattacaagaaataatgctatccgcaatatcgctatcattgctcacgttgaccatggcaaaaccactttggttgacggtttattccgtcaaagcggcttattccgcgctgaccaacaacttgacgaccgtatgatggacagtatggaacttgaacgtgaacggggtatcaccattgccgcaaaaaactgtgccgtttcttggaacggtgtgcgtatcaacattatcgacaccccgggacacgccgattttggcggagaagtggaacgggctttatccatggtcgatggggttgttcttttggttgattcctcagaaggccctctcccgcaaacccgtttcgtgcttcgcaaagctcttgccctgaaacttcccgttattggcgttatcaataaaattgacagaaaagatgcccgtccggaagaagtcctcaatgaactttatgagcttttcatcgaccttgacgccagcgatgagcagttggaatttcctgttctttatgctatcgggcgtgaaggtgtcgctatgtataatatcggagataaatccgaaaaccttagtcctttgtttgaaacaattttaaaatatattccgggaccaagttatgatgatgagctgccttttcaaatgcttgtgacggatcttgattattctgattatttgggtcgccttgctgtgggcagaataaaaaacggcagggtacacggcaaggaaagtttggtttgtatagggagcgacggcacgcctaaaaatttgcgtgccaccaaattgcaggtataccaaggtaagcagatgatcgacgtggaaagcgccgaacccggtgacattatcgttatggcgggcattgaagatgcgacaatcggcgataccatctgcacgaaagacaatccggttgctttgccccgtatccatgttgacgagccgaccgtggttatgaatttttccatcaacagctccccgcttgcggggcgtgagggaaaaatcgttcaatcccgcagaataaaggaacgccttgaaaaggaagctttgcgaaatgtatctatccgcgttgaggatacggaagacagggacagtttcattgtgaaaggacgcggcgagtttcaaatggctatcattgtggaaactatgcggcgcgaagggttcgagctgaccgtcggacgtcctgaagtcattatgcatgaggaaaacggggttgtttacgaacctattgaagaagtgcatattgattgcgatgaaaactttatgggtgttgtgactgaaaaactctctttcaggaaagggcgtatgtccaactgcgtcaaccatggtacagggcgggtgcgcttgacattttccgtgcccgcgcgggggctcatcggctatcgtgacgagtttttaaccgataccagaggcacaggcatcatgaactccacaatgagcggttatgaggaataccgcggcgatttcgtctcccgtttgaccggttcgcttatcgctgaccgcgcaggcaatgccgttgcctatgctttatacaatttggaaccgcgcggaacgctttttattgttcccggcgacccggtttacgaaggaatggttatcggggaacacaacaaggataacgatattgatgtgaacccgacaaaagagaagaaattaaccaacatgcgcgcggcaaacaaagatgaaaatattattttgacgccagttcgtcctatgacgctggaacatgctttgcacttcctgcgcgaagacgaagttttggaagtgaccccggaatccttgcgcatacgcaaaacggaactcagtgcgcaaaagcgttacgctatgggcggcggcagaaagagaatataagtttaacggttgttttgattgttttaaaaagtccgcttttgataagcgggcttttttgcggggaattttcattattgatttaaaggcaggcgaaataataatacaatatgttgacaatgtattgttaatgtattatttatatgaaaaggagttcatatggagcaaagcacgataagcattcgtatagacagccaattaaaaaaagattttgaagagttttgtaaaaatgttggtatgaatatgacaaccgcaatttctatttttgcaacaacagttgtgaaagaacaacggatcccttttgaaatttcagcagaccctttttacagtgaaaaaaatatggcacgtttgcgtaagtccatgcgggaaatggaagaaaatgggggaacagtgcatgaggtaattcatgattaaatcttggtctgatgatgcttgggaagattttttatattggcaagaacaagataaaaaaactttaaaaagaatacttgaattgattaaagacatagac

SEQ ID NO: 946 - DNA, 23792 bp, synthetic construct
  source 1..23792: mol_type = other DNA
  misc_feature 1..23792: note = Synthetic
attgtaatggaatatgagctagatggaatatctttagcttttctcgccaaaggcgaagctttaggggtttcgaaagggcaacgcccttcgtcgcaaggacggactttgttcgtccgcgaagtttattgaatggagaaattcgatagttcaaataaaataaaaggcatagaaaatcttttaatagatttggaggaaatgttatgaaaaatgtgaatacagcgaatgtggagaatctaaaaagtgcgaaaacttcgccaaatgctaagaatctagcgaatccaaaaattgccaaaaatgctaaaaatccagcgaaaaatccagcgaaaaatccagcgaaaaatctagcaaatccaccaagcattgaaaacccacagaatccatcaaacaatccaaagaatcctacgaatccacaaaccgccgaaaatcctacaaatacgccgaatctagattctatctctgccaaaaccccatatttcacatttgataatattgccctatacaagggcgatgtgctggataaaagcaattttaaaagaggcttttttgatttaggcattacttcgccaccctataatctaggcattgaatatggctcaaacaacgatgaaatcagctatgaggagtatctcaaatttagccaaaagtggcttcaaaactgctatttttgggctaaggatagggcaagattctgcctaaatatcccgcttgataagaacaagggcggtcagcaaagcattggggcggacttgacaaatatcgctaagtgcgtgggttggcggtatcacagcaccattatttggaatgagggaaatatctcaaggcggacggcgtgggggagctggctgtctgcctctgcaccatatgtcatcgctcctgtagagattatcgtcgtgctttataagaatgaatggcggaggggtagggggcagaatgacatcaccaaagaggaatttatggcgtggacaaatggcttgtggagcttcaatggcgaatctaaaaagcatatagggcacccagccccattcccaagggagttgcctaggcggtgtgtgaagctattttcgtttgtgggcgatgtggtttttgacccatttagcggaagtgggacttcgattttagaggcaagtctaaatgctcgtaaagccgtagggctggagatagatagcggatactgcgaactctccaagaaaagaatccaagattgggggaatgtgctaaaaataacttagaatgcaactcaaaaataggagactggaagcaaatcgaccactcatatctaagtaaattccgcaatggtgcggttaccttgctccaaaaagcctaaaatggcgactttatcagtggaatccagcttaaaaataccattcgcagcgacatcgcacaatggtttgagatgaatatgtagagattctggcttttgggattctgtgcttggattccagctttggggttttcgtagcggattctgtggcagattctgcgttagattccgcctttggattctaaagcagatttttaagccaaatctagcgatttttaagcgatttaggcggattttaaacattccgccttgttttaaaataatatcattatttcgtataggcgatgaatttttgcgttatgcgaaataatttttcttagaagtttcctataagagttttatctctcattgtcgcaaggttggggatttatttgcttaagttaaaataaaataaatattatgttaaatactcaaacaccaagccaaataaaatgaataaggtaattttctataaaatttatccttaaaatatcaatctacttgagactccccgaagttttaggaattcgccttgagaaagcgaagtttatgtggttttaatctcataaaatttcaaaaattaatcaaattttattgttgatttctgctataatttcaacttctacaagcagattcaaggtttgaatattacttttaggacttctatatcgaaaactttttatgcgaattttatgcaagaagcgattttcgcgacttcttttcgacttctagattctttataaagtaatttgtaaaaattatttttaaggatttttatggaaaatacagagattacaccagattacacacttgatgtcaaaggcgagacttgcccttacccagcgataaaaacgcttgaggcaatggagagtttgcaaaaaggtgaggttttggaagtgcttggggactgcccacagagcataaataacattcaatttgattgcaaaaatcacggctacgaggtcttaagcgtcgagcagtttggtccaaatttgcgatttttgatacgcaaatagggggcggaatctaatgagaaaagttataaatagggcggattccgccaaaaatatcgctttggaatctgcggattccacaaattctgtaaatgctatagattctgcgtgctgtggaacaaattccgcagattctgcaaattctatagattctagcgattatggctgttgcgggaatctagattccgcggattctctaaacgctataaattccgcgtgctgtggggtagattccgcgaatctaaattccgcaagtgccacttccgccactctcgtagatttaaacatacacgagagccgaagcgtgaaaaaccccagtttttgggagtatttcaaacaaaagtatctaatcactttctacaagccacttccagcagtcatcgcacttgggattttggcgacttattattttggattttttgggagcgtgtgggcggtaactggcgagatgacacgctggggcggagaaatcttggagctttttggggcagatttaagcaagtatgaatattataatttgacaaatctaaacggctctccgctcacgcgaaacgacggcattatgctaattggaatgtttttgggctgctttatcgccgcactctgggcgaataatgtcaagctccgcttcccagcctccaagattcgcgtggctcaagccctaatcgggggaatcctaagtggatttggagctagacttgcgatgggctgcaatttggcgaatttctttactggattgccttatttctccttgcatacttgggttttcgtggtttttatgataattgggatttatcttggaattaaggtgataaacttgccttttatgcactcaaaagcgaagctacaaaaagccaccaaaagccacaatctccaccaagagcaagatagagcgaagtttctattctatcttgggagcgtgatttttgtggcgtgtatcgtgtggatagcctatctcacaatcactggcacaccacaacaaaacaaggctattccgctacttggcttagcacttggctttggacttgcatttggatttttaatatcaagggcacaaatctgctttacctcagcatttagagatttgtttttaactgggcgaagcgagatggcaaaagccgtatttatcggcattatgatttcctccctcggcgcatttagctatataatgctagggaatggcataaagatggtttggattggaccaaatgtcgtcctcggcggatttttatttggctttgggatagttttagctggtgggtgcgagtgtggctggatatatcgagcggttgagggacaggtgcattattggattgctggggttggaaatatcatcggcacgataattttagctctaacttgggatatttatgcaccaagtatcgcttacccatatccaaagctaaatttgcttggcgtatttgggaattatggcggtttggtggtgaattatgtgctacttcttgcgatgcttgggctaataataatgtattcaaggtattttttcaaagcaaaaaaacaagcgatttatttaaaatgtgcgtaagattgggctaaattgagctaagtgggattttaaaacaagttagattctagaaaagattctggaatctgctagattttaaagattaagttcttatgcgaaacacaaaaagcgtcgttggggttgaaatggaaacttcactttgcttatttgataggaatttagcttgcaaaaatctatttcattcgttttataagaagttaatgcttggggtgattgtaaggtatggggagcgaactttgccgttataaggaatcttttttataagaagttacgtttcgtcacaaagtgctaaatcatcatttaagccacattattccttcctacatctattttcgcccaaaatgataaaaacttagattctatggagattctagatttattttggataatttttgtatttggaaatctatggaatctagcaaagttttattgtgaaaattgtagaatttttgctaaaaatattaaaaattttggtaaaaattaacaatttataaacgatagattttataaaaaacttgccataatgcaataaaaatcgcattgaaaaataatttataaaaattttttataaaaataataaattaacaaactattaacatttttcttttatacttctcttgtcgaaagacaaaacaaaatattttataatattttgagttataacaattttttttgtattacatatgggaagccaagtagtatatggtgtcactttgcagtaatgtagatttaagccctatctataattatacttaagattatattaagaacaacccctccaaaattaaatttataatcttttgttatgtaaaaatcatataactttaaaaagccctttttagtaaatattcaacttttaggatagtaattagcctatctttttgttttcctattccatatactaaattggcttcttcatgtaatgtttcaggtgtagggtcaatatcactttcttttatcctaacagcctctgtaagcttatcaataataaaaccagcaacttcatcattatgtttaataactatatatctagcgtctttattttgtttcaatgcaggaagaccaaatttcattcgtaaatttataattggaaaaatatttccccttagattaaacacacctaagacataatcaggcgttccgggcactctagtgtattctatcggttttactatttcttgcacacttaaaattggcactgcaaactcttcgctccctactaggaagccaactacttgtaatacatcttcatgttcgctttctatattttgtttcacttgagtttgaaataattcttttagtttatcagccatttttcacctctttattgattgttgttttgaatattaaaattgatatttctttttacaacatttactagatattctgcagaatatggctttgtgatatattctgtcataccagattccacaccacgcattctatcggtttttgctgttctacttgtaactgcgattaatggcagatgtttgaatttattatattttcttatttctgtggcaagcgaatatccgtccattctaggcatttcaatatctaccaaaactgcatcgatatgtctatcgccattttttattatttctaatgcatctatgccatttgttgcttctagtatagtaacacctagtggttttagatattgtttcattatagctctatcagtatgactatcatcaacagctagaatgacataatcactagcttttgttttttctttgctttcgtcatcctcttgtagattactaacagtgccttttatatattttgccatttgcatcatacttgcgacatcgacaattagcgtgattttcccatctcccctaacagttgccccagcaatgccctccgtgcctttgagataataaccaagtgatttaataacaacttcttcttgacctacaagataatcaacaataatcccaatcttacttgcagcaagtcctataataaccacataaagttcatttgagtttttaagcacagcatcaactttgaaaatatcagataatctaaccaaagttagaatctcatctctaagcctaaggacactttttccttcgaccatataaacttcgttttgatttatcctaacagtttctaccacagacccaagcggaatggcataatattcttcttggacacctacaattaatgcctgaataatagctaaggttaaaggaattcttagttttagagcagttcccttgccaagctcggattctacatctatcataccatttaatttttcaatatttgtttttacaacatccattcctacgcctcttccgctcacatttgtaacgacctttgcagtggagaatccagctctaaaaattaacgcaaacgcttctttgtctgtcattgtgtcggcttctcgttcatttatgatacctttctctaatgctttttgctttaaagtatcaacattaagccctcttccatcatctgcaatctcaactacaatatgatttccctcattataagcttttagctctatttttcctgtttcgcttttacctgcagcaagtcgctcttctgcactctctatcccgtggtcgcaagaatttcgaatgatgtgaattaatgggtcgcctatctcctctactattgatttatctaactcggtttcctcgccacttataactaactcgatatttttccccatctcacgggctaaatccctaaccattcgcggaaatttattgaaaaccttgcttacaggcaacattctagttttcataacggctaattgcaaatcagtagtaacgatagagatagtagaaacaacttgatttaactcctctaaaaactgctctccatcgtatcgctcttcgacttcatcataaatattaatcaagcgattttttcctagcacaagctcaccaattagattcatcaaatggtctaatcgcttcacatcaacacgaactgtttgctctaaacttgtcgtaactgtattttcatctttctttggagttgtttgttttttcgcagtagattttatttccggttttttagattctatatttttggtttcttcgtttgatttaggtggggttgattgtttttcttgtgctttttttgcagctcttcttgctctatcttcttcttgtctttgttttaataatctttcaatttctttgtcaatctcgtctgcagtaagattcgaataatctgtggtttcttcgccatcttgtgatgttttagattctgctacattagcattatttgcatttttgggttgggtttcaatctcttcttttttttgtaaaggctcattatttgtagtagattctactttagtatcattttcttgatttacttgctcattttgaatattttgcaatcttttaacgacatcattaatatcaatatcatttttatcacttccagtatctcttatggagataagtagatttttcattaaatctatagattctaaaacaacatccataatatttggagtaatgattaactcgcctcttctagctttatttaatacatcttccatattatgcgttaaagtcgttagaatatcaaaattcaaaaacgagctagaacccttaatcgtatgtgccacacgaaagattcgatttagtaaatccaaatcttttggattattttcaagctcaattaggtcttggtctaattgctcaatcatctcaaaggcttcgatgagaaaatcttctagtatttcttgcatttcgtccataaaggcaactccaaaatttaattttaaattctatcttttttttattaaatataaaattatattacactaaaacaattatttttgatgttaaatgccgtttcgtcataataaaatgacgataaagcaatgtaagtaaaatctttatttttagcaattttccctatgtgaaaatgcccttctataatcatatcaatactaagattctgcgattttaaataatttctataagattgaatcctgcttttgattatagaatccgcattgtaaggtaatttaatttttttattttcaactttttttcttataaaagcatagattttcccgcaagatacaatatctaggattcttaaaaaacttattgtttttttggaagtcaagattcttatatatatttcatattttgcatctaggaataagtctccatgtgcaagtaagatattattgtttttatagtttgctaaaatcggctgagagattctaggaatcttttttatattcggcaaaatgggctctaaatcaaaatcatgattcccttcaaaatatattaattgtgatttttgtgataatgtatgaagcgagtcaatcaaatttttatttgtagctacactgcttttaataccacctataagcatatttgaaatatctccaactaagaatatttgacttggaatattagatagattatttagttttaaaactagcgaatccctattttcttgcgtgtgagaatctgcgataaaaatcgcatcatcattgattgtgataatatcatttgctatatttttttgatttttatggggtttttttttgggattctgcatatttagattttcgctagaatccgcttttttagaatctttcaaattattagattctatagaattgccaaattcagggaattttatagaatctaaagaagttttttccattttatggcacatacgccactcttggcagtgcggaactctcatctatcccgcacattagatttgcatttgccaccgcttgggagctagcaccacgaagcaaattgtcaatgctcgtattcacatacaaatcgctcccatttttcttggcaaaaatgtcgcagaagtgcgtcccggcgacggatttcacatcgaccggattttcccttatgcggataaagggctcgtttttgtaggtctcttttaggatttcaagtgggtcaagtttttgggcgattttcttatccaagcggataaaaatcgacgccaacattccgcgtgtaaatgggcttaaatgcgggataaagctgatatttagctcgtttaaaatgctttttagattcccttttagatttgtcgtattttttaaatccgctggattccgtaaatttttcaaatctgccagattccccacatttttttccacaagattccgcgaattttttaagtttgccagattccgcccaaaaaattcgcatttttcagtaatttcgatttgatggcggtgcgttaacggcgaataactaaaaatattttcgttaatggtagggtagtgtgtattttcgcttagctttttcccagccccgcttacaccactttttgcgtcaataaaaatgctcccatcgcccaaatatgggagaaatggcaagattccaagcagacttgctgtagggtagcagcccggatttgcgattaaattcgcggttttgatattttctctattccactcaaccagcccatacacggcgtttttaaggtttttggaatctaaatgcttggaataagttttattgaaattcgcctcgctcaggcgataatccgccgataaatccacgactttcacgccagattccaaaatctttgggacgattttcatggattcctcgtgtggcaaagctaggaaaaccagctccaaatccttaatttttttcaaatcgattttttgcacttccatattagaaatatcggtgtttgcgggggttttttgagttgcggaatcttttgtgcgatttttcacaccatttttagattcgctttcacgctcactagtccagctttgggcattcactagcgaggggtgaatctcgcccagcctcgctcctccgctagtatttgcaagatatgcaatcctaaaatgccgatgatttaggagaatcttaattagctctaagcccgtatatccgctcacaccgacaatcccaatgtttttctgcataattcgctccattgcttcaaatcctgttttaagattattctaagccatttttaaaactaaatcataattctagcgaaaaataaaatcttaattcctattttctattaatactatgccgataataaggctagtaaatttgatataactttgcttttaccctgataattacgcaagtaaagctacccttaagtcgctagtttatataattttagtaatttgcaagggggttgagtttgagagttttaggacttgatgtgggcgttactagcgttggctgggcggttgtgagtgtggataatgatgataaaagtaagaataaaattgaaaaatgtggcgttcggctctttgagggcgtagctcaagataggcatgagaacttaaagtgtgcaatttgggcgagtgcgaaatcaagtaggaatcgatttaaggcgaggcgaaagcgattaaatgaaattaaaaaggtatttgaggcgattggctttatagattttagctttgattttgaggctttccataagaatctttaccaaaggggcgaaaatatctacacacttcgtgccaaatcgctcaaagaaaaaatagaaaaaatagagatttttgcgtgtatttatcatcttgccaaacatcgtggttatcgctccggacccgtgataaatgtaggcaaaaaggagggcagtaaggtaaaaattttagagacaagggaaaaattgcaagggaaaactttcgctcaatttttagtcgaaaacaatgccaatgccacccagcctacatatcgcaataggggcgaggaagcgagatttatggcagataaggatatgattgagtgcgaggtgcgggcgattttagagaagcaaggggaatgttattatgacacgctagattccgcatttatacaaaaaatcatcgatataatcaatcaaaaatctgcctctataaataaagattttatagaaaatatgcttgggaattgccaatttgaaaaggaggaaaaacgcacgagtagcgacacgctaactgccataatatctagaatcttgcaaaaaattaataatataaaaataattgaaaatggggaaataaaaaatttaataaatgcggaatctggggaatctaaatctgcagaaaccgcccaattagtccaaaaactactattggcatttttcaaagattacgaactctcctatgctaaaatccgcgaaatcgccaagctagacgaaaatgcgatatttaaggatttgaattataaggaatttgtaattaaggaaatctacaagatttttaaagactatttgccaaaaacttcccaaaaagctaaaaatggggattctgcaaattccatagattctgcaaatgtgtcccaaaattctaagaatccaaatgtatttaagcacttcccaacattcgcccaagatttatatggcttacttcaatctagccaattcgtcgaatccaaagtgccagaatctagcacatttaaaatgataatagaatctaatttggctcaaaataaagcaattagcgatatttcaaacctagaatcccgcattagctcccttaagaagctatctaattataaaagtgggcttgaaaaagaggcgaatctctttgcggataaaaacctgaaaatgattgcagaggcgttagaggcgttaaacttgaagtttgatagcgtggaatctatctttgagaagcgggattttatcgatagcataatctttgattttttcttttataaggattatttggagttagaggagcatttaagccttaaagttccggataaaaatgctagggataaagtcgcaaatgagctgtttcaaaaggttaaaggcacttcgaacctaagcctaaaggcattaaagaaaatcgagccatttttattgcaaggctataaatacactgaggcgtgtgaaaaagctggatacagcaaggaggaaagcacgcagcgatttacatatctcccattaatgagagatgcgatgaaaatggggcttattggcgtaaataacccacgcgtaaggaaaatcaacaatcaagttataaagctaataaacgagctaatacgacgcaaaatctactttgatagaatccacatcgaactagcccgcgatattccacaaaccaaaaacgaagctatagaaaaagccaaatcaaataaagaagttgaaaagctaaaaaaacaagcaatagagccactaagcgatattttaggagctaatccaaatccaaaagatatcttaaaagctcgtttgtggctagagcagaatgagcgatgtccttactgcggagaaaagctggtgcgaacggattgggggcattttgacatagaccacatcaagccacttcctagaagctatgataatacctactcaaataaggttttggcacacaaatcttgcaatcaaagtaagggaatgcgtctcccgctagagtggctaagtggcgaggcggcggaaaaatatagggtgagagttgagggacttgccaatattggcaagaggaaattaaagaatcttttaatgttagagataaaagatgaggatattgaaaatcctagaatcttaactgagagtcgatatgcagtgagattcctaaaaaattacatagaaaagcacttggattttgagcgattttcaccagaatctaatctgccaaaaagcaaggagggagctagattccagcgggtgcagactagaaatgggggtgtaactaatatcttgcggaattattggcatattggagcgcaagattctaataacatagatgaaagtatggcaaggtataagaaagataggcttatccacacgcaccacgcagaagatgccataatactcgcttttgccacgcaaggtatagtgcagaaaatccacacaatagccacagaaattagcctctcacacgatactaaagaagccatggactacaccaccggtgaaattaccataacagaatccgcccaaaacgccaagcacaaagcaatacaaaagcgactgcattcctccgcaccactggaaaatatgccacaaaaggtggaaaatgccattagaaatattttcccctctagaatggctacgagacgaaagcaatatgggcagattcacgatgatacgatttactccgtgcgagataaaagtaataactacaaaaagctctcaaaagccgaagtagaggaaaaaatccaagctaaagatatagaaaacctagtaataattaagacgcagaaattaagtgataaatatgcaaaagacggcaaagctaagctagaaaaaaacctagaaaatatgatagataaagacactaggaataaaaagctatatgaggctataaaagcctttataaatagcgatgagagcgagtgcaaatacgctggggttgccgtaaggggctttaaatattacgagaaatttactccaactgcactttttatccgtggtggcgtggcaactagaagcttacagcaaaagtatttggtgtataaaaagaatggattctactatattggcttggtgtattttggcgacaatataggcgatgataaaaatgctagggtgcaaatcaccgacaaagacaaggactacgaataccgagaatacagcgataatggctatagctacgagatgaccctacataaaaacgacctaatttattacgagcaagaaaataaatctctcaaagatggcgtggaaaggcatgtttattatatcgatttgtttaatacggcgagaaaaagtgcacaaatgttttttaaagacccagttgtatcacaaacattgaaaacaaacaaaaaaggagaaacggcagatgagaagtatagtccaagtgtgaaatttggcaaacttagtcacaataatatcaccaagctagaaaagctggaaatcgacttgcttgggaatgtgtataggatagtgaatggcgaaaaaactaatttcacaaaagaggctctagccattatgcacgcccaaaaagcagaagcaaaaagcaaggaatccaaaaagtctaaaaagtctttagaatcttagatgtttctttaaagcccatttaagccgatttaattacataaactttagattccacgcttagaggcgataaatcgataagtttagattccaaaaatgggggcgaaatgggtgagctaaatatatttatctcaaatcccgccaagctaagcataaagtccaagaatcttaatattaaaagcttagaatccagcgaagcggaatctttagattcgctagattcccaagattctaaaaacgctaaagccccaagcgatgaggtttttatcccattagataatatctctagcattatcgttgataatcctatgtgcatttttacccacactttgcttgactttttggctcaaaaaaatatcgttttaattgtttgcgatgataaacatctcccaagcgggattctgctctctcttttaaatcactccaaaacttcacttcatttaagaacgcaaatcaagctaaattcaaagacaaaagccaccctttggcaagaaatcataaaagtaaaaatcgcaaatcaagccgccgttttagagattttggggaaggaaaatagcgaggttttgcggaaaatggcaaaaaaggtgctattaaacgacagctcaaacttggaggctttggctgctagaatctactttagctccctatttagcgaggattttaagcggagcaaaagcgactttaagaggagagaggaaaacatcataaatgcgatgttaaactacggctatgccataatccgcgctaaaattgcccgaagtatttgtgccaaggggctattgcctagctttgggattttccacgatagtagcttgaatgcctttaatttggcagatgatttcttggaggtttttcgtggttttgtggatatttatgcttataaatacattgaatttacttcgcggaggagcaaagcccctccttgcgacgaagggcgttgccctttcgaaacccctaaagcttcggggactatcgccccgagaaaaagcattagcgatttgctttgtagcccaaatgagcttaataaagaggataagctctatttgcttggaatctttaaaaaagaaattccgctaaatgggaaaatgtatctatttgataagggcattgatgaggtgatttcgcagtatttgcggatagttttgggtaaggattctgctctcaaactgccgcttttagatacgcgattttgcgattagggggctaaaaatggcagattctacaaagattttagaatgaattgcgaagtatttatgagaatcctagtgatgtttgacttgccgacgaatacaaaggcggagcgaaaaaaagctgcaagattccgcaaggagctacagaatctgggattttttatgattcaatactccgtgtatgtgcgtgtagtgcgaggaaatgagcgacagcaaagcgtggcgaacaaggtcaaagcccacctaccaccaaaaggaagcgtgcgaatgctaacgataactgaaaagcaatacgaaaatatggatatcctaatcggtgagccaaaaagtaagagcgagaaaatcacgggagagcaactgctatttgagttttaatttagatagattaatatttttgtggtttgtgctgattaagattctattttaaagtagctttatagtttggcttgtattttaaaactaggtttaaaatacaagtgatgtcctcttaattaaaagagttattttaaaagcaatccctaagcctctaatttgtattttgtaattgtagcatatgtattttaaagttatattaagcaatgaaaaatcttaatatttcccagcttaacgctacccgttaagattctattatacagattagacgcttagggggctcttaaaacagaatccgccaaagtatttcatagaatcaattatacagattagacgcttagggggctcttaaaacaattttaaatttgtcaatgatgaaaaagaattatacagattagacgcttagggggctcttaaaacgatagctcacttttgcctagtgtaagtaaattatacagattagacgcttagggggctcttaaaacctaagaaacaataaaacgatagagataataattatacagattagacgcttagggggctcttaaaactcgccagtataactaattattaagtcatttattatacagattagacgcttagggggctcttaaaactagttcagtcgatataagtaaatggacgatattatacagattagacgcttagggggctcttaaaacatttcatcgaaattgattatatacaaagaattatacagattagacgcttagggggctcttaaaacgcttattattctatcaatttcaataacgctattatacagattagacgcttagggggctcttaaaacatagaaaactacaagatgtttgtctataagattatacagattagacgcttagggggctcttaaaacatcaaatttgcgaaattcaaataattaaaattatacagattagacgcttagggggctcttaaaacagttgttatgccaaatagcgatttaccaaaattatacagattagacgcttagggggctcttaaaacaccttaaatccgttaacattaatcttaacaattatacagattagacgcttagggggctcttaaaactaagatgttacaattaacggatgaattgaattatacagattagacgcttagggggctcttaaaacgatgacgaatattacaggattacgcttgaattatacagattagacgcttagggggctcttaaaacactttccttcgccgccatttaaaccttttaattatacagattagacgcttagggggctcttaaaataagatggataaaacaaacggagcggaatatcatttgaaattaattatataaattagttacttattattctacaaataccccatattatcccctatctctttcccaaaaaatatccctccattttacactcatgtagcagagtttaacattccgtgttcgatattagtcattaatgctttccccatttttcacccatatagctacccttacccctaatacccattaataagccgtagttattagacatagatagatatgattttgttgattgatattagatagtttgtgggtagaatctcccatttataatgagagattctatattaaatttatatagtaagatttgtttgaaattttatctttcaaattggaatggctcacctcgcactttaacgcagtctccgccaaaaagtataatcgaccaagcactttcccatacagttacatttgttaaaccctctgctggaaatccatcttttgaggcttcttcgagcgcgtctgctgttgccgcgctatgcctatttgccgagttaccaaatggaataccaagaaagtagaataagcaactctctccctctacataattctcgtgtttttccgtcggtattggcacatttcctgttgatactatagaataattcgctagattcgtagagcacccaaccaaaaaaacaccaaatatagccaataaaatacctttcattttgtttcctttcttttaatttttaattaaacgcttaattatacccccccccataaaaccaagcttaaagattgttttataagttgattttgagtgatttatgcactatgaaatagcaaaagattctctttattctttgattttgtagattctattattgaatgaaatcattattattttttggaatctttttaggagattttattgaagtttttatatcttttaatggtagttattggtataaagctatagatattatctatagcttataattatttacaatgtggatttcgtgcatctttaatagtgataaatactattgattgtggcggaatggttagcttagaatcgttattttttataggggataattttggtagtttatcattagatagttgcaattttgtattatttaatagcactgatgatgatgtgttaatatccccatcagcacttaaagtatatgtttctaggggcttatctgtagatatagaaaatgcctctttgctatcaatatttagtgctatgatggaaactcctcccatattatttttcatacattgtgcatatagatgtagatttggattagtagaagaaatatctaagatagtagttcccattaatctactccatagtaaagcagcccaatagttaggcttagggtcatatgttttttcatctaataggctatagtcgctaactgctagggtattatgtgttacaactgaaacaccctctttggctaaacgaccaagttggtcaatatatctaaatgtatcgagaaatgttccagcccaaggattcccaccacaggcagtttcacccgtttctgtaacccaaatttcttttccctttagatattcatctcgtaattttttataaaaattaaaagaatcatcagtcctacttagccattgattgcttaatgcttctttaatgctagtttgtgcgtattcctgccctttcatatagcatcgttgagatactgcaccatagtgatgataagaaaatgcatcaaatttatttgcaccgatatttttcatcatatcaggtgtgcttatgaattcattattgccgtagaaaatatgccattttcctacattttcacccacagagccagtccctagaatcttaatttcgggtgcattttttcgcataaatgaataaaaaacatcaaaatcattagcataatcttttgccgaatatcccttaaatgcccctcccatttcagctaatgtcggctcattcataaattcagcagccacaatatttccgccgtgttttttagtgaaatcaaggaatattttggcttgtttgctattccatattttatttttatcacgcgttccatcactagttgcaaatgaagtgattatgggagaatccactgattttgaaaaattgataagtgatagccactgctcacctgtaaggacattattaaatcctgatggtggtgcttttactttgctatctggagaaaaatatgttgtattagcccaagttccgctaactctaatgtaggcaggtgataatgcttttgctaacattataagctttttgttggttaaatctatcggtgggagatattcataaatatccggattcattccagctggaatccccttttgggttgtgttatcttttgtattcttatctccataaggtttccaaaaatatccgccggtaagctctaccatttctatattataggattgataatgcttatctacaaccccaattttttttaattcactagtttttattgatatatcattggcgaaacacacacttgctataagtgggattccaatcgccaataaatttatttttttcatttttaatactccttataaagatttgcaatattttttaaaatttaagatagcacatagaagattcaagtattaaaataagtttcacccgccacccataaattgcaaaaactcgattctatcgccattatttggaaatgtgcttttataatcttctcttttaaccaaattactatttaatgcaattgcaataatcttagattctatatctagggcttctaaaatctcttgtatgtttttttgagtatcaaaattcatagatgttccattgataaataaagtcattttttctcctttgtatttgaattaaaaaacttataataaaatccgcttttattttcttgctttgctcgtgaaatcaccaaatcgccatcttttgcattgcgagagacactgcttcctgcagcaattagcacatttgagccaatcgttagcggggcgattagctgacaatcacttcctacaaatacatttttaccgattatcgttttatgcttttttactccatcataattacaggtaatcacccctgcaccgatatttgtcccgctatcaatctcactatcgccaatatagcttaaatgccccgcttttacgccatttagatttgatgcttttatctctacaaaattaccgatatgagaatctaaaatagttgatttagggcggattctagcaaatggtccaattgtgctattttctattatactattttcgattatggtgtttgagtggattatgctatttatgattttagtgttaccttttaacacggagttactctcaacctcgcattctcctataaactccacatcgcattcaatataaatactttgtggaatccttaaagttacgccatttttcattgctcttaatcgaatcttatctagcataagattctccgctctagctaaatcaatcttagaattaacaccgataaatatctcttccttagcttttatacccaaaatatcgcaattatcatttctagctaagcttattatatctgttagataaaattcattttgtttattattagattctaggattgggagatatttagacaaaatatcctttttaatgcagtagattccgccgttcgcaaatcgtatttgttgtatctctaaagatgcgtctttttcttcgattatttctatgaccttatcatcatttaggactactcgaccatatccacttgcattttccagctctaatattccaagtgtaatatcaaaatcactattaataaaatcttgcaatgttgcagattctacaagtggcatatcaccgcttaaaattaatgttttatggtattttatatcgattaaatcttttggattctcgccatatcctttcatcaaagccccagcagttccgggatatgattgatgattttgtaggtgaaagtgaaaattgttatttgggtatttatcatttagaatctgcttgattaactctgcttcgttatataggattatgtgaatatcatcgctaattttactaacttcatcgataatacaagctaacatttctttcccgcaaatcttatgcaaaacttttgggattttagatttcattctagtgccgaatccagcacttaaaataatgacagatgttgaaaattctatcacttaatattccttgatttgtatttatacaattttaacacaataaaagctataatctcaaattaaggtaaaattctattgtttggaaggtttaattttaatttaggagttgcaactctatggatttagggaccattatagggttatttcttgttacattgcttatggttggtgctatggcacttggcgtcggtgtgcaagtatatattgactttccgtctgttttaatcaccattggtggctcaatatctgcattattaattgcttttaaattagagcaaatgaaaaatatctttaaatatgtaggtatagcatttaagccacatcaatacaatatcccggttttaataaaaacgatagttgaatatgcgataaaagctcgtagagatgggattctctcgctggaacaaaatgtaaatcaagaggaaaatgatttcttaagaaaagggcttagtatggcggttgatggctcagagccagattctattagggaattgctagaaatcgatatggaacaaagcttagctaggcataatggcaatgccgatattttcgatacttgggcggctttggctggttcttatggtatgcttgggacacttattgggctagttgcgatgcttgtaaatatgagcgaccctagctcgattggtcctgcgatggcggttgcgttaattacgacattatatggctcattgataggaaacacgataggaacgcctattgcaaatatattgagaatccgtgcacaagatgaagcgttaatgaaactattggtaatcgaggggataatatccatacaagcaggagataatcctagggttttggaaacaaaattattatcatttcttccaccaagcaaacgaattagtcaatttgactaatagctcttaaataatgaaaaagattacaagcgaaaaaaaattcagcggattgccattatggcttgggacatttggcgatatgatgagcttattgcttactttttttattttgcttttatcaatggcgacttttgatgcaagaaagctaacagaagcagaggctagtataaaaggggcgatgagtatattagagggtggtattaaaatcgagcctagtaagaatagaataacactcccagcagatataaccattcccccagagtttgccgaagaagttagaatgatagagcaatccatcatagattttaatgaaatgccaaatgtatcgcaaggtcaagcaagtattatgggagatggggtaaatggatttataatcacactaccagcaaatatcgtatttgatgataatttccaaataaacgaagatagtagattatttctaaagcgaatcgcacaaatcgccacaaaaatgccaaaaaatacacaagttgaagtgctaggtaaatcaaatatatcaacagcccaaataaatttggatagagcctcaaatatcgcacttagcataggtagagctctttatagtttaaatattaatggtaataaaattaatatcataggaaaagaagataaaagtttagattctagtaaggagggcgaaataatcaatattagattctacgcaaaagatattcctatcgaaaaaacaaaaggtatattagatagataatgtttagatttatactagtttttatttgcgtgataaatatcgcctttggtgcactagatgaaaatgggaatctaataatggagggcgtcccaaataccaatatcgctccgctagattccccgcaaaatgccacgaatccgccgataaattcccccacaatcccaactgtaaatctctcgctctccgctccacaagagcccggcgatttagtaacgacgctaaatatcgtaattatcataacgcttttagttttggctccatcgctcgttcttgtgatgactagctttactaggattattatcgtgcttggatttttaaggacagcgatgggcacacagcaatcgccaccaacgcagattctagtatccctagcgttgattttaactttttttattatggagccagtggcaacggagggctatacaaatggcataaagccatatatcgcaaaggagattccatatgatgaggcgtttgtccgcacggtaaagccttttaaggaatttatgctaagaaatacgagggaaaaagatttagccctattttttagaatccgtaatttggaaaatccccaaacaatagaagatgtcccgctaaccgtgcttcttccggcatttatgataagtgagctaaaaacggcatttcaaattggattcttgctttacttgccatttttggtaattgatatggtggtaagctcactattaatggcacttggaatgatgatgttgccaccgattatgatttcattgccttttaagattctaatttttatattagtagatggatttaatttacttgtggggaatcttgtccatagttttaaataattttataaaaacatattgtatttataaagatttaatagtaaaatacgcaaatttaatctataaaatataaggaactattatgaaatttagcacaaaagcagtaataacagctgaaaatccaaacctaagcggcgaaacctcaagcgatgtaataagccccatacatttatccagcacttttgcaaaagccgattttgaaagcactacaggggggcacggatattcaagacttacaaatcccacaagagaagtaatagaaaataaattagcagctttagaaaatgcaaaatatgcgatttgttatgctagtggtcaagcagcggaatgtgttactttacttagctttttaaaatcaggcgatgaaatactatgttttgatgatatttatggtggcactaggcgattgctaagtaaggtttttgatagttttgatataaatgtaagatatattgatatgacgattatagaaaatgtagaatccgcaatcacaagtaaaacaaaggctatttggttagaatctccaacaaatccacttttgcagatttgcgatataaaagctat

SEQ ID NO: 947 - DNA, 24329 bp, synthetic construct
  source 1..24329: mol_type = other DNA
  misc_feature 1..24329: note = Synthetic
gccctcgcccggcagcgcgacaagatcgtcgccgacactcaggggaccgtgacgcagggtgccggtgccgacgatgccatggccgcgcaccgtgaagacccggtcgagcggaagcgcgcaccagccccggtcctcgtcgtcgtcctccgtggccagggcggccagggcatcggccagcgcctccacgccccgccccgtcggggcctctgtcgccacggcggcggcgcaggcgatgccgcgctccgccagcaggtttcgtgacgcttgctccacggccggaacccggtccggcgccttgtccgctcgggtgacggcgacgacggcccgccggagccccagaagcgccgcgatgtcggcgtgttcgatcgtctggggcatgacgccttcatcggccgcgacgcacagaagccccgcgtccagaccgccggcacccgcgatcatggtccgcacgaagcgctcatgccccggcatgtccacgaaggagagcatgatgccgccgcgccggacgtgcgcgaaaccaagcgtgatggaaaggccgcgccgaatctcctcctccagccgatcggtcgtcatgccggtcagggcgcccacaagcgaggtcttgccgtgatcgacgtgccccatgacgccgagaaggacgcgcgtcacgacaacgcctccgccaccgccgccgcgacggccggcaggtcggcgtcggccagggtacgtgcgtccagccatgccgcgccgtcgcgcacccgcgccaccaccggaggggaagcgcgccgcagagtccgcgcgacggcctcagcgtccgccaccgccagccgcaccgcgctggacggcagcgcccggtccggcagcgccccgccgcccacgtaggcctcgctgtccaccacatcggcccccgcaccggctggaagcatgccgcacaggcgccgcgcccgttgcgccaccgcgtccagaggctcggccatcatgcgcgcgacgggtggatgggcgccgtcctcgtacagccgaaggacggcgccgagggcggccagcgtcatcttgtcggggcgcagcgcgcgcagcaggggatgccgcctcatgcggtcgatgaggtcccggcggccgacggccaggccggcctgcggcccgcccagaagcttgtcgccgctgaaggtcaccacgtcgacgccggcggcgatgctgctcgcgaccgtcggctcatccggaatgccgaaggggccgaggtccatgagcgtgccgctgcccagatcctccatcaccggcacgccatgcccgcgcccgagcttcaccaggtccgccagcacgggcgcctcggtgaagccgacgatgcggtagttgctctggtggaccttcaggatcagccgcgtctcagggccgagcgcgttcgtgtagtcggctacgcgcgtccggttggtggtgccgacctccaccagccgcgcgccaccctgctggatgatatcgggaatgcggaacgagccgccgatctccaccagttcgccccgcgacaccacggcctcgccgcccgccgcgagcgccgacagcgccagcaggacggcggcggcgttgttgttgaccaccagcgcggcctccgcccccgtcagggtgcggatcgtgtcaaggatgccgtcatagcgggacccgcggcgcccgctctccaggtcgaactccaggttggagtatccggccgccacccccccaaccgccgccacggcctcgggcggaagcggggcccggccgagattggtgtggacaatgatcccggtggcgttgatgaccggctgcagcgcgcggcgcgcctccgccgcaagcctccgggcgacggcgtccatcaaggcggcgtcgtcgggcggatcacaggcgccgtcgacaagcgcccggcgcaggccgtccagttctgcccgcgcggcgcggaccgtggccggacggccatggcgggcgatgagcccctcaccctcggccagcaccagcagccggttgaccgacggcaggtgtcgcaggagcgcgtggttgtccttcggcatggcggcccggcccggtcctggaagcggctcctgtagaacgggcgcgccgccgcttcgggtccatcactttccggcatccccgaccgaagcggtgcgttgctggatcatggacagcgtcatcggcgtcatcatcatggctcaggaaagccgcttccgcctggtcgaccgcgccgaccgggcgtggcacttcatgctggccccggacgccaacgtcgagccccaggacctgccgcccctgttccgcgatggccgcgaagtgcatgtcgcctggtcgaacgcgccgggcgtaaccgccgccctcgcccatgacgtatccccccagccccacgagcaggaggcccccgcatgagccgcgaccgccgcaccccattcaaccgcgtcggggagttcctgaaccaatggtccgttccccgccagatgcgcggcgccgaccaccgcaccgacgccgcgcgcagccgcatgtccgagaccctgcgcccacggctggaggatgccgaccgtgtcggcaccagcatctgcccctactgcgcggtgggctgtgcgcagctggtctacgccagggacggccgcgcgatccacgtggagggcgatccgcgcagcccgatcaacgagggcacgctctgccccaagggctcggccaccatcggctggatgaacgcgccggaccggctgagcaaggtgctgcaccgggcgccgtactcggaccgctgggaggaaaaaccgctcgattgggccatggaccgcatcgcccacctcaccaggcagacccgcgacgaaaccttcgttgaggccctgccgggcggcgagacggtcaaccacacgctgggccttgcgtcgttgggcggcgcgacgctcgacaacgaggaaaactacgccatcaagaagctgttcggtggcggcctcggcatggtctggatcgagaaccaggcccgcgtctgacattccagctcggtgcccagtttgggtacctcctacggccgaggcgccgcgacactggcgcagtgggacctcgccaagtccgactgcgtggtgatcatgggctcgaacatggccgagaaccacccgatcgccttccgcttcgtcatgcaggcgaaggccaagggcgcggccgtggtccatgccgatccgcgcttcacccgcacttccgcgctggccgacatctatgcgccggtgcgcgcgggcagcgacatcgcgttcctgggcgggatcatccgctatctgctcgagaacgacgcctggttccgcgactacgcgctggcctacaccaacctgtccaccatcatccgggacgacttccaggggccggaggacctggacggcgtgttctcgggcttcgagccggacatgaaggcgtactttgtcgacagctggcagtacgagggcatggccgtgccctcgccccggtcggaacaccacccgcagacggaaatggatttcaccgcctgcgccgggcgcatgtcggagaaaccgccgcaccgcgacccgacgctgcggcatccgcagtgcgtctaccagatcatgcgccgccactatgcccgctacacgcccgagatggtggagcgcgtcaccggctgccgcaaggaaaccttcctgaagatctgcgagacgctggcgcgcaactcgggccgggagcgcacgagcgccttctgctacgccgtcggctggacgcaccactccaccggcgtgcagatcatccgcgccgccgccatcatccaggcgctgctgggcaacgtcgggcggccgggcggcggcattctggccctgcgcgggcattccagcatccagggcagcaccgacatcccgacgctctacaacatgctgcccggatacctggcacagcccaacgtcaacaagtcccacggcagcctggacgactacctgaagggcgaaaccccgcccaccggctggtggcacaacgagcccaagtacgtgataagcctgctgaaggcgtggtacggcgaccgggccaccgccgccaacgactacggcttcgactgggtgccgaagatcatcggcgaccactcgcaactgcccatgacgctggcgatccgtgacaatgtcatcaagggcatgttcctgctgggccagaacccggccatcggcggcagcaattcgcgccttgtgcagcgggggctggcggaactggattggctggtggtgcgcgacttcgccgaaacggagacggccgccttctggtaccagggctgtccggtgcgcgacggcgagttggcgccaagcgacatcaagaccgaggtgttcctcatgccggcctccatcgccggcgagaaggacggcaccttcaccaacacgcaccggctggtgcaatggcatgacaaggtggtcgacggccccggcgacagccggtccgaactgtggttcatccaccacctcgccaagcggctgaaggctctttacgccgacagccgggacgcccgcgaccgccccatccaggcgctcaactggccgtacccggaggtcgacgcgcggggcgagcccgacgtggaagccgtgttgaaggagatcaacggctacacctgcggcgacgagacacccgtcggcaccttcaaggacctgaaggacgacggctccaccgcctgcggctgctggatctattccggcgtctacccaaaggagggccacaaccaggcgcggtcgcgcaaggcggacggccccggcggccccggcacgcacctcggttgggcctttgcctggccggccaaccggcgcacgctctacaaccgggcgtcggccgacctggacggcaagccgtggtcggaggaaaagacgctggtgtggtgggacgccgacaaggaaagctggcagagccccgacgccatcgacttcgagccatcgaaggcccccggctaccagccggactggaaccagaagcctgagggcatggacgccctcgacggcggatcgccgttcatcatgacggccgacggcaaggccgccctgttcgtgccctcgggcctgaaggacgcgcccttgccgacgcactacgagccgatagaaagcccggtcctgaacccgctctacgcccagcagagcgtgcccaccgccaagcgctggaaccgcgaggacaatccctatcacgcgccggaggatgcgcagtatccgcacattctgaccacctaccggctgaccgagcaccactcgggcggcacgccgacgcggtcggtaccgtcgacggcggaactccagcccgaggggttctgcgagattccgccggaactggccgcccgccacgggctgaggacgggcgactgggtggtgctggagacgtcgcgcggggcggtcgagacgcgcgccctggtcaccagccggctgcggcccttcgagatcgacggccgggccgtgttccagatcgggatgccctggcacttcggctggcgcggctacgccacgggcgacgtcgccaacgtgctgacgtccatcgtcggcgacgccaacaccaccatgcacgaaaacaaggccctgacctgccgcctgcggccgggccgactgagcggaggccgccgatgacgcatgtccacccccgcgccgccgactatggacaaagcttcctggacggacccatcgacgacgagtccgaactgaccgccggcgtcaagatcgagccgggcaagagctacggcttcttcaccgacacgacgctctgcatcggctgcaaggcctgcgaggtggcgtgcaaggagtggaacgtgcttcccgccgaccatgccgagttcagcggcatgagctatgacaacacccgcgatctctcggcccacagctggcgccacgtcaccttcgccgagcgcatggaccccgacgaccgcccggatgaaatgccgccctaccagacggcgtggctcatgatgagcgacgtctgcaagcactgcgatccggcgccgtgcctggaaagctgccccacgggatcgctgttccgcacggagttcgacaccgtggtggtgcagcaggacatctgcaacggctgcggctactgcgtgccgtcctgccccttcggcgtcatcgacctcagcacgctggacggcaaggcgcacaagtgcacgctctgctacgaccgcctgaaaggcggccttgaaccggcgtgctccaaggcctgcccgacggactccatccagttcggcgagatcaccgagttgcatgaacgggcggataagcgcgtggagcagctcaaggacatgggacgggaggacgcctacctctacggcgcccccgacacgcccggcgcgaccggcgggatcgagaagttgaacgccttctttctgctcaccgacgcgcccgaggtctacaacctgccggccgcgcccagccgttccgccgaacgcctgaggccggcgctggcgacgggtctggccgccttcgccggggtggcggcggtcgcggcggtcctgctgggcggacgacggaaaggacgatgatgaactggaaacgaacgcggcgcatcggaaagactgagattccgcgctgggacggcgagacgtactacgacgtgccgccggtcaagccggtgccctgggattggaaggtcgccacctatgtctttcttggtggcgtcggtggcgcggcgcaggttctgggactgctggccgattggcgcaggccttctccgcgccccgctccgccgccggtgacgcgccgcgcccggtggctgggcgtgggcggcgtcacgctcggcgctccgctcatcatcgccgacctgaagacgccccgccgcttctacaacatgctgcggatcatccggccgacgtccggcatgtccatcgggtcgtggctgctcgcggccttcggcgcgtcgagcggccttgccctgctcgcacagctcacgggcttccgcaggaccgcccgcgccgcccaccttccggcggcgctcgcaggggcgggaatggcgacctacaccggcgcgctgttcggcgccaccagcacgccgcgctgggcggccgcgtccaacctgctggccgcgcggttcgggctttcgtccatggcggccggcgcggcggcgctgtcccttggcgagaggcacgggccgacctggcaggcgctggacacggtgagcctggtcgcgctctccgccgacaccgccctgtccttcggcgtccagaatgagcgccgggcggaaggcaccgacgcggcggaccggttcacgcgcgacgccgagttggcggcgaaggtcctgcacgtccttcctgtcgtgctgtacgccgccaacggcctgtcgcgccgcccgtcccccaccctttccacggtcgcgagcaccttggccattgcggcgagttggctgacgcgcgtcaacgagatgcgcggcgcccgggcttcggcgcggcggccagaggataccttccgccttgcccaaccgcccggcagcggagggcgtcggcaatgacggacgggaaagcgacccgcgaacgggccgtcgcggcactggaccgggcgctggataaatcgcccgatggcgcgaaggatgacctgacggacgccattcgcgccgtcgcggaactgagggacgatcgggtgaaacggtggcggcacaccggggcggcggacgatcgtcacggcctggatgccgtcaatgcgatcctcagcctgctcgccggcctggagtatccgcttgccggcataaagtggaagagggtcagcgaggcccgcgacagtttgaaaaagttgtcgtgacgcgccagtcaccgaacgcaccgccttgggcagacgtcggaccggtgtccgcgaaggcggtgcttcaatgatgagaccggcacataaggcgccgctgcaggaagcgcggcagcaaattttttgctacttcttcttatcggggtcttccttggcttttccaaccgcttcctgggttttaccctcgacctgatcggcctcgcccttgcgttcaaggtccttcttgtcggttgccttgccggccatttccttgccggtcccgatgatgtccttggctttgcccttgctgcgatcttcgtccattgggagctcctgttggcagtttcaagcggaacgccggcggaggataagcgattcgaagacgccgggctgaacgcggccgggatgaccgacggctcggcgaggcggccgaggtagatcaacacggcctcccctggcggtcggttgttcagcggcagccgccaaggatgatcaacgcttctgcccgaacagaggtccgccgcccgcctttggttgaagcggacgtcgtggcaggacaatcctgtggcagatgcgtgaaaaacccgccgctccctgcaacacaggcgtgaacaggcgcaccctccgcgcatctgggccgttgctggcacagaggcgggcgcaatctcgcttcgtcatcgtccgggcccaaacttgggcccggaacttttttatctggggggggccatgaacaggtgccgccatgaggatacctcgcagcatccttttctacgccttgtttcttgtcgtgggtttcggttgcctcggcctggtggagatggccgtggaggcggtctcgatcatccgctggggccggccgttcccgctcgactttgacatgccgcccatgacccccgacggggagcttggctttcggtaacacataccgcttcgaaagcgctctcttcggcaacaggacgccaccgggcggccgaaacaaccggaaggggcggagtcaatgaccgcccgcccgacgacgtcggtgtcatcctcggccggagaccgggaacgatccgacgtaactgcatgggcacttgatgcaaaatctttgctgcgcctgggacggcaagcctccgatcggcgccgagaggaggtcgcgcgggtgacccacggcatcgggcaaatctatctgcgccaaaacggcgcttatcttcgttcgcattcgagagaccgcgggcggaggctgtgccacctttcgcaccagcagaccggcagtccggccatgatcgtcaagaggtggcccaacgggcttcacctgttcttcatccttcgcggctcggtcatcccccgcatcatccggccgctcgccgcgaccatcggttaccggatcaggaccttcagccggcgagagtcgtcctgaaggtccttgcggaggcggtttaactccccgtgcagcgcgtcgtctgcgatccggggaaggatgtccttgaggcaggcggccacggccgaatgccgttccgccatgagagccaccgacgtcttgtggaatgcctcgggcctcatgtgccggctgccgtctctcgacagcttgaaacgccctctgaaccgcccaagctgccgccgcagcatcagccagtggcgcacgcgccggcgctcaaggccggcgaccgtggcactggccgtacccaggctttgctggcgccggcattgagcgagatgccggacatctgcccgcgcctcgcgctcaagatcgcaaagcagcgcgacaatctcgttcggctcagcgaagccggcataggacgaatgctcatgctcttgcagcatgcagggtgagcccgagacgtcgatgcgccaatcgttcgccaccatgatctgtcgcctcccttcagctgttgggccggcagctcttcgtccgcaaacgcgccggcatcagcctgacggcggcgggaaagcaaagtctagccggtgcgccgggctttgttcacctgtgggaacgcgcgaatcagcaggtggcgggtccgaccggccatcgagccgtgctcgccactcagccgtgacagccgaccatgcgcccgtgacgtcccgtcgaacgaccgtggcagtcgacggaagagccgtgacgcgctgtgcggaaggcgcgacagaggaagaagccggctgagagggcgccgaggagactgcgagcgcgaccggattgcagtatgcgaacatgaacggatccgattaaacaagcgcatccaggccgaacccggcaaaatagaaaatgacctcgcgcttgtcacctcaagttgttgcccacaccaacgtcgactgctaaaaatgttctccagccagcaaatcgcccggaggacaccgccatgcccgtcctgtcaccgctctccccgaacgcggcacaaggccggcgccgctggtcgctcgcgctggatatcggcgagggcagcatcggctgggcggtggcggaggtggacgccgagggccgggtcctccagctgaccggcaccggcgtcactctgttccccagcgcctggagcaacgagaacgggacctacgtcgcccacggcgccgccgaccgcgccgtgcgggggcaacaacagcgccacgacagccggcgccggcgcctggccgggctcgccaggctatgcgcgccggtgctggagcgctcgccggaagacctcaaggacctgacgcgcacgcccccgaaggcagacccgcgcgccattttcttccttcgcgccgatgccgcccgccggccgctggacgggccggagttgttccgcgttctgcaccacatggcggcccatcgcggcatccggctggcggagcttcaggaggtcgacccgccccctgaatcggatgccgacgacgccgcgcccgccgccaccgaggacgaggacggcacccgccgcgccgccgccgacgaacgcgccttccgccgcctgatggccgagcatatgcaccgccacggcacgcagcccacctgcggcgagatcatggccgggcgcctgcgcgaaacgcccgccggcgcccaacccgtcacccgcgcccgcgacggcctgcgcgtcggcggtggtgtcgccgtgcccacccgcgcgctgatcgagcaggagttcgacgccatccgcgccatccaggcgccccggcacccggacctgccgtgggacagcctgcgccggctggtgctggatcaggcgcccatcgccgtgccgccggccacgccctgcctgttcctggaggaactgcgccggcgcggcgagaccttccagggccgcaccatcacgcgcgaggccatcgaccgcggcctgaccgtggacccgctgatccaggccctgcgcattcgcgaaaccgtcggcaacctgcgcctgcacgagcgcatcaccgagcccgacgggcgccagcggtacgttccccgcgccatgcccgagttgggcctgagccacggggaactcaccgcgcccgagcgcgatacccttgtacgcgccctgatgcacgaccccgacggactggccgcgaaggacgggcgcatcccctacacccgcctgcgcaagctgatcggctacgacaactcgccggtctgcttcgcccaggagcgggatacctccggcggcggcattaccgtcaatcccaccgacccgctgatggcccggtggatcgacggctgggtcgatctgccgctgaaggcgcggtcgctctatgtgcgcgacgtggtggcgcgcggcgcggactccgccgccctcgcccgcctgctggccgaaggggctcacggcgtgccgccggtcgccgccgcggcggtgcccgccgccaccgccgcgatcctggaaagcgacatcatgcagccgggccgctacagcgtctgcccgtgggcggcggaggcgatcctggacgcctgggccaacgcgccgaccgaaggcttctacgacgtgacgcgcggcctgttcggcttcgcacccggcgaaatcgtgctggaggacctgcgccgcgcccggggcgcgctgctcgcccacctgccgcgcaccatggccgccgccagaacgccgaaccgcgccgcccagcagcgcggccccctgcccgcctatgaaagcgtcatcccgtcgcagctgatcaccagcctgcggcgcgcgcacaagggccgcgccgccgactggagcgccgccgaccccgaggagcgcaaccccttcctgcggacgtggacgggcaacgccgccaccgaccacatcctcaaccaggtgcgcaagacggccaacgaggtcatcaccaagtacggcaaccgccgcggctgggacccgctgcccagccgcatcaccgtggaactggcgcgcgaggccaagcacggcgtcatccgccgcaacgagatcgccaaggagaaccgcgagaacgaaggccgccggaagaaggagtccgccgcgctggataccttctgccaggacaacaccgtgtcgtggcaggcagggggcctgcccaaggagcgcgcggccctgcgcctgcgcctggcgcaacggcaggaattcttctgcccctactgcgcggagcggccgaagctccgcgccaccgacctgttctcccccgccgagaccgagatcgaccacgtcatcgagcggcgcatgggcggcgacgggccggacaacctggtgctcgcccacaaggactgcaacaacgccaagggcaagaagacgccgcacgagcacgccggcgacctgctcgacagcccggcgctcgccgccctgtggcaaggctggcggaaggagaacgccgaccgcctgaagggcaagggccacaaggcgcgcaccccgcgcgaggacaaggatttcatggaccgcgtcggctggcgcttcgaggaggacgcccgcgccaaggccgaggaaaaccaggagcgccggggccgccggatgctccacgacaccgcccgcgccacccgtctggcccgcctctacctggccgcggccgtcatgcccgaggacccggccgagatcggcgccccgcccgtggaaacaccgcccagccccgaggacccgacgggctacaccgccatctaccggaccatcagccgcgtgcagcccgtcaacgggtcggtcacccacatgctgcgccagcgccttctccagcgcgacaagaaccgcgactatcagacccaccacgcggaagacgcctgccttctgctgctggcggggccggcggtcgtccaggccttcaacaccgaggcagcgcaacacggcgccgacgcccccgacgaccgtccggtggacctcatgcccaccagcgacgcctaccatcagcaacgccgggcccgcgccctgggccgggtgccgctggccaccgtggatgcggcgctggccgacatcgtcatgcccgaaagcgaccgccaggaccccgagaccggccgggtccactggcgcctgacccgcgccgggcgcggcctgaagcgccgcatcgacgacctgacgcggaactgcgtcatcctttcccgcccgcgcaggcccagcgagaccggcacgccaggcgcgctgcacaacgccacccattacggccggcgcgagatcaccgtcgacggccggaccgacacggtggtcacccagcgcatgaacgcgcgcgacctggtggccctgctggacaacgcgaagatcgttccggccgcccgcctggacgccgccgcgccgggcgacaccatcctcaaggaaatctgcaccgagattgccgaccgccacgatcgcgtcgtcgaccccgagggcacccatgcgcggcgatggatttccgcgcggctggccgccctggtgcccgcccacgcggaggcggtggcgcgcgacatcgccgagcttgcggacctggacgccctggccgacgccgaccgcacgccggagcaggaagcccgccggagcgcactgcggcagtcgccctatctcggccgcgccatcagcgccaagaaggcagacggccgcgcccgcgcccgcgaacaggagattctcacgcgcgcgctgctagacccgcactggggcccgcgcggcctgcgccacctgatcatgcgggaggcgcgcgcgcccagcctcgtgcgcatccgcgccaacaagaccgacgccttcggccgcccggtgcccgacgcggcggtgtgggtgaagaccgacggcaacgccgtctcgcagttgtggcgcctcacctcggttgtcaccgacgacggccggcgtattccgctgcccaagcccatcgaaaagcgcatcgagatcagcaacctcgaatacgcccggctcaatggcctggacgagggcgcgggcgtcacgggtaacaacgccccgccgcgtcccctgcgccaggacatcgaccgcctgaccccgctgtggcgcgaccacggcaccgcccccggcggctacttgggcacggcagtgggagaactggaagacaaggctcgctcggcccttcgtggcaaagccatgcgccagacgctgaccgacgctggcatcacggccgaagcggggtggcggctggacagcgagggggcggtgtgtgacctagaggtcgcgaagggggacacggtgaaaaaggacggcaagacctacaaggtcggcgtcatcacgcaaggcattttcggcatgcccgtcgatgcggcgggaagcgcacccaggacgcctgaagactgcgagaagtttgaagagcagtatgggatcaagccgtggaaggcgaaggggattccattggcgtgaccgccgtacagtagcccggtccgttccaccgcgctggctttcgactgcccccggagaatgtcggaaatgccgtcctgtagcccggtccgttccaccgtgctagcttctcctcgtgctcgtgttcgtcgtcctcctccgtcctgtagcccggtccgttccaccgtgctagcttcgatgccagccgcatcagccgcatccgccgggtcctgtagcccggtccgttccaccgtgctagcttccggcgcgtcatcacgaacctcagcctgaacgtcctgtagcccggtccgttccaccgtgctagcttctgtcctctgctctgtattgttcatcggatcgtcctgtagcccggtccgttccaccgtgctagcttcgctgcgagcgatgctatgaacgctccggccgtcctgtagcccggtccgttccaccgtgctagcttcggacagctgctgcaccagctcgtcgcggtggtcctgtagcccggtccgttccaccgtgctagcttcgagggaagggaaggtgagaggagaggggaagtcctgtagcccggtccgttccaccgtgctagcttcctcgccggcgcggtcgctgtgtccaaaaccgtcctgtagcccggtccgttccaccgtgctagcttcccgctcccggatcaggtcgcgttcaaactggtcctgtagcccggtccgttccaccgtgctagcttctgggttccgggaagccgctgtttcggcaggggttttcccggccatcccgcgtcggcgaccacatcagaacatcttcagctggaccggccgcgcctgttccacgtcgggatcgggcgtgcggtagttgccgcggtggaggtgctcgatgcgcccccactggccgtcggtgaactcgatcatcagcatgtggcccgaggccggcatgccccgccgcacgcggtccttcgccgaggccactgcctgggtgctgccgcaaaagcggccgtatacggagaaattcacccgcacatagccctcgcgctccagcatcttgcggaagcgcgcttcctcgcgccgctgcttgggcgagccgacgggcatatcgtaggacaccatcagccacatggcgcgccaggcatcgggcattgctcgggctcccccagggattcgggaaggcgcaaatcgcgggcggaacggcggagaacgtcggcatggctgcggcaggtctccagaacggcgttgcgcaactgcatctcctgccccgacaggcggaccggatagccgcccaactccgccagccgcgccttgtgggcaggcgtcgggccgtcgtcgggggcctcgtccatgaggcggcgcacgaggcggtcgacggcggggcggtaaggctccatcaggtcgtcggccaggttgccgggattgtcggcaccgacgtgatggatgccgaaggccggatgcggccgagctatgaccgattgtgggtgacggcgtgatcaggcggcggcggaatggtcggcgtctttcacctggatgccgtcgcggaacctgacacccttgatcacctggggcaagcggttgttgcccgacaagcggcgccaggtcttgctggcctcggtgaccagcttgaagaccattgccagggcggtcttgtgcgacaggcaacccttggtgcgcacggtgcggtgccggacggtggcgaagacgctctcaatggggttgctggttctcacgtgctgccagtgctcggcggggaagtcgtagaaggccagcagggcgtggcggtacttcatcaggcagccgacggcttgggggtacttcgcgccatatttcgcctcgaaggtgtccatggctgcctcggcttcggtgcggccgtcggccatccagatggcgtggaggtcctccttggccgccttctgccgcgatttcggcagcttgttgaggacgttggccgtcttgtgcacccagcagcgctgatgacgggcgccgggaaagacctcgtcgagcgccttccagaagccgagcgcgccgtccccgaccgccagcttcggaccctgggcgaggccgcgccccttgatgtcgttcagcagttcccgccagctctgggtgctttcgcggaagccggcctggaacccgaccaactccttgcggccctccggcgtggcgccgatgataacgagaatgcattgcttctcgtcctccagccggccctggaggtagacgccgtcggcccagatgtagacgtactgccgggccgtcaggtcgcgcttgcgccagcgctcgtagtcggcctgccattccgtcttcaggcggctgatcacctgcggcgacaggcccgtcgcctccttgccaagcaacgcctccagggcgtcctggaaatcgccgctcgacaggccgcgcaggtagagggtcggcagtacggcgtcgatggaccgcgtgcgccgggcaaaccgtggcaggatggcggaggtgaagcgaatgcggtcttctccgtcggcaccgcgatcccgcaccttcggccgtcgcacgggaacagggccaatgcccgtcaggatctcgcgctccgggccgtggccgtgacggaccaggcggcgacggccgtctaccgtcgtcaggtgttcatgctcggcaagcacggcggcgatctcggcctccacggcttgcgccagaagttgtcgcgccccggaacgcaggatctcggtcagcgggtcgtcggtttcccctggctggcgcagggcgacaacggtatcgtcggtcatggcgtatcactccttcgctggagatatggaaggcgtaagacacctccacgatacgccacccccttttcaggtcatcacccagtttcggccatagctcgatgcggcccggcctcatgcagcgcgcgcagcaccatggcgcggaggatggcgtatccgtagtccagcaaggcgttggcgaccatcggctcgccgccccggcggaaccgggtgcccatgagggccggccagtagatttgcgcagccgtggcctcgtggttcttggggtctcccggctgaacaccgcgcgccaggcgccggagccgctccgccccggctccacccgccgaccggccgagggtctctgcctgcatcaacagcttggcctgaacgacgcgcttccacaggcgtcggcgcgtgtccgctcgcaaaagaacctgcgcccgcagaagcgccgcattgcggccggtgccgctgccctcggcggcagagacctccgcggccgggcggtgagcattgtcgcataccagaatgggtacgccgcaccgcgccaactccgcgagaacggcggacgaaagcgtggcgcgcggcgtctccagcacgaggcgggtgacctcatcgggcggaatgcgccatgggcgggccggtgacgcgtcgccaccgggcgcggttggcggcgtgatctcaagcaggccgttgtggatgcgcagccggcacccggcgttgcggatctctatgagcatggtccggtccccacggcttgtggtggaggggcttgaccccggcaaccgatgtctgctactcatattagcgatcacagggtgccattaccagagatggtagcacggtggaacggaccggcacctacaggacaagtgatcatacacgtgacagccgcctcccccgccccagtggccaaggggaggcggcttttctttctcgatagcccaactgtcgttcaggcgtggcgaggcacccttgcaggcgtcgtcgcacgtttctcgggcccacctgttcctaccctgcaccggccatcgggaactgtgtaccaggcctgcccacagaaccgccccgaagcgggatcagggccccgaggaaacgtccaggatcaccaccgagagtctcgcccgctggtcgtcggtcaggcgcgtcaacagcgcgtcgcgcagggcctccggcgctccgggccgggggaggccgccggggtggcgcggcacgggcgtctcggcgccgaaccagaagacgaggtagaggccttggccctgggtttccgggcccggcagtactggcggtcaagctgatccgatgccgccgtccagaggtcgtcatgctgctggcgcttgacctcgatcggcagcttgccgcaggaggggaggcgcagctgcaggtccgggcgcttctggccggcgacctgtaccttgcgatccaccgtaacgtcaaagggacgcagacggtccgtcaggtgggtgccaagggtgttccggcacgccccttcgaccttcggatccgtcggccgaccatggctgtcgaggttccagaagtcgtgccagccatccatcgcgccggagcgataccgggactgaaggtcggcgagaaggtcgaccaggaatgcccgaagatcgggcaccgacgccggcgcaccgccgccgatggcgggcgacggcgggcaggttgggtggggcaaaggcggcatagtgaagctcgttcttcagcctccctcgctttccatagtaagccttcaatcgcgtcctcgaaatagtttccggacagcgtccggaagccccaagagcccagagcttcatgcgggccgggaatctctgcaggctgctcttcaatatcctcaagacccaatacgcggggcacctccgaccttgtcagcgcccttgaccattatggcaaactgtcgcggcagatgcccggcgcgccgttgcgggtcgtctacacgaagtcggggaagcgggacgccgacgtggtggtggttcacctgctgtactggcacgaggtccgcaccgaagaggaggggctctatctctgtgggattttgaacagcgaatacatgcgatcccgcgtgcaacatctacaaagcaggggcgtagggggagcgcgccacttcgacaaggtcctgttttcgttatcattcccgctttggcgcgatttaccgagacagagggacgtggcacgcctggcggcgacggcggagcacgtcgccgcctctgttccgctcgaacccgccagctttaccgcgcgccggcgcgcgatccgcgcggctcttgaagcagacggtgtcgcccaggcggtggagacggcagtggagcggctgctggccgaatagcgaggagccctgcttgaccaaatcacaggtcgcagaacacttgaaatcgcgccccaaggccgccgccagtgccgccgccgaggccaagccgggcagcctgaagcgcggcgaggcgaccctgaccatcaaccccgccgtcggccggccctcggccgccgcagaggcacccctcaccgtctccggcctccaccccgacgccgacggctcctggaccgtcgacaaagtcacgcacaccttcgacgcccagggcctgaagagcatggtcgagcccgacacgaaataagccccgccggtgggcggggctcatgctcttggacatcgtgaagttcactgcggcgagtaggacgtcatggagacggaggccagcaggtccgccgcctcgatctgccaagtggcgttggccagcggcgtttcgccgtcaatgccgaactgatcggaggcatagtccgctacgaccatgtaatcgcccttcggcccgtccaggacggtggccgaggccaattggggatgcttgtcgttgtagaggtcaagggcggcctgcatggccgtatgggcgagcttacgctccgcttacccgcccctggcgcgcgctccacggcggaaacacgaaaaaacccgccgtcgcgaggagggcgggctttcttgacatgttggttgcgggggcctgatttggccgacgtttgtcagctttcattcagctgtttctcaccggtattcctcttgccgttcttctacctgacggggtcatacttagatggtcgccccccggcggcaaggcataccagccgccgggagaatcctccgccggcgcgccctacaggatgaagacctcctcccccaggctggacggaccggccatgtcgaccaccagatcgggcagtccgtcgccgtccacgtcgccttccagccggccggcgctgaaccgcaactcgcccgccgtgccgctgaacgccgtgccgtcgatgtaggtaaaggcatcgtcttccgaggtgcccgcattcgcgtcgatcctgacgaggtccaggctgtcctctgcggcggtgaagtcgctgatgatgtcgatgtgcccgagatcccattgcgtgaactcgaactcatcagcccccggcccgcccgagaggctgtccgggccgccgccgcccatcagcgtgtcattgccctccccgcctgaaagatcgtcgatgtccgccccaccgtacaggcggtcgtcgcccgcgccgcccacgagcacgtcgtcgccggcctcgccgcgcagcacgttggcaccggccgtgccgaggatcgtgttcggctgggcgttgccgttgccgacctccgccgcgcctctcagcgtcatgtcctccacgttgtccgaaagcgtccagtccacccagctttccaccgtgtcgtgcccgccaccggaaagctcggcgacggtgtgggcggggtcgacgattcgatagacgtcgtcgccgctggtgcccgggatggtcagcgcctccagccccacgatgggcagcacggcgaggtcgaaggtcccgagcccgtccaggttgaccaggaaattggccgttccgccgccatcgacatccgccgacagctccccggcctccatccgcatctccccggcggaaccggagaacgcggcggcaccgatccaggtgaaggcctgcgcgttcgcttgtgtcgtgtcggcatcgatccgcgagacgtcgagcgtgtcctgcatggggtcaaagcccagcaccgtcgcgggatcgtagggcgtgctgtggctggtgtccgaccagacgaaggtgtccggccactccgtcgccgtgtaggtgacgccgcccgtcgacgtgccgctgtcaccgtcccccacgtagcccggcacctcggccagaaggtccatggtggtgccgtcgcccaggaaccggaccgtctcgatcccgtccagcaggtggtcgttgaaccagacctggttggccgtggttccgaggcggataatgtagtccgcgcgcacgccccacatcatggcggtgtcggtgcccgcgccgccgatgagctgatcgtcgccccagtcgtcgccggtgccggcatacagcgtgtcgtcgccgccgtagccgtacaccgtgtcatgcccgccgcgcgggtcgatgacgttggcattgtcggtgccatagaccaggtcctggcgcttggagccgatgacggtttcaaagccgatggcgttgtgggtcatgtcggtgggcgcgccccaggtctcgccctcggagttgatggacaggacggacgacatgttgtcggtgtccggattgcgctccgaccgatcgaccagcactgaattgtgatgatcccgcccgccgtgaaagttgatgtcccggttggtggaaaggacctcgaccctgttgttgacgttgctgtaccacgacccgaagacgaaggaatgccgcatgtccaggtccgtcaggccggtgaaggcgctttcgtagacgctcttcagctcgaaggcatagccgttgccgcccgcgcccttgttgtgcgcgccctcggcatgcagcgcgtcggccgtgatgccgctgctgtgcaggaacacgaaggcgttgctggccgcgtcgtgcaccgcgatgtccgagagcttggcgcccaccgtccactccagttcaacagcgcggtcgcgatgatgctcggtgaccgtgttctcgaacaggccggcatccgcctccccaaggctgtactgcatggagaacccggacagcgcgacgttctccgccggatcgaccttgtagacggtcgtctccgccgccggcaggtcgaagtggaggccgcccgtcagggtgacgcccgtctcggtgacggcgtccacctggacgaggctggtgcgcagcggcttgtcctgctgccacagcgtatccccgatggagtccaggtattccggcgtattggcggcctccagccacagccagtcgccggccgccagaccatgccccggtgccagcgccagcgccgtgtcccacagtgccgcgtcggccgtgacggcgatgtccgtcgccgcatggcttccgagcaccgagatcgcatcacccgtccacccggccgtcacggagatcacggtgctgtccgatcccgcgccgacgatcgaaacatcatcacgggcgatcaccagcggcgcgtccagggtgtaggtgcccgcagccagcgtgatggtggagccgtcgggcaccgtctccagcagcccgcgcacctccgcgatggaggccgccgcgtaggtgcctccgccgccgggatcgggcgggtcgccaccgccgatggtggacaggtcgacggtggcatcgtcgaaccgcgccgtctcgacgttccgcagggcgtggccgccgaccaagacctctcccgccgccgcgccggccgagatgtcatacgacgcccgcgcgccctggaacacggccacgtcggacccggcgccgccgtccagggtgtcggcgccgggggtgaggccggttccggcgtagagcgtgtcgttgccgccatgggcgtagacggtgtcgcccgccccgccgccgtccaggatgtcgtcgccctccgtcccgtgggtcaggtccgcgccctcccctcccgtcacccggttgaaggacagcgtgttggcggagggatcggtcggggcggtggtggcgtcgccgctttcgttgacggaatagacggggctgccgtcgtcggtcgcggggtcgcgctccgatgtctggacggtgatggcgttcccctggtcgcgcccgcccaggaactggatgtcgcggttcgtgaacgacaggtcgaaggtgctgccgacggtggcgccctcgcggtcgaaggtgagcgagtgcttcatgtccaggtcggtcaggccggtgaagcggctgtcgtgcaccgcgtcggccagccaggcgaagccgttgtcgcccgcgcccttgttgtggctgccctcggcaaggaggccctcggccgcaataccgctgctgtgggcgaaggcgaaggcattgctgaccgcgtcatgcaccgcgatgtcggagaccgtggcggccgccgtccactccaaccgcacggcgctgtcgccaaggtgggccggcagggtgttcgtgaaggcggccggatcggcctcgcccagcgggtactggatggaaaagcccgacagggtcacgtccgaggccggatcgacggcgaacatcgtggtttccgccgccggaaagtcgaaatgaagggcggtttcgagcaacacgccgcccggcaccacctccttcacctgcaccagcgcggtgcgaaggggctccgtcagtgaaaggtcggccggcggcggaccgccgtagaccgcttccagataggcgtcggtgttttccgcctcgatccagacccagtcgccggcggacaggccatgcccctccgccaggctgagggcgctgtcgccgtcccgcgcatcggcatcaaggaccgcggcgagcggcgcctccgtgcggctgccggccaccgtgatcgcatcgcccgtccagcccgaggcatagaagacctcgaacaccgtcttatccgaaccgctgccgatgatggcgatgtcatcgcgggcgatggtgatgggcgcatccagactgtaggcgcccggcttcaattggatggtcgagccctccggcaccgtgtcgatgaggcgctgaaggtccgaactcgtcgatccggaccgaaggctgaaggtcgtcttgccggtgatttttcccgggggcattttctggtccctcccttgccgctggcggccgagccgttcggtccgcgacagggacgcaagaccctgtccgctggcgagcggccgccgaaaacagacatgcacgtgacgcagcgaagcccggtcgtaccgcacggcaacaggctcggacccatcggtgatgagtcagacgaacgccgcccttcagcagactctcggaatccagacgctgcctttttgctcgacgctaaaagtgaagccgcagccccgactggctgaacaggcccagccatcccccgac

SEQ ID NO: 948 - DNA, 24149 bp, synthetic construct
  misc_feature 1..24149: note = Synthetic
  source 1..24149: mol_type = other DNA
tgtataagacaattgagctcctaaacacagaaggtctcctttgatacttcccaccccactagctccagacattctcaaacttgttgaaatcaataacacagctcctgagaatcctagagctaccccaattgcctttttaggagtgattggttctttcaaaatcaaagcagaaagtatcaaagcaaagatgggcattgtggtagttatgatgccagcattgatgggagaagtgaagcttaagcctatggtatagcaacattgattacaaattaagcccaagacagcagctaacataaaaaggaaaatgtcttttctgcacacattctctttctgaacaaataaagaagcaagccaaaagagtgtcgctcctcctagaatacggaacatcactaatgctactccatttataccattgtccattgcatctttacctaaaggggccattaaaccccaaaatgttgcagcgcctaacaaactaaggtgcgcaaaaagaggttgctttgtattttgattcatatttgttctgttcattaatatattaacctcgaaagatgaaccttttacttctgaatactgacttcattcacatttaaatataatagtatagcttttcgcctacaatagcattgttattaagatgtaattccacttcttttagaatgcaatatcacagcattttactttaaccatcatcttatttaaattacatctgttacacttaaaagtcagaaattcaagcaaattagctcacaattcacatcaataaaaaaaggaattatgccttttcgtgacacaattcctttctaatttgttgggtggtagatgggactcgaacccacgacattcagaaccacaatctgacgctctaaccaactgaactacaaccaccatgtaaatgcttccttgttgaaagcgagtgcaaagttaagggatttacttgaaactaccaaataaatccctatattttttataaaatttctattttgcaggtgttttaggtgcctgttgagttgcttgaggagcaacatcaccagttgcaggagttgttgttggtgttgaagttgcaccaaatcctggagttgtatttggatttgttgcaggcgcttcagtagacattttttccacagcactctcttctgttgcagctttaggtgctacataagcacatattacgctaagaactaccatagaaacagctaaaatccaagttgttttttctactacatctgttgttttacgcactcccataatagagttgctagatgagaagttagaagctagacctccacctttagattcttgtatcaatacaatagcaatcataaagaaagaagctaacaggattaggataataaataatgtgtacatcttttgtttgtttatttatttttattattaagtatcaatttctctaagaaacgtaattgatctgcaaagtaaacatttttttttggataattcaaatataaacgcttaattatttcaattgcacgttcatattgtccttgttttatgtatatttttgcaagagtttcggtgagataaccttcttctgagagtggtttagtctcgtcattaccctctaattgagggatatattcaggttcatctttcagttgaatgcgtccaggttctttgttgataaagttatctatcaagctttgtcccttcataatcgactcgccttctttcttatttttttcctcctcgctttctatttctaaaagatatgaaacataatcaactgcagcatcagcaggagttggttttctttgaggttcttttttctcctcttcttcaggaatagactctaagaaagtgtcgataagactaatcgttctgttatcgtcttgaatagcctcttcttggttacttaccaacttagactctttctttaaacgataatgagcagcctcaaccaattcaaaaagaacttttttatctgttagatatatagcagaacgacgcaattcttcatcaaaagaagaatcatgaagaatgtaaaggtttttcaacatcaacaaacgagcaggctggtaataaggataaatggcaagaaaactgcgtaaatcatacagcgtttccctactcattgtttccggatgctctattaaataactaatatccattattcaatttcttctttctttattaccaattagccactgtagcattgaaaatttgctcggttaagtctttcaccatctgtgtaactagctcctcttgaacagaacttaggttacgagttgtttcgtaagactgtgacgcagtgaattgacgttcaaagtcttcgctgtgatttttattattgataaaacgaacattcacagtgatagaaagttcagtttgagccgaataaccttcacttgaaaccgatttattacgttgtgaatattgcgtaatctctccatctatcttcaaatctccgtttcttttcacttgaacgagacgtgtatggttagcataaatatcctttaattcattgttaaagatagacgccattggtccccatacataggttgaacgaatgggaaaatcgttaatttgaatggttcttgtctttgtataatcaatacttgcaccattaaatttataagaaacagaacatgcgaacaataagacacaagttaataataagggaagaagagcaaaagctactcctcttaaacctttagttctgtttatattattcttcatcaagtccatattgtcttattcttctatataaagttctatcagaaatgcccaaatctcttgctgctttctttctgtttcctccattcttttcaagggcctccactaccattttacgctcaaaatcgttcagatttaagcttttaggttctgcaatttcttctgcttcagcatctacgattggcaaaggattcaaagtcacggcatggtgccttaccacaggatgcacctcaggagcaggaagatgttcatcatcattagcgacgcttgaaagctttgcattaaatcctccaacgctatttaggtgttgcgcttcatctaattgcttacgcaaattagccatttcttggcgcaaatcactcacatttccacgtagttcgtaaagaatcttatataagatctcacgttcactttcatacgagtgagaaccatttttcgatattggagctagctctgtgctttcaggatcctctggaatgaattgagctaaagccttagcatcaatttctctttcagtactaagcacagacatttgctctgttatgtttttaagttgccttacatttcctggccacttataacgcaacatcattgcctttgcatcttctgtcaatgttattttaggcaaatgataggtttctgccatctgcattgcaaacaaacggaagagtaaaagaatatcatttcctcggtctcttaatggtggaatttgaataggaatggtgtttaagcgataataaaggtcttctctgaatcgtccttcactaattgctttacgcatatttacattagttgcagcaactatgcgcacatcggtttttaatattttttgccctcctacttttatatactcacctgtttcaagaactctcaacaatcgagcttgagtagcaatgggcaactctcccacttcatctaagaaaatagtacccttatttgcgataccaaaatagccttcactttcggcaattgcgcctgtaaaagagcccttttcgtgtccaaaaagttcgctatctattgtaccttcaggtatcgatccacagttaattgcaaaatatttctctctgcgcctcgttgaattatcatgaataatgcgtggaataatttccttacccacaccactttcaccaataataagcacagaaagatcggtagatgcaacctgcaaagccacatctatagccctatttaagccatcactattaccaacaacattatagcgttgttttatattttgcaaatctgaagtgttcattttgtcacaaaattacgcattttatttgaattagagatttagagtataagtctttttctcttttttaagagaagaaattttaactatgttcacatatatgaatataaacacctacccatacttcattatgaaatcgaatctaaatcaccaaagaaagttctatcctaacaatattcctatagaaagcaacaagccataaataaagatgtttcgggccgttttccccaatactttatttaattcttttcctttatcaatggtcttcatttcaagaaaagtagatatatgaaaaggcaaaaacaatagtggtaaaagacaagccatgaggtttgaatggataagaaacaaacctccaagtaataaaaccgctactcctattccacaatataaaaacaatgtatttttcttaccaatgtaaaccaccagtgttttctttcctgcagccttgtcattatctatatctctaaagttatttacaattaaaagtaaatctattaccattccacaattaatcgcagaaataactacatcaagattaaatatcgtagagccaggtagggcaactagataatatgtacccaaaactggaaccaatccaaagaatagtaagacaagaacatcacccaatccccaataagatagatgtgttgtatataggaaacagaacgcaacacaagccaatccaagaagaataagctgataacctccaaagaaaatgagaggaaatccaattgcacttgctataattgtggttagaattattgcacgaaacatactcttaggctttatccatccttgggcacaagcacgcctagggcctaatcgagtttcgttatcattacctcgtttaaaatcgaaataatcattaataaaattcgcatcaatctgcattacaatcgcaaatgcaaaacaaagaaccagtggtaatatatttatatcgttccctccatgcacaaaagcccacgcagcagcaatgcaaacgggaattattgcactgattaaagttttgggacgagtggcaagtagccatgctttccaagagttctctgctattctctgttccataatattgcaaaaataaacatttaattgtatatttgcaaaataataacagcagatttatgagcagtagagaggtaaacttagagctaatgtcatttgtagaaaccaatattcttccacaatataataacattgaatctcaccatggattaagtaaaattctaaacataataaaacagagtttacagcttgcaagaatcacagcagcagatattaacatggcttatactattgctgcgtaccatgatttaggactaaatggtcctaaagcaatacaccacatcacaggaggaaaaatactatcgaaagacgctcgtttgttaaattggttctcaaaagaacagattacaaccatgaaagaggccattgaagaccacagagcatcgatggctcatgctccaagaagtatatatggttgtataattgcagagtctgtgcgagatttaagtctggaaacggtatttaaagacactataactgcaattcgtcaacaatatcccaactctacaaaagaagaggtgtttagatatttcaaaaaacatatcactgccaaatattctgttaatggctacattcgtttatggattcccaactctaataacgcaaagggactaagcgaaataagacgcgttattgaatcggaagtagaacttcagaaaacttttaatcactactttgatttataaaccctaaacagcaaaacgaaatagcattgactttgagatgtaataccaatgcttttagaatacaaacccagtgagtttataatacaaaaagatgctttttaaaggataaaggcaagccttctacgaagaaagagaatacaaatatttttctaatatatctacaaaagaaaagagcttgatatgtatttatcaagctcttttactttattaatcttgttcgggagtaataagtttgtatcccttaccatgaatattaatgatttctatttgatcatcatccttcaaatgcttacgcaatttggtaatataaacgtccattgaacgagcattgaaataattatcgtcaatccaaatagtcttcaaagcaaagtcacgttgcaaaatttcgtttgcatgtgagcaaagtaaagccaacaattcattttcttttgtagtaagctttgtttgcttatcaccaatagttagcaattgcttttgtgtatcgaaagtaaatctaccgatgttatacaatgtactttctttgtttttcttgccatgtacacgacgtagaattgcttcaatacggaataccaactcttccattgagaatggtttggtgatataatcgtctgcaccaatcttgaaaccttctaagatatcctcctttaatgtctttgcagtaaggaaaataataggcatttctgcattcgattgtcttatctcttgtgctagagtgaaaccatctttcttaggcatcatcacgtcaagcacgcaaatatcaaacttacttttcaaaaattctttatatccagcttcaccatctgggcaaagagttgctgcgtaaccttttgcttgtagatattctctaagcaacattcctaggttttcatcgtcttcacacaataggatttttaatttgtcttccataatttttaatttttaattattggtaatttaattgtaaatgtcgttccctttccatattcactttcaacggttatttcaccaccattgatgtctacaatctgcttaacgtatgcaagtcctaatccaaagcctttcacgtcgtgcacgttgcctgtgtgaacacggtagaatttatcaaatatttttttgagattatctctctttattcctagaccagtatctcttattgagagcataatggcatcttcttcattccaagtcttcaagaatacatcgagcggagtatcgggtttacgatatttaaccgcattatctagaagattgaaaattacgttttggaagtgcatttcatcaacatatactgttgaatcaaccgcctctacctctgtatatatctttcctcctgtatgctctacacgtagagtaaaagtgtttgcaatattataaaccatctcatttaaatccaattctttagatttatagatagctctattcttgtcaaacatagacatctgaagtactttctcaaccaaaaagcgtagtcgtttcgactcatcattaatcacagtccctatgtgttttagcataagtggacttttacctatcgactcatcattaagcatttgcgctgcaagtgaaatactcgaaatcggcgttttcaactcgtgagtcatattattgataaagtcgttcttcaattcagtgtactttttctgcctgaatatgatgactatcgtaaatataaatgtgattaatagtaccacagtaaatatcaacgatggaattacaaaccacacagaagagtaaatatacttatccatttctgggaaatgaatacgcacaatacctatctttgcctgtggatcattcctaaacagaacttgagaatagctatattcttcacccgcatcactgtagtctgggcatcgatatacttctcgtccgtcttgagttgaaacaatgaaatgataaggaatatctattccataattcattaattcagctttaaggtcttgatctagaagcttaaagttaattctttccttcaacggtttctcggaagcagaataaagtattgaataaacaacctcgtcaagtaagcctttctgataaatgtatctactctttactaattcctgaaacgaccttgatgcctctgttatagaattcttatctctacccaaaatcattcccttaggaatttttgaggggcgtattgttatcgtctttaactcgaatgaagaataaactgttccgtctttgcctgtaaccgagtactgatgagaatgctgaatggcttttcctcctttcttagatatcgcatttatcgaatctcgaataaaggccttacgctctgtttcgtttatatctttttcaagataacgcaacgtttcattgagttctaaattctttgaggcttgatataaagcacgattcaccgattcgttgaattgctctttcttcatttgcaccattcgttgcatatattgcaactgcaaaaagagtagtgcaaggaaagaaaatcccatgataactgctattattcctatcgtcctctttttcatattggcaaatatacgacaaagagtaacactttaacaacataacgttaataaaatgctttatattttattctattaacaaaatatagaaatttaatttcaaatatataattatctattttataaaagctctatttaaagagataaagaaatccaattagacatcattttctctccttgaagcgtcaaaatactctcaggatgaaattgtattccacatatattataataggtatgctgcaatcccattataatatgattatcggttttggcagtaatttttaaagagttaggaagattttcgctatcaacagcccaactatgataacgccctacgggtatttttgatggcaattcacgaaaaagaacattgctattatcaaccgaaagcattgaagttataccatgaaagacatcatttaaattatataattgggctccaaagtattgcgcaatagcttgatgccccaaacaaataccaagaattgacttcgtttgagcatacttttctaataaagaagtaatatttggataatctaaaggcaaaccaggaccaggaccaataatgagtttttgataattatctaaaagatttatatctaaagaaagactatcaaatacatctacccaactccccgtttgttcaattaaatgtttgatgttataggtaaatgagtcatgattatctattaaagcaatgtttttcattctttcaacagccgtctatcttgctaacaactgttgtaaagattgtagcttttcaatatcctttaaaccttcttctgtttcaatttcagcatctgcattcaatcccaaaaaagcttcattctttattccttttaaggcatttactacgctttcttcagcagctccaccaacaaagaaaggaagagaagatgtaaagttattcaaagcctcaactgtttttgaaatctcctgagatactaataaactgggattgagtttgaaaaatatcatatcggcatgaccttcaaaaggcaaagccttatcgagatcatcgtaagaatttacctctattgtttttataacgtctaaagatggagcaatatcaccaataactgtagtttttagattgtcgatcatcactgtattttcatcaccatttagttgaactccattaagtttaaagttataaatgcgtgtgattatgctttgaggcatatcgtctttaaatactccaaagaccttaacattggcaaaagatagaatgtctttatttttctttatggcatcaacttgaagagaactgtagtctggctgtattccactattagaagaatacatctttacaaaacgtggattccctttttcaaagttcaatccaatcattgcaactccttgttctatcacggcacgaatattctctttttcgtatactccgcacacctttaatatcataaaaacgttattttgtcctttgaattttacttacttttatctctaccaataatgatattaatgcaaagatatagtgtttattctaaaataaagagaattaatgtaagatttttaaggatggagatgataatcaaagaggtaatttcaataatattatataaacaaattacacttaaaatattcaattataatcaataaagttttgtgactaatttgtacccatttgttactcattagacataaaaaagcccaccgttaaggtcgatgggcaaacctaatgttttcacaacagaataatctttattgttacttgcttaaatttagtgatgcaaatatagtaacttttttcataagtcaatcacattttatcaataaattttcatatttttgtaaataaataaacaaaacaacaatctatgaaaagaatattaggcctagacttaggcacagcaagtgttggttgggcagtcgttaatgaagccgaaaacagtgaagaacaatctagcataaccgctttaggttcacgtgtagtactactctctgcagatgaaaaaaataactttcttacgggtaaatctgtaagtgcaacagcaacaagaactgcaaaacgtggtgctcgtcgtaacttacaacgctataaattgcgtcgtgaatggttaaaagatgcattggtatcttcaggtatcatcaatgagaatacatgcttaaacgacagcaatagtaaagaattatttgcaacttatgttagtagagcaaaagctgttacagagcaaattgcattagaagactttgctaaggttctctttatgattaataaaaagcgtggatataaaagcaacagaaagaccgataatacagaaagtgaggacggacaaattattgatggattagatcttgcaaagaaattaaaagcaagaaacatcactcccggtcaatacttacttgaattattcaaagaaaataagaagaataaggctgtattctacaggtcagacttacaagaagaacttaatcgaatatgggcctttcaatctcaattctatcctgaaatacttgataacaccttgttatcagccattacaaacaaatctaagaaagctgtaataggattattcaagggtataaaaaatgttgagattgccgacgttaagacaaaagaaagaacagaaaaagcacttacttggagaagtgaagctttacataaacaactagaaattggagaagttgcttatgcaatagcagaagtgatgggagctatttcacaaagtagcgcacgcttagcgttacttagcgacaatagtaaacatctcgaattcgaaggtttaacaataggacaatatcttcttaatcttttaagaaacaatcctaattcatctctcaagaatatcaatttttatcgcaaagactacgaagacgagtttaatagcatatggaataaacaagcttcattctatcctcaactaacagaaagcttgcgttctaccatctttaatagtatttttatgcagcgtaaccttaagagttgcaaagctcttttggcaaattgtgagcttgaatttgctgaaaagaaaatcactttacctgaaggctcgtgtcaaacaagaactatatatagtaaggtgtgtcctaagagttcaccctatttccaagaatttcagatatggcaaagccttagtaatataagaattatcgataaagagaacacacatctaactaaagggcaagaattatcttacgaccaaaaggtgatgcttttacctgaattgatgattcattctgaattaaaagccaataaagttattgagattttatttggcaagaagagcaattataccattaatatgccttctattaaaggaaataggaccaatgaaaccatattcaatgctcttttagaaatagtagaattaacaggccactcaatagataatatagtaaagacagatgctaatcagcaaatagaaactgttaaaaatatatttgataatttaggatataaaacaaacttcattacatttgatagtacaattgagggcaaagacgggcttaatcagccttactataaactatggcatctgctttattcatactgtggagataactctaaaacaggaaacgaagctttaattagaaagattgaagagcttactggactagaaaaagaagaagcaaaggtactttcaaattgcacttttgagaatgattatgcaagccttagtaccaaagcaatacgcaaactcctcccccatttgcaaagtaatttagactattctgaggcttgtgaggctgcaggatataaccattctaaacgttctagaaccaaagaagacataaagaataagacctataaggatgagctagacttacttccacgaaacagtttgcgtaatccaattgttgaaaagattcttaatcagatgattcatgtcatcaaccaaacaagcgaggcgtatggaaaacctgacgaaatacgcatcgaaatggcacgagaaattaagaaaaataagattcaaagagaaaaacttgctaatcaattaagacagaacactgccgaattagaacgcataaaggatattcttcgcaaagatttcaaactctcacatatcagccataatgatattcttcgctaccgtctgtatgaagaattatcactaaacgggtataaaaccctctactcaaatacttatattgagagacaacaaatccttgatcccacagtaacaattgagcatatcgttcctaaagcacttgcatttgatgattctttttcaaataaaactctagaaattcaatctgtaaatggtgaaaaaagcaatcaaactgcattcgacttcatttcaaagaagtatggttctgaagctcttgaacaatatattaatcgagtaaataatctttttgagaatggaaaaatctcaaagaccaaacgtgataatctattaagaaagcaagaagatataccctcagacttcttaaatcgtgatcttagaaatactgaatatattgcaaagaaggcactagaaattctcgaagactatgttcctagagttactccaacaataggagaaattaccaaaacattgagagaagactggcaattagttaatattatgagagaacttaattgggagaaatataattctcttggcttaactagcttctattacgacagaaatggaacaaaaattgggctcattcataattggactaaacgcaatgaccatcgtcatcacgcaatggatgcactcactattgcctttacaaagcccagtattatccaatatttgaacaatcttaagtctcaaaacgataaaggaagtagcatttatgcaattcaagcaaaagaaacttatattgatgaaacaagaaaacgtttaatcaaaccaccttatgatattaagcaatttcgcaatgatgctaagcaaatgcttgataatatatttgtttctcacaaggctaaaaacaaggttgttacaccaaatacaattgtaacaaagaaaaaaagaaaagcaggaaaagaaactaaagcagaaaaaaagcgtactttcttaactccaagaggggcattaagtaatgaaactgtgtatcgaaagatttgcaattatgaaacaaaagaaataactattaatagcaaacttacatacgagattgctctaaccatagctaaaaagaaagaaagagaagctgtattagaacgtttagctcaacacaataacaatccaacaacagcattcaagaattataataaaaatccaataatgttacaaacatcggttggagaaaaacctttaatgtctgtaaagattgtcaactacaaagaattatttgtaaaacgtagtgaaatcaacgagaaactagatattaaacgagtattagatgcaaaggtcagagcacgcttaacagatcgtttaaaagaatataataatgatccaaaggctgcatttgcaaatcttgaagaaaatccaatatggctaaatgaagaaaaaggtattgctcttaaacatgtaactacaattgaacgtgttgtgggtttacctattcgtcctaagcgaaatatcaacggagagattatgaaagacgagcaaggacaacctctaaagagtcattatgttgctacaggcggtaatcatcacgttgcaatatacgaagatgaagaaggtaaatggcacgaaaaagtggtttcatttaacgaagccgcaagccgtgcaatacaaaaatttccaatcatagataaagactttaataaagaactaggttgggttttccaatttacaatgaagcaaaacgaaatgtttgtattccctgataaagagtcaggtttcgatcctttagctatcgacctcaaagatcctgcaaacaaatccctcatcagtaaacacctttataggatacaaaaaatctctagtggagactattatttccgccatcaccttgaaactaatgttgaagaaaataaggaagtcaagggaattacatggaaaagaattcgttctgtatcttccctacaaggcattataaaagtaagagtcaaccatattggtcaaattatagatgttggagaatactgataaaataaacaaatcataataaattctattatgaaacaatatgaacgaataagtcaatatagagttatgtggatatttgtacttttcgatttaccaaccgaaacacaaaaagatatcaaggcttatgcacagtttaggaaaaatattatgcgagatggctttacaatgttccagttttcaatctacattagacagtgttctagtattgaaaatgttgaagcgcatatcaaaagagtaaagtcgtttatgcctaactttgggaaaataggcatacttacactcacagataaacaattcgaaaaaatggaattattctttggatgtaagcctcaagaaatcaaaactcctaacattcaacttgaaatgttctaaataaaaaagttctctctgtttagatcaagagagaacttttttgttgtttttttattttccaacacctttgcaatgcatttactatcagtaatttattcaattcaaactgtatttgcataagcaaagttactaaatttaaagcaaataacaactttaaaaaataaagaaataaaatattaaaactgtatttgcataagcaaagttactaaatttaaagcaaataacaactctttggaccttatgccacatgatcacgtaactgtatttgcataagcaaagttactaaatttaaagcaaataacaacgtatttgtcatagtttatgatggctatagtactgtatttgcataagcaaagttactaaatttaaagcaaataacaactttaactgaatattctcgtttcttttcccactgtatttgcataagcaaagttactaaatttaaagcaaataacaacagttctcaaagacgtttttggcaaacaaggactgtatttgcataagcaaagttactaaatttaaagcaaataacaacaactgcaacaagcgttgagattaaagacgaactgtatttgcataagcaaagttactaaatttaaagcaaataacaacaaacacgttgtcgtcgaatttccgcttggtactgtatttgcataagcaaagttactaaatttaaagcaaataacaacgcgcacaagaagctttagaaatgaagctaaactgtatttgcataagcaaagttactaaatttaaagcaaataacaacattgaaaaatcgaaaggtattgttttgtcaactgtatttgcataagcaaagttactaaatttaaagcaaataacaacgcactagcaccttaaataattcctatataagcatcaaaatagttccaaattcatcaaaccttttctcttcttccctcctactctatactcatcataaaagaagtggtaaatagttatagatgaatatggtctcttcctctcaataaaagcataacttttacatcgcaataacattgcctttaccctctaatatcaatgcttttaaagatcaaaagcagtacttttaaatttgaaagaaaatggcatggaaataatatttaataagagtagaaaatgaaagtggtaaataaagaattacttcgacaataaaacatacttttttcaacaatgaaaaagataagttgaagtattcttttacaatcaagaatgaacctaaacagaaaataactgataagaaactacgttataaaactctaaaacagaatacatatagatgatgatttcactcataaagtacgcaactccaacagcctatttagacatcattataaagtaagaaaaatcatatttctattataaatagtaaacataacctccctctctatcaatcattttatgagtcacaaaatatagtttaagtatctatttatataaaataaatttatatattggatttaaataagttataagagtatataaacagcataccaacgaaataattttaaacaacaatagtgatactcaaagaaaccttgagtccactattatatcttaaagaacaaagatttactattattttttatcccaatattgtcgacaaaacaattctccttgctcaaaaccttcttcgtataagtcttcaagttttgtaacatcacgttctattctatctacttctaaaggatgaacaggacgaatacatactatttttccttcattttcgagatgctctatcaaatctaattgcgcattatatacggcaacccttctacttaaagccactctaagacgaggatattttttatatataaaacgaggaattttatagtctttcgatgtatttcgatagcctctatttcttgtaagtactacaacattagtaggatgtcccgtttctatcgccctaaggacaggaatactatcaacgattccaccatcaagcataggaattccatctactgttacgatcttacttacatagggcaaactcgacgaagcctttacaatatcgagtgttctttgcttgtcttgcttatcaacaagatacattgcctctcccgttaagcagttagttgtaaccatttcaaacgttgcgggatttttaaaataggtgtcaaaatcataaggaagataatcgtttggcaaatcatcgtataataatttctgatcgaaaatacatccttgagaaaataaatgcctaagtccaatatagtcataacgtgctaaaaaatcaatatttgtcattctagcacgacgatattgcttactcatatacgacattccgttgcctgctcctgctgaaacagcaacaacataatcaaagtaaagattatgtttcatgaatgcatctaatacaccactggtgaaaactccacgcattccacctccctcaagtacaagtcctacgtctgatgttatattcataagaatacaattaaagttgttacaaagttacataaattgaactatttttcgtaactttgcgatatatattaaataaatcttttaatatgtttgacaaaaatacatacatcaaacgccgtgaaacgctaaagaagctggtaaaaagtggcattatcatattatttggcaacaacgaatcgccttgtaattaccctaataatgcttactcaccattcaggcaagactcttcatttctttattactttggtgctaatagagatggattagtaggaattatagatatagacaacaacactgaaacacttattggcaatgatattgacattgacgatattgtatggatgggtcctgttgactcggttaaagatatggctttagctgcaggagtagagcaaaccgctcctttaaaagagctaaaacatatttgttgtgaggctttaaagaataaaagagaaattcatttccttcctccttataggtcggatataatgatattgatatacgatctcttaggaattcatcctaatcaacaaaaagaaaaggcctctctatcacttataaaggctgttgttaaaatgcgttctattaaagaacagcaagaaattgaagaacttgaacgtgctttcgagattggatatttgatgcatacaacagcgatgaagcttacgagagaaggcgttacagagaagtttatcagtggacaactcgatggaattgctaactcttatggctcaaaggttagtttctctactatctttacacaaagaggtgagatactacatggcgctcctacaatgacaactctaaagaatggaaagcttgttttatgcgattgtggtggcgaaaccatcaataactattgttcagaccacaccagaacatatcctgttaatggcaaattcactcaaaaacaattagatatctactctattgttgaggctggtcacgacttagttctacagattgcgaaacctggtgtcaaatggtttgacgttcacatggatgtttgtagacttatgacaactcgccttaaggaacttggtttgatgaagggtgacgttgaagaagctgttgcatccggagcacacgctttgttcttgcctcacggtctaggacatatgatgggaatggacgtgcacgacatggaaggactaggacaaatatatgtaggttatgatgatgaaattcaaccttcaacacaattcggaactggttcacttcgtatgggtagacgaattgaagagaactttgttatcactgatgaacctggtatttatttcattcctgcacttattgacgaatggaaagcaaagggaattggaaaagacttcattaactttgatgctttagagcaatataaagactttggaggtattcgcattgaagacgatgttctcatcacaaaagacggctgtagattcatcggaaacaaagaaattccatatcatcccaaagacattgaggcttttatgaatcaataatagctattcaaagctaaagaaaataatatcacattgaactaataaaacatattatataaatagtaaaaacagtaaaacatgaaaaaattaatcatgctagctgcacttacatgcgctgtaataggcatgcaggcagaaacaaacaaagacagtattaaagcggttaagccagtatttactgtcgtaaaagcaaataagattacaagtatcaaagaccaaaacaagagcggaacttgttgggcttattcaacaatcagcttcttcgaaagcgaaatcctaagaaaaacaggtaagacttacgatttaagcgaaatgtttgttgctggtaaaacttacatggatagagcaattaaagctgttcgtatgcacggagatgttagcttctctgaaggcggaagtggctatgatgtacaatattgttgggaacattacggtatggttcctgagtctgcgatgccattaccaggtaaaatgattggtgattcattagcaaacttctctgagttctttagcattatgactccatacgttgaggctgtagcaaagaataagtcatcaaaactaactccagcatggaagaatggtttacaaggtatcatcgattcatatcttggtaaagcaccaacttcattccaatacgaaggtaaaacatacacaccacaatcatttgctgctagcttaggattggacatgaaagattatatcagcttcacaagctacacacaccacccattctggacagaatttgcagttgaggtacaagacaactggcgttggcctatgagctggaacgtacccattgacgacctatgtaaaatcattgaccacgctattctgaatggttatacagttatgtggggtggagatgttacagaagatggattcactcgtaaaggtttaggtgtagcttatgacgttaagaaagcacgttctatggctggaactgacgctgatcgctggttcaaactatcaagttctgagaagaaaagtaagctagatgctcttggaattaatgctcctgaggttgttccaacacaagaaatgagacaagaagctttcgacaattgggaaacaactgatgaccacggaatgcacatctatggtatcgctaaagaccaaaatggtaaagaatactacatggttaagaactcttggggtacttatggtgactatcaaggaacatggtatatgacaaaagcattcgttgcttacaaaactatggacttcattgtgaacaaaaacgcagttccaaaggatatccgtaaaaagattggtatataatcatcgcaccataaactataagtaaatacgcttatagtcacaataaaaagatgaataatcttaagattcttccaccttattatatataaggatcaaaggaaaggcttaagattattcatcttttttatatctacctactatcccataaaattacaatacgaataaaatatgagtgttaaataaatattttaaaggcttttatttgtttaatatcaataaaactattacttttgtattgaaataaaactacacatctaaactatactaacaaaacaaactaacaagaatatgtagatagaacaagatgtaaaacgaagtaacttaataacaattattacaaataaaaaagcaatctattatgaaaatgaaaaattttactcctcttttaagcctaggtatggctttatgtgcctttaactttgcacacgcacaaagctacacacaaccttatcaaaccgttcctacagcaatgcatgctgcaactcaatcactttatagcgtaaatgtaagtattgatggtaacacagttatgacttataccgatacaaatggcagacaagcttacaactggttgcaagacgaatattcatttacagcaaaaaaaggacaagaagttacacttgatgttcgtgcaggcatttggtcatgggacattgcaattggtttcgattgggatcatgatggcacatttgaagaccaacaacgcgcattcgctgaagtaggttctactgcttcaaaaagcaatagttcatggggacatgagccttataatacagaagcttatcgtaaaagccaacaaacagcgttaggacatcttggtgtagttcaacacacatttaaattcaccgtacctgcaactgcaaagacagaaactacaagattccgcattctttgtgacggagacggctatgcttatgcaagaagtgtacctccattcaacttaaatgacaaagtaggttatgctggttcaatacacgatttcggtgtaagaattgaagaagaagctggtcctgaaacaggaattaacaacacaacagtaacaaataactcaaataaacctgctgaaatctacacaattgatggtcttcgtcttaacacaacagtagataaactcacaaaaggtatctacatcatcaatggtaaaaaagtagtaattagataattaatgtagcaaagctgctacattatttacatccccaatagatgtagtatataagtaaaagaaacacaaaggcaaagacccacaataattttcagttttttttatagggtctttgcctttttattttcacaaataaatcaactacaatagcatcaatataatcccttgtaacatctttattagcaagtaaaagctatcatattgcatgctaattgctatccttttgcattttaattgcaatgctattagagaccaataataatgcttttattaggagtattatgctcaattaggtaaataagaacctactttttctattaaaaagaaatttcttctctctaaaggatatactcttcttaagaaaaggaagtaagataaagaaaaaagttttcagttagatatattgcaaaataaaaggactaataatcaaagaaagtagataataatatctctttgttgattattagtcctttatataaagtcttttatctctttattttattcttcaggcttcatgtttgtgtaaacattctgaacgtcttcgtcatcttctaagatatcaaccatcttatctataacctcacgttcttcgcttgtaacctcttttaagtcgttaggaatgcgtgtaaactcagcacctgtaacttcaaacccagcctcttcaaggtgtttttgtaattcaccaaagctcttaggatcaccataaatggttatttcattagcctcttcgtcttcatcgaagtcctcttctactccataatcaatcaattctaagatcaattcttccatgtctaaaccatcttttttcttgaaagtaaagacacatttttggtcaaataagaatgaaagactaccttgagtacctagatttccaccatatttattaaacacagcacgtacgttagcaactgttcttgttgtgttgtctgttgctgcatctacaaatattgcaataccatgaggtccgtatccttcgtaagtaacttctttaaagtccttttgatccttacccattgcatttttaatggctctttctacatttgcattaggcatgttttcacgctttgcagtttgtataatagcacgcaaatgagggttgttttctggttcaggaccaccagctttcactgcaatagcaatttgtttaccaatcttggtaaatgttcttgccatgtgtccccatctcttcattttcgcagctttgcgatattcaaatgctcttcccataggaaataatatttattttatttattattacaattatcttaactcggcatttaatctctttgtgagattatctatgagtttcttcatgattgaatcaatctgtttgtcattcaaagtcttctgctcatcttgtaagatgaagtttacagcataactctttttgccttcaggtagattctttccttcatatacgtcgaatagttctacagcctttaagagtttcttttctgtagaataagctatctctttgatttgttcgaactcaacagttttgtctacaagcaacgccaaatcacgacttacagcaggatatttgctaatttctttatattctactacgtgtttcttcactgctttcaacaaattatcccaatagatatcagcaaagaatacttcgttcgttatacccatattctttgttagcttgtatgccacaatgcccaattctgcaatgatcttacctgcttttgttacgatagaaatactatcttcaaaaatattattttcgccttttacaagtgtaactgcttgaagtgaaagtccaagtcgcaccaagatattctcaacataagcctttaactcatagaaagaagcatcttcattagggtgaacccaactgttttcaactctctttcctgtaacccaaagtcccaaatgttggtcttgtgtatatgcttttatcaacttatctgcctctttcttcgactcatcatagtgatagcaattaccaaattcaaagaatctaagattagaattctttctattagcattgcgaacaatactttctaaacctccaaataaaagagtttggcgcattactccaagatcagcacttaaaggattaagaatcttaactgttgtttcttcagtataacaattgaggtctttataataagaaactttagttagagagttatttaggatttcattaaatccgcctccaacaagctgttctgagataagattgatgtatttacggtttctatcctcatctgttggaattgttaaggtaccttttaattgcaaagatatttcgacattgttataaccatagatacgaagtatatcttcaacaacgtcacatgggcgcttaacatcaactctataagcaggaacaagaatttctatttgattctcattctctgcttcaatcttcatatctaagctggttacgatactcttaatggtatcttttccaatctctttgccgatgagtgagttgacataatcatatgtaagcaccaccttactgccttcgattggctcgggataaacatcctttatttgcatagaaacttgtccacctgctaactctttgcaaagaattgcagcttgtttcaaagcatatacctgtccattaggatcaataccacgttcaaaacgatagcttgcatctgtacttaagccatgacgtcttgcgctttttcttatccaagttgggtggaaataagcactttctaaaacaatattacgtgtattttcgtatgtaccactaccctttccaccgaagattcccgcaatacacatagcttcatttgcattacatatacttaaatctctttcgcttaagttatgttcttcaccatctaatgtaatgaatttggtgccttcaggttgagtggtaacaacgattttatgtcctgcaaccatatctgcatcgaagcaatgcataggttgtccgtatgccatcataatgtagttggtgatatctacaatattatttataggacgaattccaactatctttaatttattttgtaaccattcaggactttctttcacttcacaattgctgatactaacgcatgcatagcgtttacaagcttcagtattctttacttctacatcaattgttagtgactcattgtctacttcaaatgcatcacaattgggcttatgaagctctgtttgataattattttgctttagccatgcatacaaatcacgagcgacaccatagtgacttaaagcatctgagcggttagcggtgatgtcaacttcaatcacccagtcgctttctaaattgtaatattcagctgcaggcattcct

SEQ ID NO: 949 - DNA, 24350 bp, synthetic construct
  misc_feature 1..24350: note = Synthetic
  source 1..24350: mol_type = other DNA
gggattgatgggcgccggggccagggacttcacatggagcggacccttgttcccagccgtgggatggttcctggaagcatgtaaataagtgatggcaacgatctctatggccagaataaagagactgatcctttcggttttcatagatttagaggaatcttggtctataagaacgaatcggcaggtcatttattttatgacaatggatgggaatttactgtggaatatccgtaaagctacgagggtctcctgtcagtccttggcgatcttatcatagctggccactatccctttgatcagcgaagaactgaagccctggtgttccatttcattcagcccggcgatggtacagcctttgggcgtggtcactttgtcgatctcctgctccgggtgagcgccttttttcagcaataattccgcggctccttttacagtttgcgcagcgatgaggctggcggtggccgcatcgaacccgatctggatccctccctggatattggccctgatataccgcatggcataggcagtgccacacgctcccagcacggtggcggcatccatcagcttttcatcgatccataccaccctgcccagttggttgaacaggtcttccacataccttacctggtcccggctcactccatgtgcggagaggcaggtcatgctttcctggatggcaatagcggtattgggcatggcacggatcacggcgatcttattgccaagggcctgtaaaatatgatcgatggaaatacctgttactacagataccagcacatgacggtcggggttgaacgcagcaccgagcttttgaagcaagtcctccacctggaagggttttacggcaaggatcacgaggtccgcaaaatgtacagcttcttcattattatcactgacaagcactcctttttcctggagggattgaagggtcctgatcgtgcgtttggtgataaggatatgttctggaagagaaaatccactgttgatcagcccctctgcaatggcagtacctaaatttcccccgccaatgatggcgatcttcttattcataacaaagcgtttaatagtaatccccggttgacaaatagttcctcacataatcatctaccccatcttccagtgaatagaatgtatcagtatagccggctttcttcagtttgctcatattggcttccgtgaaatactggtatttatcacggatatcttcaggcatatcgatgaactcgatcctggcatgcctgtcgatcccggcgaaagtggcttttgccaggtcttcaacagtccgggcagtgccggtacccaggttgtacagtccattctccaccggagaaccagccgaccattgttccatcagccagtaacatactttgagcaggtctttcacataaatgaaatcacgcatctggtgaccatcctcgtaatcagggcgatgagacctgaataatttcacatcaccattctcctttatctggttgaaagcatgccagatgatgctggccatgcggcctttatggtattcattggggccataaacattgaagaacttcaatccggcccagaaaggcgggtatttggtttctttcagcgcccatttatcgaactcattcttcgaaacaccgtaagcgttgagtggtttcaatttataaggcagttcatgatcatcattatacccgaactctcccgcgccgtaggtggctgcagaagaagcatagacaagcggcacattttgtcgtacgcaatattgccacaccttccgggaatagtccacgttgagatgctgatgaatggaataatcgaattcagtggtatctgttctggcccccagatggaatatgaaatcgaccggtggtttctgttgaagccattcgaaaaaatgttctctttccactttttcgcggaacgacttgccatccagattatggactttatcgtgccggtggaattcatcaacgagcaccaggttctcatatccgttctcattcagaaatcctaccaggcaactgccgataaaaccggcagcaccggtaaccacaattgtagcatctctattcatagatcgattggttcagtgatgatttgatgttccactacaatgcgctcatcgcatgttccgattcatgactggccagcaggttatggatcgcattgtcgtatttttctttccactggaacgtggtgccccagttcatcccgtccacttccacggtaccattggtcacaacgcccagctcttcgcaaggatgattgccgatcagtttcctgaatgcggctgcctgtgcgggtttcacgctcaccactaccctgctctgcgcctccccgaaccagaaaccgtcttttcggatattgctatcggacgccaccacatcgatccccaggtccctgttgaagcaggattcgatgagagtagtgaacaggccgccttcactcacatcatgggccgattcgatcacacctgcctgtaccagttgcgcgatcttctgttgcaattccaattcaacatcgatatcgaattgcggggccggactatattccaccccatgtactttgttcaggtattccgatgaattgatatcggcactgctcctgcctatgaggaagatgaggtcgtcgatagctttgaaatcgagtgtcatttttttctttacatcatcgagcaggcccaccatcccgatcgttggcgtcgggtatacaggcccttcagggttctgattgtaaaagctcacattgccccccgtgaccggcgtatcgaatttgcggcatgcatcgcccattcctttgatggcatgtacaaactggtaatacacttcaggatcgtaagggttgccgaaattgagacagttggtaataccgaggggttgtccaccactacacacgatatttcttgcagcttcggccacggcgatcatggcccctttgtagggatcggcgaatacataacgactgttgcaatcggtggtaagcgccagtcctttattggtaggcttcgcgaccaccacggcagcgtcgctgggagcattggtagatgcattgccggtgcctaccatgctatcatattgcacgtagatccatctcttggaagcgatattgggaacggtgatcaattgttcggcaatccctttcagatcatcgggaacagggatgctttcaggatcgaatgcctttactctggcgagataggccggctccttgtattcgcgtgtatattgtggagcaccgcctccgagcacgagatcattggcagggagctcggcttcgagctctccatgcatataaaaacggaggataccatcgtcggtgacctccccgatctcggcacagggaaggtcccatttatcgaacactttcgtaacgagtgcttcttttcctttttccaccaccatcagcattctctcctggctttcgctgagcagcagttcccaggccttcatatttttctggcgcgttggaactttgtcgagatcgatccgcatgcctacgccacctttggcgctcatttcggatgtggaacagatgatgccggcagcgcccatgtcctgcatgcccaccacagcgccggttttgatcacttcgagacaggcttccagcagttttttttcctggaagggatcgcctacctgtacagcgggcagttcttcggtactctcttcagtgatatcggctgatgcaaaggaagcgccgccgatcccgtccttaccggtggccgagccaacaaagaaaaccgggttaccggtgcctgaggcggtggcggaaaccgtttcaccatttttcacgatgccggcgctcatggcattcacgagtggattggtatgataacattgttcgaaatagatctcaccacctacaatgggaacgccgaagcaattaccatagtggccgataccatgcacaacgcctgccagcaggtgttgggtcttgggttcggccaggttgccgaaacggagcgagttgagagaggcaacgggccttgctcccatggtgaaaatatcgcggtggataccgccaacaccggtagcggcgccctggaaaggttcaatcgctgaagggtgattatgtgattcgatcttgaagacaacaccatatccatcgccgatgtccatcaggccggcattttcctcaccggctttcaccagcattttttttccttcacggggcaatgtcttcaaccatttgatggaattcttgtagctgcaatgctcactccacataccactgaatgcacaaagttcattgaagttgggagtacggccgagcttttgtttgatcaattcaaattcctcttctgtgagacggagctgctgcgccgtttttgtggtgatttccatgaattttatttgtgcctatgtttaattattcgattaataacaggggaagcgcaaaaatacgaacggctgtgcaatcttgctgataaatttatgtcaatcgtgaaggtcgaactggagggtgcctacgtactcatcgagcactttttccatgctgaatttcttgataacgagtgagcggccgttctttcccatgcgggcgcggtcttccggcaggaggttgatcattttctccattttatcggccagatcgaagggatcgtgcattttgcagatatagccggttgaattattcagcactacttccttgcagccacggttgaaggaggtgatgataggcagttccatgctggccgcttccatgaggcacctgggaacgccttcattgtagaaggaagggaatacgaagcagtcggcccgctgcaggaaagggcgtacatcgcgtgcgaatccgcaataatggatcagtccttcctgttcccatcggttaaggtcttcctgtgtgatggaatcgggatggtgggtctcgaagaaaccgatcagttcgaaccgcacctggtaattttttttcctgagtatgcgggccgcatcggcatagaggctgatgcctttgcttttcaggaggcgggtgctcatcaggaaagtgaatacttcattttccactggctcacgttgatggtcaggtgaaaaatgatcggtattcactccttctcccggcaatactttcaccttttcgatgttcacgatcttctccatgatgaaaacctttgcatcctcattgttgaggaaccatacttcattggtatgcctgagggccttcctgtagaggagtttcagggtccagtataaccagttcttttgggcaaaaggataaccgaggccggtgatcactgccacggaagggatcttttcggccgcagcggccatggagccatagatattgggtttggccacatagtggaagatgaaatcgggcctgtattgcctgtataattttttcagccggcgatagagcagccaatcgctcagtggattggccgtcttattgtcgaaatcgatatgaatgaagcggcatccggattgtgtgaggaaccgggagtattggtcgtccggggctatcacgatcacctggtatccctctgaaagcagacaacggatcacatccagccggaaattgtatacggaccaggcactattggatacgaaggcgatcagtttattttgattagtcaaacccgccatgtagagagattactgtcaaaattaaaatttcattgctttattcatccgttattatttattttatttttgaccgggtcccattcaggatcgaatcatcatgcctgctatactcctcatcatactgctctccggcctgtccgtactgcttttaaaacgcatggtccgccggaaaattgcagcgctatccaccatggaactggcagcagcattcggcatgaaggtcattttcggttgcctgtacgggtatattttctatcattattatgggggggatgatacctgggactataaccggagttccctcctcgagcagaaactactgcttgaaaatcctggggcctttttcaacgacctgaaccctttggtttatttcaaccggaacgacaatctgggtgctgccataaaagacctgctgggcaactgggaatactccctgatcacgaagcccatggccgttttcaatttcatcagcggaggcaattattatatcaatatcgtgtacttcagctttgtcagcttctgggggcaatattggttattcagtctgctcacacagtcttttcctgaaaaaagaaagctgttccttttattgatatttttcttcccgcctgccgttttctggttaagcggtatcagaggagatgggttactgctgttctttatggctttgttgttataccagttccggcaatggcttttggatcgccggcggcaggcggtcatccttgcattgctgggtttcgcgggcgtgttgatcattcgcaatgcagtggccttgtgcatggcgccggcattggctggctggtatcttgcccaaaggaatacacaaaagacctggaccaggtacctggccatttatggcataggtatcatcctcttcttcagctcggcactactgagtgcccgctattcgggaccggccatggtagctgccaggcaggcggaatacctggaactgcatggcaatacgaggttcaggctcgaccggctggatgccagtctgccgtcatttgtgaaggtattaccccaggcggttgccaatacttttttcaggcccctgccctgggaggccaggggcgtactgcaattgatgtcggcactggatatcctgcttttctggggattggcagcatattgtttcttccggagatcgcccgaccggagaagaaattgggaccagccgctcatacctgccttattactcgccggtttatcgctctatattttcattggttatacggtgccattccccggagccatcgtccggtataagatccttcccgagctcttcctgtatgcctgcctggtggtggctataaggccccgaaacatcaaataattaaaaaaaatatatttaatttactcacagttctgaggcagttttttgaaagcggtcgcaaaaaattgacttattttcacattttcgtcaaataaattcacattgctttcaaaaaattttttggaaccctcaattatcggtttatttgcacaaagcaaaaaacacaattaatggaatccttacgttttaaagccatcaacgacctgtcgaaccagtccaatggtcatgtgacagcaggttctaccaagattaccggcattttcggggagaatgtattcacgctgaaagttgcccgtgagtttttaagtgatgaagcctataagagcctggtggcttccatcaaaggaggcaaaaagatcgatcgctcaatggccaaccagatctccgccggtctgcgccagtgggcagagagcaaaggagtgacgcacttcacgcactggttccagcccctgacaggtactaccgccgaaaaacacgattccttctttactttgaaaggtgatggcagcgccctcgaaacattcgacggtgatgcgctcatccaacaggagcccgatgcctcttctttccccagtggtggtatccgcgccactttcgaagcacgcggttataccgcatgggacccttcttctccgtgcttcatcatggatatcggcaccggcaaaacattgtgcattcctaccatcttcgtttcctatacaggtgaaacgctcgactataaagcaccattgctgaaatcactcgaagctttgaacaaagctgccgtggaagtatgcaattacttcgataagaatattaccaaagtaagcgctaccctgggatgggaacaggaatacttcgtgatcgacgaagccatgttcaacagccgccccgacctggtgatgagcggacgtaccgttttcggtcactcccccgcgaaaggccagcagttggaagaccactacttcggctccattcccgaaaggatctattctttcatgcgcgacttcgaagaagaaagttacaggctcggcattcctttgcgcacccgccacaacgaagtagcgcctgcacagttcgagtgcgcccccatcttcgaagaagtaagtgttgccgttgaccacaacacgctcctgatggacatcatggaccgcgtggcccgtcgtcataaattacgtgcactgctccacgaaaaaccgtttgccggcatcaacggtagcggtaagcacaataactggagcatggctaccgacaccggtgtgaacctcctggctcccggcaaaacgccgaaaaccaacctgatgttcctcaccttcttcgtgaataccatcaaagctgtatacgactattccgatgtgctgcgtgcttccatcgcttctgctggtaacgaccaccgcctgggcgccaacgaagcccctccggccatcatctccgtattcattggtcaatacctgagcaaagtgctggccgatgtaaaagaaagagttggcggtaaattcgacgaacaggacgaagcgatcctgaagctcgatctccacaggagcattcctgagctgctgttggacaataccgaccgcaaccgtacttcaccttttgcgttcaccggcaataaattcgagttccgcgctgtaggatccaatgccaactgcgccaacgcgatgaccgccctgaacaccatcatggccgaaacactgaagaaattcaaggccgatgtggatgccctgatcgagaaaggtgaaaagaaagagatcgctatcatgcacgtgatccgcgagtacatcgtgagcagcgagaaagtattgttcgaaggagatggttatagcgacgaatggcaccatgaagccgaaagacgcggactgccgaatgtacgcactaccccgctggcgctggatgctatggtcactgaaaaagcaaagcatctcttcgaaagcaataatgtattgagccatgtggagctggaagcccgtcatgagatcgaactggaaaaatatatcaaacgcgttcagatcgaagcacgcatcatgggtgagctgtgtaccagccatattctgcctgctgccatcaaataccagaatgatctgatcaataatatcaaggggttgaaagagatcggtttgccggaagactccttcgccaatcagaaacagatactggtgaagatctccgagcatatcaacaaggtgagcgacctcgtagagaaaatgatcgaagcgcgtaaagtagccaacgccattaccaatacacgcaccaaagcgatcgcttatcaaagccaggtgaaagatgccttcttcgatacgatccgttaccacgtagacaaactggaattgttggtagctgattcatattgggcactgccgaaataccgcgaaatgttgttcctcagatagtgtaatgttactaccagcctccccttgcccgctgatcatgcgtggtactatggtggggcgactggtacactgacatgacaagcaatgggctgcttccgaaagggggtagccctttttggtgatgatcccaaccatgaagaacatatctatcgttaatgcttagttgaaattagctgctactatctaaaatatttacctgataaatttcccaacttgcacccctatgcggtcatacataccaaaaccgcacttcccgcctggaaatttgaatgattatgtttaaatatttgaaaaatcaggattatatttagatattagtctgtgagaaaacaacaatcccgcctttggggcgggactactgtataagttttaaactacggaataatccttattgtgatttgcttcggttcaaagatagaataaacttttattaggtcttcaataataaaataaaaaagaaccatgcaggatttaaaaatgtgaaagcaaaatcacaacctacaataagctatatgaataaatcatgtcgaagattgtaagtgctcctgcatggaattttatcataggaaaaaaacgttcccaaataagctcatgatgcctacctggaatactttaatcaattaatccggcaattgatccagagcatacggttgatctgtaatcctatttgaaatcgaaaatagcttattgtagctaaatattactatcttgcgttgaatttattttatccttatatgaatatgaaaaaaataattggtttagatatcgggacaaattcaattggttgggcatttatcgaattaaaagaattcggtaaagcaggcactatcagtgctttgggtagccggatcatccccatggatggtgatgccctgcaaaaattcgaaaaaggtaatacagtctccaagaatgcagatcgccgtcagagcagaatgtccagaaggctaaaacaacgatttgtcctccgtcggacccggttaatcacagcattaaaaatagcaggtctcgttccagattcatttccgattgattttaaggcagcagaaaacgaaaatagcggcgccaggttcaatatcaacgacttcctccctatcgcttcttcctccatccatgaagccaaacaggaacttggcgcctcagcaatcccacaagattgggtgctctattatcttcgtcataaagcgctttcgcaaaaaataacgatccatgaactggtcaggataatctatatgatgaaccaaagacgtggattcaggagtagcagaaaagatataactgagcaggaagaaaccgatgagatcaggtatcccattattgaaaaatgggttcagatactcacaataaaagagatcactgaaatagccgaagagaaagggaaaaaagtattccaggtaaccggaagtggggtcggaggcaatattgttggtcagatcgagagaaggaatccgcccgactggctacacaaggaagtagaattggagatcaccaaaaaaacaacaaagtcaggtgatgtctcttatcgcttttctcttcctgattcttcagcatgggagcaacaaaaaacagccctgaataaagatatccgtgaaaccatcgaacacggacaatgtcaaactgtaggggaatatttatttctccatttgaaaaaagaaaagaactatcgcatccgccaaagaattgtggaccgcgacctataccaggcagaatttgaagccatctggaaaaaacaggcggcataccatcccgaattgaatgacagatctttgctcccggatatagcaatggcgctgtatcaacacaatgaagcaaaaaggaaagagatcattgcaaacgacctgttctatttaatagccaatgacatcatttattatcaacgtccccttaaatcgcaaaagcacagcatcgacttctgcacctatgagaaaaaatatgacccaaagggaaatgaatttgggatcagggtggcgcccaaatcaagtcctgccttccaggaattcaggatatggcaaacgatccacaacttgcgggtccttcaactggaaggcgcactggatggcaaaccccaaatcgatatagatgtgaccgaccaggtacttatccctttagccaaagccaaactatttttacttttcgatagcaggaaagaagtgacacatccggccatcctcagggaactggggcttaacccaaaaacataccgcttaaattatcctgctgaaaaaaactttaccggcaatgaaaccaaggaaacatttagaaaagtatttcgaaaacataaatgggaagaaggtgaaaacctattgaagaatagcaggcaattcgattccctctggcatatattatattccttaccggatccttcttccatcacaaaagcactttcaactcccggaaatcaatggcatatcccgaacaacatcattcagcatttatccaatctgcctgacttccccaaacaatatgccgcctattccaccaaagcgatcaacaaattgctttccctgatgcgctgtggcagttatttcgacgcggccacgatcgacccggtcaccaaagcccgtatagacaaactgatcaccggtgaattcgatgaaagcctttccagtgaattgagagacaaggtcaatcaatcgaaagaaaaatataagtttctccaaactgaagactttcaggggcttcctcactggctcgctgcatacatcatatatggaaggcattccgagaaagaaaatacgaccaggtattcatcccccgatgaaatggtggtgtcggacctcatacccaacaatagcctgagaaaccctatcgtagagcaaatatgcaaggaaacgatcagcctggtaaagagcatctgggaacaatacgggcagccggacgaaattcatatagagctggcaagggatctccggaaaacctcggaagaacgcaagcggctatcggatatccagtttgccaatgaaaacgacagaaagcggatcaaaagcattctcaggcaattaaagaatgccaatcctgaatcactggtcgatatagaaaaactgcggatttgggaagagaccggcagtgaagaagccatccgaacgagcgttaagttctccaaagaacccacgcaggctgaaattgaaaaatacaagctctggggtgaacaaaaccacatctctccatacacgggccgcattattccactcagtaaactgttcacaccggaatatgagatcgaacacatcataccgagatcccgctttttcgataatagtatcggaaataagaccatctgtgaagcggcagtaaacgactataagggtagcaggaccgcccgcgaaatgatagaagaagaagggggaagaacaattacgcacaaagggcagacatttacactgcttaacccggaaagttacatcgataactgcaagaagatctttcgtggtaagaaaaggatcgcgttgatgagggaagaaataccccaggactttgtagaacgccaggtaaatgataccaggtatataacccggaaaatagccgaattattgtatccggtaacgaggaacgaaaatgggatcgtattcactatcgggcaaatcaccagtgagctgaaagacaagtggggattgaacagggtttggaaggaaatactcaaaccacggtttgagcgacttgaagtgctgaccggggaaagattgattgaatgggataatgaccataataatattcacttcaaaaaggactacaaacgtattgatcatcgccatcatgctctggatgccctggtcattgcctgtaccatgagagagcatgtacggtatcttaataccttgaatgccgcagatgaaaagagcaaatatcaatatcttgtaaaacgcaggtatagtgattttatactgccctgggaaacatttacccgggaagccaaggcaaagcttcatgaggtaattgtttcttacaagaataaaaatcgtgtaattacaaaaggtattaacaggcataccaaatgggttcagcaaaaggatggttcctggaaaaaagaactgaccaggcagatgaagggtaagttgatagccatcagaaggtccatgttcaaagagcctcttggcaaaattaccctgagagaatataagacagttacggtgaagcaggcagttgacttgcaattagcagcgctcaggagcaatgacaagtccattgcgccacagatcgccgacaagcttttaaggcagcaggtcgtcgagatcatcaggaacagtgacttcgataagaaagaagtagagaaattcttatccaaacatcctttatcggatgattcaggaaatatcatctcgaagatccaaatcacccacttcaatgattatgctgccaagcgggtaaaattggatgaatcgtttactcatgaaaaaattgataagatacctcatgcagcccattcatggctggccaggttgctacatgatcatttgacctccttcaataataagcctgaagaggcatttaaaggagaagggttggatatcctcaacaaagcagcagggccacccatcaacaaagtgactgtttacgaagatatcgggaaaaaaattccttttaagggcaaattggtggaagcagataaaggcagcaatttattcttcgtgatctatgaaagcctatccgacagaagccggatcatcaatgaatcgtccagcgtacctcttttggaggccatcgaaaggtttacgaaccaacttcctattgcagatgaaaaaccaggatacaaaacaatagtgctttcgcccaatgagctggtatatgttccggaagaaggagaaaatataaaagcaattgattggggaggtgagatcaggaaaatccatgaccggatctataaagttgtaagtttttccaaagcccaatgcttttttattcctcattttgtttcaaaaccgttggatgaaaatggaaaggaactggggtccaacaataaatcggaaagggcctggaatggtgaaatgatcaaaaatgtttgtgttaaaataaaggtcgaccggctgggaaatattgttgaagtggatggcaggaaaattcatgcaagcaaggcttctgaaattcagtaatgcatcggataggctttattattcacatctaatccaactccatccgatatgataaagcgtacgctttattttggcaatcctgcatatcttaaaacggccaatgaacagcttgtaatagagatgcacgacagtggggaaacaaaaacggtccctattgaagatatcggcattttgatccttgaccatcagcagatcactgtgacacagtccctgattgcaaagctgctggctaataatactgcttttattacctgcgatgccacccaccaccctacaggtctgttactcaatttggatggcaatagcctgcagagccagcattttcaggcccagttagatgcttccggtcctctcaaaaaacaattatggcagcaaacagtcgttgcgaaaattcaaaaccaggctgctttgttagctatccaaagggaggaatataaactcctgttgaattatgcacaggctgtaaagagtggagatagtgaaaatcatgaggctaaggctgccgctttttactggaaacggatctttccggatttccttcagttcaggcgtgaacgattcggccctcccccgaataatcttttgaattatggttatgccattttacggggctgggtagcccgcagccttgttgcgtcagggttattacctacactgggtatccatcatcgtaaccagtacaatgcttattgtctggcagacgatatcatggaaccttacaggccttatgtagataaggttgtctgccatatcattcgtggtaatggcaaattcctcgacatgacaccttccatgaaaaaagagctgctgggtattccggctttggatgtaatgatcgacgggaagaaaagcccgttaatgaatgcagttcaacgaacgacagccagtttaatgaaatgttttgaagggcagtcccgaaaactattatatccggaaatgtaatgatacaggccccgatcttttttcattctccctccggggcttcgggtacaggatttgaacgactaaatgcctatcgtataatgtgggtaatggtattttttgatctgcctaccgataccaggaaagaccggaaaaattatgcccggttcaggaaggatattatggcttatggctttcagatgttccagttcagcatgtacctgcgtcattgcagcagtaaagagaacgcggaagttcatataagccgggtaaaggctatacttccgcccaagggccatataggcatcatgtgtgttaccgataaacagtttggcatgatggagatatttcggggaaaagagccagtagaggcacctgcgactgttcagcagcttgaactattttgataccggaacaggcggtagaaattggccgcacaggatttgaaaaatacctcccgaacctttttttccgattgtaaaaattgatgcaaaagcacaacaggactgggttttaggcagtcgtgttgtgctgagactaagttacatcttaaattgaaagcaaatcacaaccattgttacattcggaaaacggagctgtgtgttgtgctgagactaagttacatcttaaattgaaagcaaatcacaacgggtgagccgcgatacaaattttacgcgacgttgtgctgagactaagttacatcttaaattgaaagcaaatcacaactccctcagattatggaaggacttgcttatagttgtgctgagactaagttacatcttaaattgaaagcaaatcacaacgcttaggatgattaactacatcaaggaaatgttgtgctgagactaagttacatcttaaattgaaagcaaatcacaactgttgaagaatcagggaaaagagatcatcagttgtgctgagactaagttacatcttaaattgaaagcaaatcacaaccagattgaaggtgccagttatcgaattgatgttgtgctgagactaagttacatcttaaattgaaagcaaatcacaactggttgtggtgatttcattgatgggaagatgttgtgctgagactaagttacatcttaaattgaaagcaaatcacaactaataaaccgattgtctttttgcagactgggttgtgctgagactaagttacatcttaaattgaaagcaaatcacaaccccttaccgactggagaaaattttgcctccgttgtgctgagactaagttacatcttaaattgaaagcaaatcacaactacggatggaaggttgtgaaactggtggtggttgtgctgagactaagttacatcttaaattgaaagcaaatcacaacctttgtactacttattgtcggcatggtcctgttgtgctgagactaagttacatcttaaattgaaagcaaatcacaacggttggtaggcgatttgtttaagaggatcagttgtgctgagactaagttacatcttaaattgaaagcaaatcacaacacaggcttttgatcctgaatatgcaactaagttgtgctgagactaagttacatcttaaattgaaagcaaatcacaacgtcatttttttggtgtattgaattcattccgttgtgctgagactaagttacatcttaaattgaaagcaaatcacaacaactaaccttggaggctgtaaatccaacctgttgtgcggagactaagttacatcttaaatagaaagcaaatcacaacctgatgccatataacactacgaccatatcggttgtgcggagactaagttacatcttaaattgaaagcaaatcacaacccaccattctcctacagtcaatccatggaagttgtgctgagactaagttacatcttaaatagaaagcaaatcacaacaacttttcgcaaataaatgagccaagtactgttgtgctgggactaagttacatccttaaattgaaagcaaatcacaacctccatcgctgcgttaatccattcctgttgaatgcggctcacttcctgccggaaagcagtaacatctaccgtgtgttctgcatcgttgatccagtcactcactaaggataattcatacttcatatggcctttttttaagataaaggtttagtagctcttagaagcaggtattacctacagcaggggtaataaatagggatatcaggagggagggaggcaatgaaaatcttatctaaaatgtagcacgttatctttatctatataagaatctatacctgaaattaatttcaggtcgtcttggaagtttgaaataggttggtttctgtccagaacacctacaaattttttatggttgatggatggatcgtcaattactatctgcatcccaaaccaacgcggcactaccttcgcaatttccagcagggtcacttcatcaaaatagaaaagccctttttgccagccgagcacaaattttgcatcgaaaacttcctgtgtaatgggctgaccgtcgtgatacacggcctgtttacccggtagcaatttgcttgcgtcggtgggagtttgcatatttaccgaaccttccaccaatgccacttttaccactcctgaatcataactgttcacgttaaattcggttcccaatacctgcacagtgctatggggcaagtgtacgataaaaggcttttttgcatctttcgccaccttcaggtaggcttcgccattaatagttacttcgcgggtattacccggaaaagccatcggaaatttcagctcagtagcggagttcatccatacttccgtaccatcggccaggttgatcttataatccaggccaatcggaacagtaagcgtgttgatggcaacagctgcagggttattcccggtagaatacgtaagtgttttattggcattgttgagttgagcagcatcggtttggatgctgccttgttgttgggaaagattaattacgttaccattcgccaacctgagttcaatattgggtctcttgtttgttgccacatcctggttaccaggttgccgaaattcattccataggaagaacgatccgacaattatcgtggatataatagcggcagctacccaccgggtacgaaaaagagacaggcggcgcagtttggccggagcttgtggtaaggcggcgctttctttttccttaaaagaagcagtaagatcatcccaataacccggttcatctacataactgaaggctgtttccacctggccatgaggcaactggtcgataaaatgctcataggctgcagcaacttccggtaactgctgtaccatttcctcccattctttcgattcattttcgttcagcgtattactcactttgccgagcaatagatattcctggtgcgctgtcaaattattcatccgtatatgttgtttttctggtgatcggatgggttgcccacataaacattcttaggtggttatttatacaagacccggttttatgatgcgatcactagttgtactttaattttttattattttttcaatgttaccctcaattctttgagcgcccggtccatgtgactactcacggtggatttgctgatacctaattgttcagctatttgtgcatgggataaatgctctatatagtgcagtttaaaaaccctgccggccatcggcggcaggcggtcaatgaccgcatccatctcctttttaagctcggcctgctccagggagctaagcgtggttgttgcggacatttctggaagaaattcgtttttccgggcaagggacgcctggttcctgttgtgtttcagcgccctgttgcgcacggcaaacagcatataatgctccaaagaatgctggatgttgtcgtatcgccggttttgccagaaatctataaaaaattcctgcacaacgtctttggcggcttctgcatctttggtaatggaataagccagcacatacaatcttttacgggcatggcgaaacaggcggtcaaatgccgacaggtcgtgctgccttagctgcaccaacaacatggtataatccgtatagtcggtagccatattttaaaaaacgatattcctgcaattacccggaagatgattaaacagcgccaaatatatccaaaaaccgttaactgtctctttataaggcattcaggaggcttaatggttgggcaggtaacccggtttttaaaaaagttttaggaaattttgaaaaaatctggcttttgactagtgagccgtttttaggattgggtcttgtatagatatattggctccagcctgcataaacaaaaaaatctaaaaccggataatatgtactacggcaaagctccttaataaaaggaaaacacaagtaaaacccctccgccggtcaaagcaagaaggggttttcgtaagaaacatcattatttaatatttcaaactactgcaatttatgcaaaaaacaggtatttgttgtaccctgtaccatagggtattctcaaatcaaaactggcattttattatgaaagtgactgtactgatgtgtgtaggtatatttctaagttcccaactgctgctggctattccaggctacggccaggaaaacgagaaaaaaataatttcgcttcattattcacaggctccgattaaaacgatttttaacgcaatagagaaaaaggccgatgtggtcatcatgtttgaagcgacagatgcgctaaaaaaagaaaaagccaccatatccgttgacaacttaactgtggcagatatacttgatcaactcctgcggcccaaaggaatagattgggctatacgaggcaatattatccggttgtataaaagcaaggttgatagttcttcaaccaacattttagaccaaactcctatatcaatttccatgaatcaatatcaaggaaatcctccttcgataaacgtaaagggaagaattgttgatgaagaaggaaagcctgtggtcggggcagccatacaggtaaagggcggtaaagcaaaaggcactaccaccaatgataacggggaatttgtattagccggcgtgaatgaaaatgctgtattggttgttagcggggtgaacatagaaagttttgaagtaagggttaacggcagaacagaattgaatacattaagcgccaaaataaaagtaagccctatggatgaagtgcaggtacaggcttatggtactgttacaaaacgatacaatgttgggagcataacaacggtgaaagcggaggatatagccaaacaacctgtgggaaatccattgcaggcgttggaaggaagggtgccgggattggtagtgacgcaaaccagcggcttgccgggcgcttccctgaaaatacagatacgcgggcaacattcaatgaccaccaggccgggaggtattaccggtataaatcctttagataatccattattaatcatcgatggtgttccgttttcgccgcagaattcgaatattaatcaattttcctcgatcgtatcttcggtaggagggggacctttcagtaacggttatggaggggtaagcccatttaataacctgaaccccgctgatattgagagtatagaggtgctccgagatgcggacgcgactgctatttatggttccaggggcgctaatggcgtaatcctgatcacaaccaaaaagggccatgcgggaaaaataaccgtcagtggcaatatttacaccggccagagccaggtaacccgcacaatgcctatgatgaacaccgggcaatacctgtccatgcggcatgaggcattgcataacgacggctccacacccaacaatattcctttcgatcccggttatgcacctgacttattgggctttgatacgaccaaatacaccgattggaaaaaatattttatcggagggactgcccatactactgatgccaatgcgtccatatccggcggctcatccaatacccaattcttttttggagcggggtatcatcatgaaacttatatataccctagtgattttgcagacaggcgaatgagcatgagttccaatttgcatcataattccggcaacaggcggctcaatattgatttttccttcaaatattcctatgactataacaagtcctctggcaatgccaatttactggctgcttttacattacctcccaatttccctgatctatttaagcctaatggggatattaactggaattacaatggcgtttcgcttggggcttatagcctcggattagttaccaaccctgccggttttctgaaacagccttatttcaccaaaacctacaatctgattagtaattttcagatcggatatgaaatttttaaagggttgaccctacgttcgagctttgggtacaatactgttacggctaacgaatattccagctatcctaaatcggctcaggatcctgtgaattatccatcttctcacgccagctttggcctgaatgattacaagacctggatcatagaaccgcaggtggaatacaaaaaaacatggggcagaggccggttgaatgtgttgctggggggcaccttccagcagaatacgaatgacaagatgattgaacgcggagataattatagcaatgatctgctgctctattctttagccggcgctgcagcagtctctgcaggtaaaaattatagcctgtataaatacaatgctttttttggcaggatcaattatatctgggacaacaaatacattctcaatgtttccggccgccgggatggctcgagccggtttggtccgggcaggcaatttgggaattttggttcgctgggcgccggctggctgttttctgaagcatctttcatcaaagaccaattgccttttttaagttatggaaagctgcgaacttcctatggaaccgtggggagcgatggcatcgatgactataagtttttatccgcctatgttccttttggctatccataccaggggtctccagcctattttccccagggattattcaacgcaaaattgaactggtctctttccaaaaattttgaaatggggctcgagttgggatttttgaaagatcgtatattggctgctgtcgcctggtacagaatccgcactggtaaccagctggtcagctacagactacctagtcagactggttttggcagcatacttaaaaatgcaccctataccgtgcaaaattccggttgggaaatttcagtcagctctaccaatattaagacaaagcggtttagctggagtacctcttttaatatcaccattccaaaaaatgtgctcttatcttttcccgggatagaccaatctccttatgtggggacatatttggtggggcaatcgttgaatgttgttcaaagagtaaaatatttgggcgttaacgataccactggcctgtttcaatttctgacagccaaaggagttcctacttattctccaaatacagctccggagagtttgggaggggatttggtgcccgtcggcaatacggatcctaagttctatggaggattaaaaaatacattcaactatcgcggttttcaacttgatatatttgttgaattcaggaaacaatttggcgttaattatttagggcaggtctactcacaaggcctggtaggtggaattttcaatctccccgcttcgtttgtctcccgttggcagaagtcaggtgattacatggatatccagaaattctctgtccaatatagagacgcgtattccacggcaaattatttttataattattccagtggtccctatagtgatgcttcttttatccggtgtaagtcggtttcattgtcctataatttcccgggaagttatttaaaaaggttgaagatggaaggattgagtctttatgtgaatgcccagaatttatttactatcaccagctataaaggaaatgatccggaaaatcaaagcttctattccttgcctcctttaaggacgatcgtggccggtcttcaatttaacttttaaaaatcaaaaataatgagtgctatatattttacgaacaggaaatggatagactgcttctgcctcgtttttctggtaatagccggagggtgcaaaaaatttgttcagatccccccggctcccaatctgattgttacttcgcaggtattttcagacagtgcggatgccgatgccgcggtattaggtttatacttttatatgacatacggcccaacaacgttattgccatacaacggagggattactgtatatagcggattgtctgctgatgagctctatccaaccaccggatcggccgtgggaagggccttggaaaaggagctttataccaatgctattcttcccacaaataaccttgccggtggccaatggcaagcctgttatcagtttatctaccaggcaaatgcagtcatagaaaacctgacaggcagcactaccctgtcctcttcagcccacgatcagttaatcggggaggccaggttcgtaagagccatgatgtattttaacctggttaatttattcggagcagtaccatattgtaccagcactaactatgagatcaatgcggttatgccccgcacacctgttgattcagtctataggggcattatcagcgaccttcttcaggcccagcgtatgttaccagacaaatatgtgacggcgggccgtgtgagaccgaattcctatactgcttcggccctgttatcccgggcctatttataccagaaagattgggttaatgccgagattaccgctacacggatcatcaataattcaggaacttataagctgatgaataatttgaatgaagttttcctttcttctttatcatcacccaatatggaggccatctggcaactaataccggcctatccgggatttgaaaccactgagggttattcctttgtgccaggcagtactggaattattcctaattatgtgatcagcgattttctgttatctgcctttgaagcgggcgaccagcgtaaaacatcctggatcaatgccaatacagtggggaggcaatcctatagttacccttataaatataagcgtgggagagatggggacggtgtggaactgtatatggttttccgggtagcggaacagtacctgatccgggccgaggcgcgcgccaagcagggaaaaccggatgaagcaatggctgatttgaacagcatac

SEQ ID NO: 950 - DNA, 24296 bp, synthetic construct
  source 1..24296: mol_type = other DNA
  misc_feature 1..24296: note = Synthetic
cttcctcccccgctcctaacggtacaggttacactaaaacgccccatcagccgcccagattcaattggcaaacattttgcgaatccctatttttgccagataaatcagcgttcccctgaaaaaagttcgcaaaatattgaccatcgccctgctgagcgtgctgggactgatactgctggtcagcatcctcatcaatattcccgccgtacagaacctgctggtagaccaggtgaccaaacgcctgagcaagcagctggacacgcgggtggagatcaggcatgtgaacttccggctgttcaacagcatgcgcctggaaggtacgctgatagaagaccacaagcatgataccctgctgtatgccggcgccctgcaggtacggattacagactggttcttcatacaggaaaaaccggtgcttaaatttgtagggctggaagacgcccaggtgaacctcatccgccccaaattcgactccgtgtggaattaccagttcatcatagacgagtttggcggctccccctccccgcagcctaaaacaaaaaaacagaccggcatctcgctggaccttaaaaaggtagacctgaagcgggtccgcttcaacattacggacggctggataggggaagacatgcacgtggccgccaaccgcatctacctggacgcggagcggcttgacctgcgggcgcacgatgtgctcatcaaccagctgatgctggacaagccggagttcattgtgcagagctacgccgccacccgccccaaaaggccccgggttacgccgctgcccaccgctaccccgcccgcgctggacacgctcacccccattcccctccgctggaatgcggccaactggaaactggtggtaaggtctctccgcatccgcgaagggctgctgggggtagacaacctgcaggattccatcccttccaccaaaggccagttcgacccctcccacatccgcttcggcaacatcaacctctccatttccaacagccggctggtgaaagacagcatttttgcggacctccgcctctccacccgggagcgcagcgggtttgaagtgaaagacctgcggagcaaattcaaaatgtctcccgtggaaatggagttcaacgacctcgacctcatcaccaacaacagccacatcagggattattataccatgcagtatgaagacctgagcgacctgaacgactatgtagacgcggtcaccatgcgcgccaacttccgcaatacccgcctctcttcagacgatattgcctattttgccccgcccctctctacctggaaaacggaactgtccgtaaacggcaaggtatacggcccggtgagcaacctctccggagatagccttgacctcaaaggcggctatcacacccgcctgaaaggcagcatagacatgcgcggcctgcctgacatcaatgagaccttcatagacttctccgcccatgagctggtcaccagcgggcaagacgtgcgccagttcttccccatgctcaaagacattgagaacgttcgcacagacctcattacccgcctggctttccagggctcgttcatcggcttcgtgaacgactttgtggcatacggtaaattccagaccaacctgggcaacctggattccgaccttaacttcaaaaccagcaaagacgtgcccgtatactccgggcgccttacggcagataacttccagctgggcaccctgctggacaataccattgtcagcaccgccaccttcaaggccaacatcaagggcgaaggtttcaacttccggcacctcaaggcatctatggaggcggatattgccaaaataggcctgtacggctacgagtaccagaacctggccgtggaaggagacatgaacaaacgcttcttcaatggttccctggccgtggcagatcccaatctggatatggacttcaccggtaccatcgatttcaacagccgcctgcccattttcaatttctattccgaaatacgcaacagcgatctgaaggccctccacctcacggaagactccatcaccctgcaggccaaggcagacctcaattttgccggcagcaacatagatgactttgacggcaccgcccgcctctacgacgtatcgctgttcaagaataaaagtcgcgtggagtttgactccctctccatcatcacctccattgaaaaagaccggaaaaccctgcgcatcaagggcaacgaggtagatggctatgtacagggctcttacagctttatggagctgcccaatgcgttccggctgttcctcaacaaatattaccccagctacttcaaatccccgccagccgccaatgccgggcaggatttcacgttctctttcgatttcggggaagtagacaaggtattgcgcgcctttacagacgatattaaagggctgaacggcacccaggtatcaggcgcgctcaacaccctcagcggagaggtgaacctcaatgccgccgtgccctacggcgcctacagcagttttggggcgcgcaacctgctgctgaaggccaacggggatttcaacaagatcaacgtgagcaccagcattagcgaagtgttgtacaaagacagcaccatcttcaccaatcccctgctgctggccagctccgggcgggatacgtctttcctcaaactggacctcaaagcggaagacaccaccgacctggacggtttttacgcccgcctcattaccgtgggagacggcgtgaaaatacacttcctcaacagcaactttaccgtaaacggccgccagtggagcatgacgcccggcaacgaagtatactggagcgagcacttcctcaccgtacaggacctgcgcatttcccggaacgaccagagcgttaccatccagaccaacgagttcaaccctgatgagtcccggttcatgatcaccctgaaagacctcaacctggcagacgtgatcccccgcggccttacagacatcagggtagaaggcctggccaacggcaacatcaacgtaaacgacccgttcaacaacctgaccgtagacgcagacatcaaggccagccagctccgcatagataacgactcgcttggcctgctgcaactggccggagactataacctgcgccagggccaggtgagctttgacgtaaggtcagacaacgcgctggccaacttccaggccaaaggcagcgtaggcgtgagtgacagcaaccgcaccgtgaacgcctccgcggacatgaacaacacctccatcagcctgctggacaaatacctgggcgaatacgtgagcaacctcaccggcgccgccaccggcaaactgaccgttaccggcaccacagacaagccctccttccgcggctccgtgaaagtggagaacattggcatgaaggtgaactacctcggcacctattacaagataccgctgctgcacgtgcataacatggacgataacctgatagagatgcagcccttcaccctcatagacaagttcaacaacacggcgcgggtgaacggctttatcagccaccagaacttttacgacatgaacttcgagtttgacgtgcagagccaaaagttcctcttcctcaacaccggcgcgcaggataacgacctctactatggcgatgtgctggccgccggccgcgtgtacttcaccggcaaattgaacgacctgcagctgcgcgtactggcccgtcccctgcggggcacgcatttctacctgcctatttcagacagcaaagacatcggcaaacatgagttcatccaattcaaacaatacggtgtgatcaaggaagagccgaagaaaaagagcgacgtgaagctgaacgtgaagatggacattgtagccaaccccgatgcggaaatagacgtgatactggaccccaccaccaacgacgtgatcaccgccaacggcaccggcaacctcaccatcaacgtgaacctggacggggatttcaccatgtacggcaactacgtgatcaacgagggtaaatacaattttacgtttgaaagggtggccacctggaagtttgacatagacaaaggcagcaccattacctggaacggagaccccgcggaggccaaggtgaacatcaccgccaaatactccatgcccagggtgagcctctacaacctgtctaccgccgcgcaactgggcggcaccggcactacatcagacgccctgaaccgctccgagcgcgtggaaattctgctgtacctccgcaactccctgatgcagcccaacatcacgtacgagatcaccctgccggacgtaggctccctcgcctatgaaagcggcattgcctcccgcctcaaggaaatcaaccaggaccagaaccaggccctctaccagatatctttcctgctggccaccggccagtttcagccgccagacggcggcagcgccaacattggcgttaccggcaaaaacagcgtgggccaggctttgagcgcacaggcctccgctatcctgaacaacttctccaataccttcctgaaaaacgccggcatcggcttcaacgtaaactatacggcctatgccctgggcggcggctccagcagttcttacgaccgtaacctggtgagcaccggcatcaccaaaaacttctacaacaaccgcatacgcgtgtacgtaggcggagactatgactggggccgcgtatcctccaccgcatcgtcccagaactttgccggggacttccgcgtggaatacctgctcacgccagacggccgcgtgcgcatcaacgcgttcagcaaaacggattacgacgcctacaacctcaacaaccgcatccggagcggcctcggcatctcctacgtacgtgactacaaccagttgaacgagcttttccgggaccggttcctgcgcaggcggcaggatagcttgcggagagcggtgatgatgcggcgggatagtacgaacacccctctccctgacaccctccgtcaatagaagatggcacatatgtggtaccattttcccgcgcattcgatataaattgaagcattaacccggtacactatcaacctaacttaagatccgctatgaaaaaatacctgttgcgcggcgtcactgcaagcatgatgatccccctgctgttcctgtgcgttcaggcgtccgcgcagtaccggcaaaagctgcataccggcattaaccttaccaccggccttagctcaaaagccagcattgaaggggacggcaaaactgactatgggcttgccagcgccccgcaactcctttttgaaggaacattgaacctgtaccgtgaacttgatgaaggctactggcttgtaacagggctgggcggaggtgtggccgcatacaattttgactactatctgccgggtgatgcattcaatccccccgccatctatctgttcaacaacggcgcagcctcccgtgcaagagaccttatatacctcaaagtaccactggaactggaaaggcggtggacaacatccagggggaacatgtggaatgccaatataggcgccagcctgctgtttgccccgccaatggatgtcaccagcatcggtacggtggtccacgacggaagaatatatgaatacatgcgcgtagagcagaacaacaacaatcatggcaggccctggttcaactaccagcttgccgggggctacgcctggaaactccgttgggggcacctgctcagggtgaacctgaaactatcgctttccttcacggactatggctccgccacctacaggctctccataccagacaagccggtggccacagggaaatatggggtcagcgggtcttatcttgggctgaccgtgggttatttgttgaagagggctgctccggtggagtgaggggcatttcacggtggtgatgagaatttgcaggttgctacttatatgaatctttcatgttatattataccatccaactctgttaggctttttgaaatattcctaacaaaatgggagtaagccttggaaatcttacatttagtatgtcccttgacacctaatatctcctaatttttacaatcttaggagataataggaaaccacctcccatggcaaagaagataaacatgtataacggaagcccccgaacgcacggagttatttttttacttaaatttaggaactcctgtaccgtagattagcctcaataacagaccgcccgtacgatagattctttacagaagtcaaaacccctttttcgtatgaaatacattattcccctccccacgctcaatactccgtttatattgcgtattataagtccagccacgttgaatcacttaggcagaaaaattatttttttcagtgcactgcttcttaccattcaaacgcaggctcaactactaaagaaaataaccaataccgtaggagacttagcgggcgccgcagttaaggtaactaccgctccctatcaagctatggccaagacagctcaagcagcaactggcaatggtaacatcaaagatatttacaagccttatgtggatgctgcgtcagccagtggaaatgcactcaatcaaagtgcccagttgatcaacgcacctcatcaatatatgatgcaaaaggcgcaacagtttgcaggcgctgccggcggcgatgccggcactttcatttttgatgttggcacgttttttcaaaggtacagctccgaacttggatactcggccgtcctatcaaccggtaacttcctgcagggacaaaacccattttatatgtttggtgctccccttgcggctggcatcagggctgccagggaaaggcactaccctggctctttgcctttaccagatcatataaaatctgcattgggcaactatatcccggccacaatcctggctaaggccaggtatacaaccggaaatgttcaaattaccttgcctaattttatcggacagggacagaagtttatgggcaatgacggttatgcagttaccgtcatggatgtaatcgtctttaattctgaccctggtagctccagcctcaatcattgggcccatgagatttttcacattatgcagtacgagcaaatgggcgtagagcagtttgcatataactacattaaagacctgggccgcgttatcgaaaaagatgcgcaaagtcgtgccaatcaggttacaggggacaatatacagttttcagcttcctacataacttcccgaacatttgacatgacgctagagggtagcacacagatgctggctcaacaaaacccagaggtatatgtttcccgatgcattttcccccaggatctctaccctgtaatgtacctggtgaccaattatagccgtatcgtcgtcgtaaatcctgcagacggtgcctggcaccatattgggtacattctcccccctgcttttccccaggaagcctgttcctactgggtacccaatgccaacatgcgttattcaatagcgcatactggtcaaatcatgcaatatgttcaggcacgaaataattggggtcagcccatgtacaacaattttggccagcccttgatgacctgggtgcaaatcggttatgtggtaaatttgtagaagaaagaaggaatttccaaaattaacggctggttcagaaattcagcattgtcgggccttgccgacaacagggtagcaccttcaaaaatattggatcctaaggcatcttacgtcctaacttgcgatcaatatctttgacaggcaagtactgactttttttgccagcccttcgctcttcaaaaaaaccctctgcgacaagcccatttaaatcattgcgggcagtttgattacttacgccgaacttcgtctccacttgctttaccgtaaaaactgttgccggcacccgcagtacttcctgcaccaatactatctggcgttcattcagtgttgtcgaccgtaacatttccattgcacgctgtttttcgtctgatttacgtctgatgtagaactttaagtcgtcaagtgccatctgaatgcactttaagttataaataacaaaataggttagatcgttttcatcctgctctgtatgcagataggcccttgtatactgtccttttgaagacagaatgctccttgaaacagacatgaactctatcaaccagtaaccatgttttaataagtaccagtagaataaagttctagctgtgcgtccgttaccatctgcaaatgggtgaatatagcctgctaaaaaatgtaatattatgccttttgtaatagggtgtaggaaaaagttagttttatccttgtcgttggcaaaggcacaaaacgcttccatcatctggtgtagttgatcggcttttggtggtgtgtatatgctgatgccagtttgtacgtcaaccacattcacatcatcgccctttctgaattctccaacttcttcatctgacatggtagacctggtcaagatcgaatgaagctgcttaatgttgtctgacgttatcgctgcatttttgttcattacgatccactgcatagcgttgtagttattcacgatcatttgctccgcgttgttcttcggcttgcggtttttctccaacatttccttggcgattttgcgagtggtggccgctccttccaattgacttgatgcaatagcttcctccatcaaggaactgatcaaatacctgtccctgtcttctgaaggaataatcgtttcaccttgtaaggatccaccgaggtttaagtcaaactcatgtagatattgttgcaccatcgatggagagtcaataagaaatgtaagcgcctggtgccctgaaagtattaatttcttgttggatattttgcgataggtcttaactgtcgcccaaagtagttgcggatcaacaccccattcggatgcacggtacttccatttatcgtagtagtaatacctggcgttcaaaaggatcctgaattcttcaaatttctcaaggccgatcagcgttgtcagcatcgcagagaaatcaaagtctctgggtatcacaggagtacgttctggtaatctcataatatctcctaatttatgcaaaattaggagatattgggagttttggaagactatcctcaaaacaacagtcaaaaactcctaatttttacaattttaggagataattggagattttgaaatcaatacacactttacatcagcccatatttaatcgtaattttggtaggggcacatagaatattggaatcgaaaacaacaaaaccatgcttaacccgcgcatcaccacaacctgcctgcttcttttacccatgcttgtaaccagcagcacccaacagcaaaataacaccttcctgaaagcctacggcggcacgccctacatgggaaccgttcaggtagatatcatccgccccaacggcacccacgtcaaaacagatttcggggacgccagcgcacattttaccagcgctgataacggaaaggtcaagatgatcgtttttggcgctatcggcaacaaaaaaggcgatgcgggatttgcagtagacggtgttgctacgcagaagagctggaaatgccagtcagacagcatacaattgagtgtgaaagaaaatggcgctattgccgggagcggaacggtctatccgcagcaattcaccttttccgggaaaattgcggataccaggcttgaactgctcaccgagatcaaaaccctgaaagcagcggagaacggcctccccgcaggaacaaagtttacttttcgttatgtgctccggcgggatattgccaccggtacaagcaatacaaaacgccgctgcaaaaaaattgagtggcggccgcagtatgtcgggaactttgatggcacggggcaaacggtgagggtgccggtttgtgtggattgacggttttgatgagactacgggtctcattaaccaaccattaacaaaaaaagggtaataattgctgtaaaatgaggacgtaaaaaagcaaccgcgatatgaagaacgttatccctgtatagctgtgaaggagccttataaaaaccaacaatcccgcactgggcgggactactgtgaaagtttgcactacggaataatccttattgtgacttgcttcaatgtaaagatagtcattttacgctatgaaaaaaatcctcggacttgatgtcggtaccaactccattggctgggccgttatctccctaaaccaattcggccaggaaggcgccattttaggcctgggcagccgtattatccctatggacggagatgccatgcagaaatttgagtctggcgctaccgtatccaaaactgcagaccgccggatggccagaatggcccgcaggttaaaacagcggttccgcctgagaaggacacgtttaattacggcacttaaaacactggggtggatgccagacggctttcctgttcttttcagggaagccaaaagtttctctatgcgccaatatctgccgtttgatgcatccataatagcagaagcgcaggaagccttcggcagtaaaagtatttcagaagactggatagtttattacctccgcaccaaagcacttgaacacccgataccactttccggcctggtgcgcatcctctatatgatgaaccagcgcaggggcttcagaagctcaagaaaagatgaaaaagatgaagaacaggatgagatcaaatatcctctctttgaaaaatgggtgcaaatacttaccgtatcggaaatcaccgaggtatctgaagaaaaaggcattaaaacccttaatgtaaccgccggggacatcaccggtcaaataaaacgcagggctattcccgattgggttggccaggaaatggaactggaagtgacccggaaaactaccaaagccggtgaagttacctatacattcgccatgcctgatcccactgactgggagaaaaagaaaacagcgctcgaaaaaagcattcttaaatccgggcatcaccctggcgagtacttttttcaccatcttatcagtgacccaaattatcgcatccgccagaatatcatagacagatcgctttacgaaagagaatttgaggctatctggaaaaagcaggcaacattccatccagagctggccgacacctccaaattgccagctattgcagacctgctctacaaaaacaatgcggccaagcaaaaagaactatgtgcaaatgatctatattacctcttttccagggacattatctactatcaacgccccctgcgctcgcaaaagcatagcgtgggccattgcagcctcgagaaaaaagggaatgggtacggcataaaggtagcaccaaagtcgagcccggagttccaggaatttcgtatctggcaaaccatccataacctgaaggccctggaattatctgctgaaacagagggcaaaccgctgctggatgtggatgcaacagaacaacacctgacagatgaaaagaaagcactgctttttgcgctctttgacagccgggagagtgtgtctcatcatgccatattgaaggaattaggcctcaacacttccgggtaccggcttaattatccgtcagacagggacttccagggcaacgagacaaaggctgttttccgaaaggtctttaaaaaacatgcctttgatgcaggtaatgcattactggacaatgcagataccttctaccggctgtggcatatcttgtattcactcaacagcaggaaggaaattgccagcgcgctttccaatcccaaacacgcatttggactaccagaagccgtcattgcccatctctcaaagctgccagatctgccaaaacaatacgcggccttttcctccaaagccatcaggaaaatgcttccgttgatgcgttgcggacaatattttaattgggataacattcctgtgtcagtaaaaacccgcatcgaccatattgttaccggtgagtacgccctcggcatcagtgatgacgcgcgcgacaaaatagccagctttaacctgcgcgaaaacgcagatttcaaaggtctctctgtcccgaaagccagctacgtagcctataaccggcattcagaacgtgaaaatagtggaaagtacgaggcgcctgatgacattaatgttccattgcttatcccgaacaacagcctgcgcaacccggttgtggagcaggtaataaaagaatgcctgagcctggtaaaagacgtttgggcccaatatggacaacccgccgaaattcatatcgaactggcccgggaactgaaaaagaccgctgaagaaagggaaaaggccgacaaaaagaaccgtgagaacgaagccgacaggaaaaggatccgcgctatactgcgggaattgcaaaatgccaatcccaactctcctgctgacattgagcggatcaggctatgggaaaacaccgggaatgaaacagcccgttctaccgccgtccggttttcaaaggagcctacccgtagcgagatagaacggtataaactatggggagaacaaaatcatatctctccctataccgggaaagtaattccccttagcaaactttttacacctgaatacgaggtggaacacatcataccgcggtcccgcttctttgatgattctttcctcaacaaaactatctgcgaaacctgcgtaaatgactttaaaggcaaccggacagccaggcagctgatcgaaacagacggaggccgtaccattacacacaagggccatacatttacgctgatggacactatggcatactacgcacactgccagcaaacctttcagggcggcaaatacaggaacctgatgagggaagacattcccaatgacttcatccagcgccagatcaacgacacgcggtatatcacacgaaaactggcagaactgctatatcctgttgccagggaaaaagagggaattgtgttcaccatagggcagattaccagcgaattaaaagacaaatgggggctaaaccgcgtgtggaaagagatattgctgcctcgctttgaaagactggagcagatcacgggtgaaccgttaattcaacttgatactgcccacaacaacatccatttcaaaacagattataaacgtattgatcacaggcaccacgccctggacgcgctgattattgcctgcaccacacgccagcatatacaataccttaactctctgaacgcaacagatgaagcaggtaaatacagatacctggttaaatccaggtacagcgattttgtgttgccctgggaaagtttcaccaaagaagcccgcgaaaagctgcaacaggtaatagtatctcacaagaaccggaaccgtcttttaagcaaagcggtgaacaggtattccaaatgggtgcaaacaccggaaggaacatggaagaaacagctggtaaaacaggaaaaagggccgcttaccgccataaggaaatctatgttcaaagaacccctcggtaaaattacattgagggagtataaagatgtaaccctgaagcaggcggttgatacgcaactgaaagcactgcaaggcaccacacgggatcaggtctcccaggtggctgacgcatcactacgtaaacaattgaatgaattgctgaaaaattgtgcatacaacctgaaggaagcagaaaaacacctcaagaaatacccgctattggatggcgatggaaaagcgctttctaaaattcgggtgacggtgtttaacaattacgcggcaaaacgggtaacactggatagctcctttacggccgacaagatcggcaagataccttatgcaaaaaattcatggctcgccaatttgttgctgcagcacctggaagaatatcaaggagacccgaatctagcctttaaaggtgaagcgcttgatttgcttaacagaaaggccggaaaacctattcacaaagtaactatttatgaagaaataggtaaaaaaatagacttgcatgggaagctgctggagggagacaagggcaccaacctgttttttgtgatatatgaaaatacttccaccgggcagagagttcttaccaaaaagagtacagtcccattaatggaagccattgaacggctcgctaataaatggccggtagcggaagcccttgaaggccatagacctattatcctttctcccaatgatcttgtgtatgtacctgagattggagaagatgtgagcaacatcacatgggaaaatctaaccaaaatacaacaaaggatatacaaggttgttagctttaccaagcaagagtgtcattttgtgccacatcatattgcccggccgcttgacgacaaaaaccgggaacttggctcaaacaacaaatctgaaagggcctgggacggtcaaatgattaaaaatacatgcatcaaaataaaggttgacaggttaggaaatattattgaagcaaatgggagaaaagtaattcatcatcaagaaataaacccctctcaccaaccggaaacaacgcctgagccatgatcaagcgcactctttattttgggaacccggcctatttgaaaacaagacaggaacaactattggctgaactgcccggtgatgagaaagtgaaacaagtccccattgaagacatagggctattggtattggacaatgcccagataaccgttacgcaagccctgctggccaaactaatggaaaacaatgtagcgctggtgacctgcgaccatacacatcatccggtagggctgttctttaatcttgacggcaacaccttgcaaagccagaagttcaaagcgcaggtagaagcatcaatgccgctcaagaaacagttatggcagcagaccgtcatcgccaaaatatcgaaccaatctatgctgttgcgcacacagcgggaagactacaaatacctggacaccctggcaaaaaacgttaaaagcggtgatgcggataatgccgaagccaaagccgccagctactattggaaaaaggtattccctgatttcctcacgtttcgccgtgacagagagggtgatccgcctaacagcctgctaaactatggatatgccattctaagagcaatagtggcaagaagcctggtaggaagcggtctcctccctacgctcggtatatttcaccggaatcagtataacgcatattgtttggcagacgacattatggaaccttaccgcccgtttgttgacaaagtagtgtgcgatattatccgggcaaatggccgtttcctggatttaggaccaaccctcaaaaagcagcttttgagcatcccggccatggacgtaacaatagatggtcaaaaaagtccattgatgaatgcagtacaacggactacctcctctctgtccaaatgcttcgaaggtagttcccggaaaatactgtatcccgaacttacacattaatgtttaaccgtttaaacgcataccgggttatgtgggtacttgtattcttcgatttgcccaccgaaacaaaaaaagaccggaagatctatgcccaattcagaaagcaaatcctggccgacggtttccaaatgttccaattcagtatttatctgcgtcattgcagcagcagggaaaatgctgacgtacataccaaaagggtgaaaaagatcctgccacccaagggtcacgttggcatattgacggttacagacaaacaatttgggatgatagaactattccatggcagggaaccagccgttgcaataccccctccgcaacaactggaactcttctgataggaataaaaaaaacaggacatttgcctgttttttttattcctaaaaagttcagtaagcaggccataggccttcacttcagaggaatctgttgtgaaagacctaaggtactgaataattgaaagcaagtcacaacacgtaggcggcgtggttctttctccaacagttgtgaaagacctaaggtactgaataattgaaagcaagtcacaaccccctttacgccgggcgggcgttgtttaagttgtgaaagacctaaggtactgaataattgaaagcaagtcacaaccggccaccgcataaccagccctatgcttttgttgtgaaagacctaaggtactgaataattgaaagcaagtcacaacatgatgctgacaatggtttctaccggtaccgttgtgaaagacctaaggtactgaataattgaaagcaagtcacaactgctggcgctgataggagtagcggtaaaacgttgtgaaagacctaaggtactgaataattgaaagcaagtcacaaccacacgacctgacaaaaaaggtagtgtcgtgttgtgaaagacctaaggtactgaataattgaaagcaagtcacaacaacatagtgattgtcaatgaacggaggtagttgtgaaagacctaaggtactgaataattgaaagcaagtcacaactgctgatgcctataagcacatccttctgaagttgtgaaagacctaaggtactgaataattgaaagcaagtcacaacctgcagcttcctgctcctgcttacggcgcggttgtgaaagacctaaggtactgaataattgaaagcaagtcacaactgtggctgtcggcttacgctctaacaccttgttgtgaaagacctaaggtactgaataattgaaagcaagtcacaacagacatgtggcagtactcgggtgctgcccgttgtgaaagacctaaggtactgaataattgaaagcaagtcacaacaaggacgtgcggccagccccttacgctttagttgtgaaagacctaaggtactgaataattgaaagcaagtcacaacccatgcgtcacgcggtaccttcagcgcagtgttgtgaaagacctaaggtactgaataattgaaagcaagtcacaaccgttacctcaatcggaacgttcgcctccgcgttgtgaaagacctaaggtactgaataattgaaagcaagtcacaacaatcagctatttgcttttctatctttgaatgttgtgaaagacctaaggtactgaataattgaaagcaagtcacaactatttcggcatcaagttcccgatcggtcagttgtgaaagacctaaggtactgaataattgaaagcaagtcacaaccgaaaattcagaaaaggctatgcaggacatgttgtgaaagacctaaggtactgaataattgaaagcaagtcacaacgccttttaaatttatagtgtgaaacctttagttgtgaaagacctaaggtactgaataattgaaagcaagtcacaactgagaacgatgaaggcttccagcattttgcgttgtgaaagacctaaggtactgaataattgaaagcaagtcacaactgcgtcactgtagcgctgcgggctgaaggggttgtgaaagacctaaggtactgaataattgaaagcaagtcacaacttaccattccacgggccattttcaatgcaggttgtgaaagacctaaggtactgaataattgaaagcaagtcacaaccatatcaccgctgttttcccttcgttcctgttgtgaaagacctaaggtactgaataattgaaagcaagtcacaacccgtgtccgtagcgggtgcggttttaactgttgtgaaagacctaaggtactgaataattgaaagcaagtcacaacgttttctttgtaattcacgataaaattccgttgtgaaagacctaaggtactgaataattgaaagcaagtcacaacgcagcttcactgtggctgatcttttctttgttgtgaaagacctaaggtactgaataattgaaagcaagtcacaaccggatatatcggttaaaaacctctgttgccgttgtgaaagacctaaggtactgaataattgaaagcaagtcacaacgagtccggcgatactgaacgactggcaggggttgtgaaagacctaaggtactgaataattgaaagcaagtcacaaccgccatttttcggcttcttttttagcacctgttgtgaaagacctaaggtactgaataattgaaagcaagtcacaacccaaacggaggtgttgacgatgatcgttacgttgtgaaagacctaaggtactgaataattgaaagcaagtcacaacctaccggtgtagaggcatttatacctgattgttgtgaaagacctaaggtactgaataattgaaagcaagtcacaacaatcctttttcaactatgagaaaaatttttgttgtgaaagacctaaggtactgaataattgaaagcaagtcacaactcaccggcgctattgttaaacttcgtactagttgtgaaagacctaaggtactgaataattgaaagcaagtcacaaccctggtagtaggatttgtccagggcaaattgttgtgaaagacctaaggtactaaataattgaaagcaagtcacaactgcattcacattcactattggaatgtttcagttgtgaaagacctaaggtactgaataattgaaagcaagtcacaactcctctcatggccgaagctggcccaaaattgtatctcgtcccactggctcatgatggcaaattactaaattttttagtgcttcaagccaaaaagaaccgccctactggacggtgcttgagccgggaccttcatacgccgccggctgcgtatcgataacgcagtgtgaagattggtaggcagtgcgcaggctatttgcgctctaaatcttgtttcatcaactcctctacccggcgtgaccaggagcggccatagcgggcatagaaggcttcgtaaatgtcaggaagaacggtaagcggcttctgaatgcgccttacctctacacgggtgaggccgggtttatttccagcacctggccgtgcgccgcctcggttgttttttttatgtacctttggcatgataagtcattttgtgacttgtttcaatgacggggccgggagtgattacccggcctttttttaaagcagttgtgtccatttcctgataatgttgtgaaagacctaaggtactcaataattgaaagcaagtcacaacgacatacaatgcatgtaaaagcagctcctgttgggactatctcatcaactgtgtaagtttcaaaaatgcggagttcgtggcagggtaccgcccccctacccccaagggctcccctgctcttcccccgtaacaataaaattccgcaagttgccgttcaccagcatgccccacgcgttcgagcagctatcataacactcaaacgcaggcaccaggcctatatgtgtaaaacgaacttccgtttggtgccccttctccgccatctcgaaaataatatcggtgcctttccattcgcgcttatcctgcacaaaggccagctcggcgtccagtacatgccaagctactttttgacccggaatgaaggccgttatcttttgccgggagtaatgcgcgccgggcacgcggtatgtaaattcgccgccggccgcggcggtgtcgccttcaatttcgccagaccaccatccgcgtacgttgttgatggcattgaaaacttcctgaggggtttggtctactaaaaaagatgtgctgaaattggctgtgttcattttctttagctttaattattccatggccataccggccataacaaaattaaggcctaaaggtgtccttcacagggggctaattggactttaccgcgggctggtccggacaaaactataccgcggccgtttcccatttctctttcagcaactgctccagccgcctgatctcttcctggtacatggtctttttcctggtgccgaaataaagtatgttttccaccggggtcttcccttcccataccagttttattttcccggacgcaatcgcctcggcgcaaagaaagtcgggcactactgaaaatcccgcgccatggctgaggcaccggataatggagctgatgttcgggacaatatagttggggctgaaaccgggatgttctccaacgtgcttcagccagaaattcttcaggtgctccatatctgcggcggtgctgtaccacatttgctgttttaatagattagccgcttccctgatatcgtcttgccgcagcaatgcttccagcgccgcggtatctgtttggctgcccgctatcagcaccagcttctctttggagaacggctgatattgcaaattctgctggctgcctttctgtggcgtgatgatcaggtctagcaaaccattatccaggtcctgctgcatttgcgggtattcgccgaatttgataatgaggttaaacggcaaaccggcaatatgttcttccaaagtatactggaaagtctcgaaacacatccctacgctgatcgttgcccgttcatcttgtgaacgtttatgaaaatgctgctctcctgtttccagtttttgcaaaggctccagtatgtagttgtataatatcttccctttttccgtaggtaccattttcctggccgagcggtcaaatagccggtagcctgtaaatgcttccagcgagttcaggtgcaaactcacccccggttgtgaaataaacagctcctgcgcggcggcagacagtgtgccggtttcgtatatggccctgaatgtacggagccactccagattccatgacataactataattattatgatacaaatgtacaatttaaattattacaataatataaaaatctgatagaaatttgcagtatcaataattaaacttatagaaatgaaagtattcattatcaacggaggacaggtttttgcgcatgcgggcggcaagttcaatgagctgttaacgggctggacaaccggcttcctcgaaagaaaagggtttgagttccgcgttacggatattaacaacgattttgatgcggaggctgaagtggaaaacttcaaatgggcggacatggtcatttatcacacccctgtctggtggttccaggtgcccaaccgcttgaaaaaatatatagatgaggtgtttaccgccggccatcagaatggcatgtatgccagtgatggaagaagccgaaacaacccggctgtcaattacggaacaggtggattgatgcagggaaaaaagtacatggtcactaccagttggaacgctcctgccacggccttcacactgccgggcgaattttttgatcaaaccccggtggacgatggcatactgttcggttttcataaaatgaaccagtttgtgggaatggaaatgacagcagggtaccattttcacgatctcgaaaagaacggtacaccggagcggatcgggaactatcaccgggactatatcgaacatttaacggaagtattgattcccggccgtttggtaccgggcaaactgcagggtgagcaacagcattagctcctatttatttggcaaaatgtaaagtatacattacatttagtaatgaaaacattacacatatgagccaaaatcctttcccatacgcctactgggccaaaatattaggggtactgctgatccttgccggtattttcagctttttccagcaacactataaaaagggggtctatgatctcaatgaattggcggtaggcctcagttgggggcttgtttttattttcttctcaaaagaaagaacggacgatgaaatggtccggagcctgaagttcaaagcattggcggtagccgtgatcgtctcgttctcgctgacccatctttataattatgtttttctcaactggcgcctggagcgggggcatgacgtcatactgtctatctccgcctaccagttcctggccataacgttgttgatcgctacgggctacttttattacctgaaacgccagataacattcaatgaagggcaatgaagaactttataaaagtggaacgggcaagaaaaaacctgacgcaggcggaactggctgaaaaagtgaaagtggcccggcagactatcatagccattgaagcgggcaaatttgttccctctaccatattggcctttaaaattgcccgggtgctggattgcaaggcagatgatctctttacgctggaagaagaggattggcggtagaacggcccctgccataccgcaaactccctggacaataccaggaacactatagggaactactacggtatgtggacttgctccggaaataccccgtaccgcgtgtgaacatgccgtaaacgggtgttgcataacactttttgagtcgcccaactgtaaaaacaggaaaaaagaagagaaagaacggcgtaacaaacacaaaaatggggtaacaacgcacaggttcccgtcaacccggaagatcgcaattaaactgacactaaaaaaatacacggcatacaaaaaacgtcatccctattcccgttgatgaaagttaaccaccagccccggtacaaaaggaatggcttcttccgtaacagctaccgtgtatggcctcggcacccgttcttcctgccccggcatcaccgccaccacgtctgccgcggagtacctgcggttgtacagcaggtgcatccgcccgctttgcgctatgcagcacatcacctccagcaccacgcagtacaatgcgcctttctccgccggtatggccagcgtaagcgccgcagacggccggctgacatctatcagcaccggctccgaggccacggcggtggccgccgtaaagcccggctgtacgcagatggccactgctttaatactcaggtgggtggcgagcgggttggcggtgtatacctccatggcggggagatgtacttcaatgttcccctggtagttacgcgaaacggacggcgttaccgtcagcacccgggaaaggtctgcatgctggttcagggaaaaaccctccagcccgcggaagtgccggggaacaaaacgtttttgccggtgcaggtcatcttcccgcaacacgttcaacagcgctttgttcaggcggttgcccatggcacgttcgcaacggatgtccagcaggccgcccacggcatgccgcatggcggcgcccagcgtgctggctttcccgaagtaccggctgctgatctttgtgcgggggctttgccgcacttcagcgggcatggagcgcacgtagtgttgcttccctacgcggtagcctatcagctctcctaccctgccggtaaatttaataagccctgtttgcttgcccataagtagatcgtttttactaaagttatgggaaacagggcactacggttgttaagcggatttaaaaattacgaaaggcgcttcggccgcgggtagataatatctaaacgcagatgcactcctcttaaaagttcacgaaagtggcttcgattgacagtataatttatcaaaaaaagccccgccatcaggcggggcctcaatacgggcgcggctttcacaatagtatatacaccatcatgctacacaatcgcctactgcctgatcttcgcctcaatatcgctccatgagtaataatggaacactttcccgttgctcatggctaccagcattcctttcgggaacctgctgcccagcggtacggcggttacctcagacccgtcgctttctatggtagacaccggtacttcggctacgagcgtatgctggtgcgggttgccggccgcaccctcccgccggtacaccataaaagtgttggcctgctggttagacaccaggatgtacccggtgctgtctgtaagtggataaatagaaatgccttcgtgatcagacgcaaaaccggtggtgccaaaaagggccagctccggcgcggcggtatcatcagggttagcgttgtatttccggacgccaacggtttcgtctgaacagtatacataacccagcgcatggtctaccgctatggcctcaatctcctttttgccgctgtattggccaaatttgcgcaccagtgtgccggttacctggccctgcccgttatcgtgcaggcggtattgccagaggtagttgttcaccgggccgtttttacggccggcaatggcaaatatggcggtatccgcagggcgggtgtagagcgctatgcccatgggcgcgcgttctgtttcgccttcaaataccgggatgccgccgttgtctaccggctccaggccgggcagtttgaacacccgcagcatgttggtttccctttcagtgaccacggccacgtctacccgctggccgcccagcagcaggccgcacgcaatgtctacattgttggggcgttgcaggcgctccgttttacgtactattttgccgttgaggtcaaaagcgtagagcgcgccgttgctatccttgtctgtgccgatgatgaggctttgcagcgtatctgccgggttgatccagatggcgggatcgtccgtatcatgtgttacctgttcggtgatcaccgcgggctccagggcgccgggcgcttttgcgggctgctggcaggcgctgcacaacgcagccgcggccaggcatatcatgtattttccagtcattgttataagtcaaatttaaatccaaaattgtagcggggacggtaaaactccgcctgcatggtacggtctgcaacgccctggtaataacgcagcggctggttggtgaggttgttggcctctccgaacatgcgcagctggcgggtcagtttgaaagatgcgttggc

SEQ ID NO: 951 - DNA, 24293 bp, synthetic construct
  source 1..24293: mol_type = other DNA
  misc_feature 1..24293: note = Synthetic
aagttttccttttgaaaagcttttattcccgtaaaaattaatttgctttacaagaataaccgtaccttcatcaatcttaatttttaagaggacacgactcttcattctttctattgattcaacagctggtctatcactcaaatcaatttcggtaacgtacgtatcctcactatctaacttatttacccagtgaatttgaatttttttcttaagtgtatcgagataagaaaattcaagaatagatgtttttatctccgcattgagcattcctttttcttcataaagtcgaaggatattccttttcaatttactgatgtcttgaggttttaatgtttgccctttaattaaagtgacttctttctttaaatccttttcacctatctcatcattaccaacaaatacaaaatcttccagtcttggatattccttaactttaatgagaacataaataccatttccgacctgtctttcttttattaattgaacatcggaaaaaatattaagagccagaatcctttttattgcattaattgtcgcatcaccaggaatttgaatctcatcattaatttttaatccactagcagcaataataacagaaggatcggcagtcacattaccttcaactgaaacacctaaaatcttataagttggtagagtttgttgagcaatagaaatattactcacaaaaattaaaagaagaagcgacaggaattttaatttattttgatttcttaagagtaaaaacatttttaccatatcctttaatctgttcactaactaaaccgaattttctttctcttttctgatagtcttcaattgctttatataattccttcctcctaaaatctggccacagggtttcagttacaaaaagttctgtatatgcaatttcccagagtaaaaaattgcttactctcatttcaccgcttgttctgatcaataaatcaggttcaggaaattccgaagtggaaagatattttttgaaggtttcttcattaatctcagatttcgagatttttttacgagcaacatcatcagaaattttttttacagcttgaagaatatcccacctacccgaataactcaaggcaagaattaaatttaatcttttattgttttcagtctttttaattgcatctcttaattgcttttgaacttcatcggggagactttcaaaatcacctatcattctgagtctgatattatttttatgaagctcatctgtctcggttttaagtgttctaagaagcaatttcattaaagttgaaacttcctccttaggtctacgccaattttcagtggaaaatgcaaataatgtaagatattcaattccaagttgagcgcaagcttctactatatcacgaacacttttgacaccttcagaatgaccagcaacacgaggaagccctcttttctttgcccatctgccattgccgtccataataatggcgatatgtcttggtaaattacccttggcttttagcttttcttgaagtttttgatcgtcagatgattgcactctattcaattatatccttcaattattttattatagcaaaacaatttaataagattaaaacgaaaaaaaaataagttcaaaatcgcttgtaattaaataaattttccttgttttaataaatactcactaaaaagtttcaaaaaagctctgattgacaaacctaaaaatcaccagagtcactggtatagttcaaaaacattggaaatcaaatttcttatatttgtacaataataatcaaaattggagtcaaaaaatgacaatagacgaaatttcaaaattactcggcaatgaagcagactacttactaaaacatgaatgcaaaaccgttacaaaagatatgcttcatcttccaggacctgattttgttgatagaattttcttaccatccgatagaaatcctcaggttctgagaaatcttcaattactttttaatacaggtaggcttgcaaggactggatacctttcgattcttccagttgatcaaggtattgaacattcagcgggagcctcatttgcaccaaatccaatttatttcgatcctgaaaacatagtaaaacttgcaattgaaggtggatgcaatgcagttgcatcaactctaggtgttcttggttccgttgcaaggaaatatgctcataagattccatttattttgaaaatcaatcataatgaattcttaagttacccaaacacttatgatcaaattctttttgcatcagtcaaacaggcgtttgatttaggtgcagttgctgtcggtgcaacaatttattatggctcggctgaatcaaaaaggcaaatccaggaaatctctcaagcatttcagtatgcacacgaacttggaatggttacaattctctggtgttatttgagaaattctgcttttaaagttggtgataaagattatcatgttgcagccgatttgacaggacaggcaaatcatcttggtgcaacaatagaagctgatatcatcaaacaaaagttaccagaaactaatggtggtttcaacgcattgaaatttggaaaaacacacaagaaagtttatgaacaactaagcagtgatcatcccattgatttaacaaggtatcaagttgttaataattatatgggaaggattggattaataaattcaggtggtccatctggtgaaaatgattttgcagaagcagtaagaacagctgtaattaacaaaagagccggtggaatgggattaatttctggtcgaaaagcatttcagaaaccaatggcagatggtgtaaaattactcaatgcaattcaagatgtttacctgtgtaaagatgtaaccatcgcttaatcagttttacaaatttttaaacgccggattcaaaattgaatctggcgttttttgttttaaactactctaacaaaataaatcctccatttcatccaaaaccagaacaattcaactctattatttctcaaccggaaggcttaactctaattatagacaaaagaaaattttataattatttttaagtggtgaacccaatcttgttaagacactcttaaaaaactcatttttttaccacagaggcacagagataatttcattttttttcaaaaaaacattttcaaagcaattgcgactcaatctctgtgtatctccgtgttctctgtggtgactttaatcttattacaaaacattttgaaagcaaatcataattcttaattcataaatcaggacctgttagctattcgaaaaatcgtaaatcatcatttactacaatttgataaaaactattcccaaatttgatgtataaatcaagtataattcttgcactttatatttcattctcaaaaatcataaaaaattaaaaatagaagattccagttacattaatcatttgcatggaaataaatagataatctcaagacgtattttcaaaatcaaattatatgataaatgaaaaaattaaatcattgaaaatcattaaacctgattttaaactgaattgtcaataccacataatttttacaaaataagtaaactaaaaagcaataaaatgaaaacactatttatcatctgcattttttctattaatctttttggtcaacatggagttggtcctgttcagttaatacatcagctatttttatatataagttagagatgatataatgcttgcttattcaaccaatagaggattaacatggtcaatgcctgagtttgcaacagatcatcatgattcaacagctggatttaaaggtggcgcacttttaccatcaggtgaatatgtattgaactacgaactcattccaaaagatgatataactaatcccacaacttatgttagattacttgtgaaaaaacgtaatgctgtgttaacttctgtgcacaataaatcagagattacacattaccagttatatcaaaattacacgaatccatttaatccatcgacaacgattcgcttctttttacccgaaaatgaacatattacgttaacattctttaatgttctgaagctgactaaaaaatattattctgtcaaaatgaattcatctcatggtcctatttttagaacataaactcatacttagatgcggaaatgaattcggcatgacactttctggacaatacccattgattgatggagaaatgtcggctggtgaacattcgatagtttttgatgttaaggatttatcatgcggaatgtacttttttcaattaaaagcgccttcatttataaaagttttaaaagcagaagttttaaaatgaaagactatatagtaattgtatttattttaattatgttgttattcaccaatttactttctcaagaagtttacaaacccaaaggttgctccgcaagtactggacctaatgtatcaacaatagttcttaatcatccggagtctcgatatcaattaattgttgtaaaatggtcagagatagaaccttcacctggagtttttactttttctgctttaaaagacaaaatcaatcttgtaaaacaatacaataagaaatatgcactcgccgttggcatgggaggacctggatcaccatcctggttgatttattcttttcatgtgccatttgttgattataaatttcgaggtacaactccgtataaattgccgctgtggtgggacagcaccgtgcaaaaacgaattggaattatggttggaaaacttggtaatgaatttaaaaatgatacctcgctggcattagtatatatcacacaaatgacagcaaatggaatcgaggggcatttgcagggtgtgaatatggattcgatgcgagctaaaggatatacagcagaaaagtggatttctgcagccaaacaaacggcatattatttcgcaaatgcttttccaacaaaggcattggcattcgaaattcatgacattgaaaattcttccacaattccaataacaataatttcagatttagttaatgattcacttctaaaccatagaataggcgctgcaatctggtggctttccggaaaaacaacatatcaaccaaatctattgtctttcttaaaatctttctcctgcgataaatatgcacaaatgatagctcacagcggtcaaccagataggtttgctgatagtacaattgccacagcttttaagcaagccaaagaactcagagtgaggtatattgaattgtggtatgaggagtataaaaatcgaactattgattcgttattgcatgactttaataactgggttgactcagcatttattgtaacagatgtacttaaagaccaaaataatcttccttctggatttgaattatatcaaaattaccccaatccatttaatccatcgacaacgattcgcttctttttaccaagaactgaacatatcacactaaaaatttttaatgttcttggtgatgaaatcaccacactggttaatggagaaatgccggctggtgaacattcgattatctataacattaaaaatttgtccagcggtgtgtatttataccgcctgcaggcaggacaattcattgaccaaaaaaagatggttgtagttaaatgatccatcgcatacttttactattactgtatctttggacacttgctctatttactttagtatcaactgccattgcccaaacttcatcatatcgtttgttgtacgaagtcgatttgaaaaacgcactcgtaagcccataccgcaatgtactgaagatatatgacgtcgcagttgatgaagtacgcggtagagcgtatacttcaggaagccaaacagagtttgcttctatgattgacatcacctctggaaatgaaataggttccgttctgctggcatttccaccacagttgaatcaattgaagtgcaatcctgcaaatggttatcttctggcactaacaccatctacaacaccggtgaaaatgtacgcaatcaatcctgctaataatcaacatacaggaacctacacatatagaaccagagctggaggaatagacattgatgtaaccagtaatcatatattcctttccgatggcaatgccattaaaatcctcaatggagataatctcaacctgattgattcattccaggttggattcactgctggtggtgtcgcaattgactctacgaaccagttgatttatgtcgtgtcgcgcaacctcatagctggtaatgcagtgatcaaggtcttttcacttaattcaccattcacattatatcgaactataaatgttccatccagcgatattttaggcgatttaattctggatttacctaacaatcgcatttttttacttggtcagagagtcatcaaaaccattgaactcaactcaggcaatattattgctaccgcttacacaagtgcttcgacaaatagtaaagtatattctccgcttttgcaaaccattttcatgatagatgaagatggctattcttcccagggtgaacatggtagctggggtaagctttataaatatcaacccgacactggaattatggactctgtgaaaatgggagataagccatcacggttagcaatcgacaatatacgcaatgtgctgattgtaccaagtatgcactctggtattgttgagttgcttgatcttcagacaaacgcaattgatactgttgatgtcggtgaatcagcggatgaatttgcactctcacctaatggtgaaattttatatatcattaaacgtctgggcggtagtcgagtaattttatttaataaaagcacacacgaccttacgcaaatacgcgctggcaattggccctgtgttgcagaggtggattccagcctcgagagattgtttgtgctcaatgcctttgaaagcagtgtctcagttttcgattgcaataacaatgttttaattgcaacaattcctctttcaattctcgaaggtcgcacagacgcaatacctgtgatgcacctggatcaaccaacacatcgactttacatctgttttcctgagtatgaaaagattgtgatggtgaatggtcaatcactacaagaagaaggagtcgtaactattccaggttttaaatttaattccgaattacactcagctattggtgttgtccagttaattactgctccacaatatcagaaactctttgccctacaaaagctcgaaaagaaactcaagatttttgatctgaatactctggcatttcttgattccgttgacttaacaggactctggccagggaactcttcgtttttaagtaatttactggaatacgatgctatttcagggaacttgtttattggtaatctggtgataaatccagttaactatcagataagagcaatattacctgtgctagaacgtgttcttggctataaaaaagatcgtagtgttttatatggaatttctgcacgcaatggcgcagtggtcatttccgagcatgatacaaatactttttcggttctcaccttgaaaaatctttttcaacaatccggcaaagctacaccggtattttattatgatgctgtttccaacgatttatttattgctgaattcaattacgctgttttgcgacattatgatttagatagtacaactacttcagtagaaaatgaaacatcaatacttagcggatattttttagaacaaaattatcccaatcctttcaatccttctacaacaattcgtttttcaatacccgaaacagaatatgtaaccttgaaagtatttgatattctcggatgtgaaattacaacactggttaatggagaaatgcaggctggagagcattccgtaacgtttgatgcaaaggggttaccaagcggtgtgtatttttaccgcttgcaggcaggtcaatttgttcaacaaagaaaaatggtgattttcaaataaaggtgtaaattttgtatgctttatttttattgaaatattattaatttaaatgagattgtaaaaacaacggaagtacgggggcaaatttagacctctgttttttaattaaataattttaaaattaagaaaggaggtataaaaacatgcattctaactacaaacaatggatatcttattgcatagttatgctaagcatagggcttggcggatttggctcgataaatgcgcagagcctaacatggctgggcatatcgggagattatcaatgtggagcatcaagcgtttctgataacggggtggtggtcggaacagcacgaaactctcagtatgactataacgaacgcgcctatcgctggacagcagatagtggaaggcagtatttgggtacgctgggaggttggggcagctatgcaatggacgtttccgccgatggctctgtagtggtcgggatgtcttatggcacccccaatgagcgcgcttttcgctggacggtatcaagcggtatgtatgacctcggtacgttaggtggctgttgcagttcggcggaaggcgtttctgctgatggcggtgtagttgtaggggaggcatacaacaccagtagtaatacacatgcttttcgctggacggcggcagaagggatggaagatcttggcacgctgggaggttataagagtggggcatatagcgtttctgctgacggctctgtggtggttggatattcatataatgccagctaccgaacacgcgcagttcgctggactgcgacaggtggaatgcaggatctcggcacgcttggaggtgaatatagttcggcttatgacgtatctgccgacggctcggtggtggttggagaagcatataacgacagcttgcagatgcacgcctttcgctggaccactatgaatggcatggaggatctcggtacgctgtcaggaggcaattggagcaaggcggttagcgtctctgacgatggattgatagtagtcgggttttcaaacgtggtttcaggttataatcatgcctttcgctggacagcggttggcgggatggaagaccttaatgagatttatgttcatctgctgacggatgggtcaaggctttattctgccagtgctatctccccaaatggacgctatatcgtgggagttggctacaacgcaacaacaggacgcgaagaagcatacattttggacactcaagggacaagctcggtagctgagcaagtggtaaccaattatcaattgtaccagaattatcccaatcctttcaatccttctacaacaattcgtttttcaatacccgaaacagaatttgtaaccttgaaagtatttgatattctcggatgtgaaattacaacactggttaatggagaaatgcaggctggagagcataccgtaatcttcaacgcaaaagatttacccggtggtgtttatttctatcaattgaaaacaggtggattaattcaaacaaaaaaagcaactttaattaaataatgactaattcatttgcttaaattcatctcaaattgcgaataaagaatttagattcattcttttattcctgagcttaagtttgaagtgagcgtttgaaattattaatcaattattcattttatttacatgagaatttcagaagattcaatcaaagaagtacttgatgctttagatatcgtcacggttatcagcaactatgttaatctaagacagaattgaaacttttgcgaaaaagtttggaattaaattgaagtacgaagatggattcatttcagaaaccaatggcagatggtgtaaaattactcaatgcaattcaagatatttacctgtgtaaagatgtaaccatcgcttaatcagtttttacaaatttttaaacgccaggttcaaaattgaatctggcgttttttgttttaaactaatctctcaaaataaatcctccatttcatccaaaaccagaacaattcaactctattatttctcaactggaaggctcaattctaattatagacaaaagaaaattttataattatttttaagtggaaacaatcgtttaattaatcgagcaagaaaatttaaaacaacaatcccgacctgagtcgggactgttgtaagatattcactacggaataatccttattgtgatttgctactgcaaatatcatttattaaaaattaaaaatcaaatgggagacattaaaatgaaaaaactcctcgggctggatataggcacaaactcaattggttgggcattaattgattatgattttgacaacaaaactggagaaattaaagcgttaggctcaagaataattcctcttgaagccgacaaattaaaagactttcaacagggtcgttctgcttctttagctgccgaaagaaggatggcaagacagggaagaagattaaagtatagatacaaactgagaagggaaagattgattaaagtttttaagatccttggttggtttccccaaaatttcccggaaaaatttgaagaggatgatcactttaacataaatgatttcgttccattttccgatcaaaccattcaagaagctaaagaacttttcaatgttgttaatctacccaacgattgggcaatttactatctgagagataaagctttaagagaacagattagtttacagttactggctcgaattatttaccactttaatcagagaagaggatttaaatcatcaagaattgaaaacaaaagtcctgatgtagtagaacaggaagtttttcctaagacagaaacattttatgaatttcttaaaatcacatcgattaaagagactactgaaaaaagaaaatccaatcgagtatttattgttgaaggtaaaactaaagataatgtaacttactcaggtactctatcgagaaaaaccaaaccagattggctgaatcaggaaattgaattagaaattaccaagacaacgaagaaagacggtacagtttctttcactttcaaagaacctgatagatcaaattgggaagaaagaaaattagcattagaaaaagatatcaaactctccggtctatatgttggtcaatatcatctcaaaaaactgttagaggacagaaattatagaatcaaagaacagattgtagatagaaaattctatcaagaagaacttgaagcaatctggaaatcacaagagagattctatcccgaactaaaaaacaatccaaagattgaagtaattgcaaaaactctttatcaacacaacgaacaaaaacaaaaggaactgcaaaaattaagtctcctcgagattatcaaagatgatataatttattttcaaagaccactcaaatcacagaagaaattaattggagaatgccgtttcgaaaagaaaaatttcatcgatcaatatggaagacaaccaggatacaaagtcgcacctaaaagttctcctatctttcaagaatatagaatctggcaaacaatcaataatcttagaatattcaaaagagaagaaaaacaacctgacggtaaatttaaattcgatgttgaaaaaacagacgaagtcttgaacatcgaaaacaaggaaaaactatttaaactatttgattcaaaagatgatgttaaaattgatgaaataataaaagctattggtttatcaccagacgaatatcgaatcaattttcctcaggatagagaactaaaagggaatgaaacaaaagcagcttttcgacgagttttcaaaagacacaacttcatcgaagaaggtgaaaaaattttagaaaacagagaattattttttaatctctggcacttaacttactctgtcaccgatgaaaatcaattatctaaatcattaattaaaaaattcaactttagcgaagatctggcaatacatatttccaaaatgcctccattcaaaaaagaatacgctgcttactcatccaaagcacttaaaaaacttgtgcctctgatgcgttgcggaaattactggaacgaaaaagaaattgatccttcaacaaaacaaagaattgagaaaataattgatggaagcttaaagtcttcattccccgaggaaataataagcaaactatattcaggttcatataaatcaatttctgatttccagggattacctgtttatcttgcctgttatgttgtctatggcaaacactctgaaagagaactctatgaaaaatttgacagtccagatgaaatagatcacttaaaaatgcttcctactaactccctccgaaatccagttgttgaaaaagtaattcgtgaaacacttctggttgtcaaagatatctgggcacaatacggaagacccgatgaaattcatattgagcttgcaagagacttgaaacgaaatgcgaaggaaagagaaattcttacaaagcaaatgcttgagaatgaaaaagaaagaaaaagaattgctgaaatcttgaaatacattaaaaatgcaaatccaaattctccaatggatatagaaagattaagattgtgggaagaacttggaacgaaagaagcaaaagaaacatttccaaaactttcggcaaacccgactaaagctgaaatacaaaaatatctcctatggggtgaacaaaatcatatttccccttacacaggaaaagtaatcccgctaagtaaattattcaccgaaaagtatgaaatagaacatatcatccccaaatcgagatattttgataactctctggcaaacaaaacaatttgcgaagcagaagtgaaccgatttaaagaaaatcttacagcaatggaattaattcaacaatatggtgggactactattccaaatactaaaattaaactcctcactttagaagaatatacacaacacatcaaatcaactttcagaggacgaaaattatctaatttcatgcggttagaaattccagaaaactttattaaccgacagattaatgaaactcgatatataactcgaaaacttggcgaattgctctatcccgttgcaaaggaaagtttaatctttacaataggttcaattacttcagaactaaaagaaaaatggggattaaacaaagtctggaaagaaattattaaaccaagattcgaaaggctcgaaaaaattacaggcgataaatttatcttttacgacaaagagacaaacaactttcactttgctaaagattataaaagaattgatcatcgtcatcatgccctcgatgctcttgtgattggattaactcaaagagaacatatcaggtatttaaattctcttaacgctgttgattcatcagacgagctaatggaagttaaatacaggcttgttaaaaaaggaattcgggaatttcatcttccctggaaaacattcactaaagatgcaaaagaaaaattaaaagaagtgattgtatcgtttaaaaacaaaattcgtgtcgttcagcgtggtagaaataaatactggaaatgggttaatgaaaatggtaaatggtttaagaaattagtgcctcaggataattctaaattgtttactgtcaggaaatcactgttcaaagaaccatctggaattataaacattgctgaatataaagatgttaatatcaacgaagccgttaaatatcaatttgaatacctgacaaacaggcaaagtaatcttcaggaaaggattgccaacaaaaaactcagaaagaagattaatgaacttatcaagaattgtaattttgatttgaatgaaactcttgaacatcttaaaaaatatcccctcaaagatgataaaggaaataaactaaagaaagttaccattctttactttaaagaatattcagctaaacgagtaagccttgatcaatcttttgatgaaaggaaaatagacaaaattccttactcaaatcatcctgataaccggctcgtaaaattgcttaagaaccatctcaaagaatttaataacaatccaaaagatgcttttactggcgaaggacttgaacagctgtataaaaagtatggtaagccaattagaaaaatcacaataatggaagaagtcgggaaaaaaattccaattaaaggaaaatactttgaagttgataaggggacaaatctattctttgtaatctatgaaaacataaacgacccaacagatagaatcattgatgaaaattcttcaatttcaatagttgatgcacttcaagtctttatcaatggtggtaaaaaagaagaccttggtgaaaataaacctggctataaaaaaattattctctccccaaatgaccttgtctatgtacccgaaccaggcgaaacagttaatcttattgactggaataacaaagctaaattatcacagaggatatacaaggtggttaattttacaaaatctcaaatattttttataccccattttattgccgagccaattatacaaacaaccgagcttggttcaaacaacaaagcagaaagaagctgggatggaataatgattaaaaaggtgtgtataaaattaaaagtggatcgacttggaaatatatcaccagaaatttaggtggtaactatgataaaaagaattctttattttgggtcatctgcttatctttcaaaggaaaataatcagcttaaagtaagtttccctgaaaaatcagagaaaaaggaaatggataaatatcttttaagaataaatgaaattccctccacaatccctatagaagatatcggtgtagtaattctggataatcctcaaattacattaacccaatcattaatgtctgctttgctggaaaacaatgcagctataataacctgtaattcaaggcatatgcctcaaggaatgtttctaattcttgaaagcaatattgaacaaagtcagcattttcaagatcaaataaatgcatctctaccattaaaaaagaatttatggcaacaaactatttcagcaaaaatttttaatcaggcaatggttcttgctaaaagaaacaaatccgttgaaaacttgaagaagtgggcaaaggcagttcgttctggtgatccagataatttagaaggcagagcggcaaactattactggaaagtcctttttccagaagacctccattttattagagatcgtgatggtgagccaccgaataacctgctcaattatggttatgcaattttaagagcaactgttgcaagaggacttgtagcttcaggacttttgccaacactgggaattcaccacaaaagtaaatacaacgctttttgccttgctgatgatattatggagccatatcgtccatttgttgatgatattgttgcaacaatagttgaaaatggagaggatttcaccgaattgcatccatcaattaaagaacaattacttcaaattccagcaatagatgttcatattgatggagaaacaagacctttaatgataggactccaaagaacaacagcatcgcttgcaagatgttttgcaggagagtcaaaaaaaataatttacccggtttttaaatatgaggttaaaccagtatagaattatgtggattttagttttatttgatttacctacggaaactgaaaaagatcgtagagcttacacaaaattcaggaatgatttattaaaagaaggctttaatatgtttcaattttcaatctatataagacattgtatgagcaaagaaaacgcaagagttcatattgaaagggtaaaaaaattgttaccgccaaagggtcatatcgggattttaacaattacagacaggcaatttgaaatgatggaaatattttacggtacagaaaaacaagaacaaaaacttcctgagggtcatcaattatcactcttttaaaaaaattaaagcggtgaaaattcaccgctttaatcaatttttaaagtgaaccaacccattttttttattgtgaattttccataagtgattgatttttaatgggttatttaataatgagttgattccaatcttgtcaaaaaacattttgaaagcaaatcacaacgaagttggcaattcaatccgaagtttgcgggttgattccaatcttgtcaaaaaacattttgaaagcaaatcacaacttttcaatgataaggagctatcagaataaggttgattccaatcttgtcaaaaaacattttgaaagcaaatcacaaccaaaacttcagttaaactaatcaaatactcgttgattccaatcttgtcaaaaaacattttgaaagcaaatcacaactgaaaaagattgagaagaagtgatgagatggttgattccaatcttgtcaaaaaacattttgaaagcaaatcacaacctaccttcacttattatctgtcgaattattgttgattccaatcttgtcaaaaaacattttgaaagcaaatcacaactcaaacattagtagcacaaacaacaattttgttgattccaatcttgtcaaaaaacattttgaaagcaaatcacaacatggaagtttatctttacttttttgttaaggttgattccaatcttgtcaaaaaacattttgaaagcaaatcacaactcagataacgaaagttggattgaaagtgttgttgattccaatcttgtcaaaaaacattttgaaagcaaatcacaactagtcaatacatttgatgttgaagaagaaggttgattccaatcttgtcaaaaaacattttgaaagcaaatcacaacgaagagattgaagacgaaattgattatcaaagttgattccaatcttgtcaaaaaacattttgaaagcaaatcacaaccttgtatttggcgtgttacaatttcaatcagttgattccaatcttgtcaaaaaacattttgaaagcaaatcacaaccaattttttcaaatgtttttatagcaatatgttgattccaatcttgtcaaaaaacattttgaaagcaaatcacaacgattttctcaactttattaccataatacaagttgattccaatcttgtcaaaaaacattttgaaagcaaatcacaactaagcttcaaagggaacatcgagatgggatgttgattccaatcttgtcaaaaaacattttgaaagcaaatcacaaccaggtatatgcctgctaatttgccaagtatgttgattccaatcttgtcaaaaaacattttgaaagcaaatcacaacttatatactccccgacatctacaccatttcgttgattccaatcttgtcaaaaaacattttgaaagcaaatcacaactgagcttcagctccagcacctttgtgccaagttgattccaatcttgtcaaaaaacattttgaaagcaaatcacaaccctttcaatgaaaaaaaattattacaggaggttgattccaatcttgtcaaaaaacattttgaaagcaaatcacaacgacacacgctgaaattattgctgaaatggggttgattccaatcttgtcaaaaaacattttgaaagcaaatcacaactctgttaataatgtgattgattatcgaccagttgattccaatcttgtcaaaaaacattttgaaagcaaatcacaacagttttggatctagcttgtgaaaaatatgagttgattccaatcttgtcaaaaaacattttgaaagcaaatcacaacgatctcgttttcagtatgcgacaaaatttcgttgattccaatcttgtcaaaaaacattttgaaagcaaatcacaactatgcaaccaactcttgcaatttgtcaattgttgattccaatcttgtcaaaaaacattttgaaagcaaatcacaactcaagtttacccccggaaatattccgggaggttgattccaatcttgtcaaaaaacattttgaaagcaaatcacaactaatcttttgtcgtattctttaacttgtttgttgattccaatcttgtcaaaaaacattttgaaagcaaatcacaacaagttcaacgcaccaatcttttacggaagagttgattccaatcttgtcaaaaaacattttgaaagcaaatcacaactcaatctctgtgtttctttgtgaactctgtggtaaacccaaccttgctaaaaaacactcttaaaaatctcatttttttaccacagaggcacagagataatttcatttttttcaaaaaaacattttcaaagcaattgcgacttaatctctgtgtatctccgtgtgctctgtggtgacttcaatcttattacaaaacattttgaaagaaaatcatgactcttaatccatcaatcccggctcacaaataattatttctctccttagcttaaatttgcagttagcttttgaaactattaatcaattacttattttatttacatgagaatttcagaagattcaatcaaagaagtacttgacgctgcagatatcgtcacggttatcagtgactatgttaatctaagacagagtggtagaaattttgttgctctatgtccttttcacaaagaaaaaactccttcctttactgttagcagagaaaaaggtttgtttcattgtttcggttgtggtgccggtggaaatgtcgtttctttcctaatgaaattagaaaaactcactttcgttgatgcaattgaaactttagcaaaaaagttcgggattaaattaaagtacgaaggtggatttaattcagatgaagataaagagttagagaatctctacgaatattctctcctggcaatgcagttcttccataaaaatctacttgaaaccaatgaaggaagatcagcacttaaatacttaaaagatcgtggaattgatgaagcgacaatcaaagcatttaagctgggttatgcacttggtgcctgggatggactctacaactttataaaaacaaataaatacgaacctgagatatttgaaaaattaggtctgataatcaaaaaagaagatggtgattattacgatcgttttcgtggtagaattatcttcccgattttttcaacaattggtagagtaatcgcatttggtggaagaattctaatcgatgaaaaagatcaaccaaaatatctcaactctcccgaatctcgaatttatatcaaaggcaaaactctctttggcttatttcaaaccaaagatgaaataagaagaactcagtcggcaatattagttgaaggctatatggattttctttctctttaccaaaaagggataagaaatgttgttgcatctgccgggacatcacttacaatagatcaaatctatattctttctaaagttgctcctaacatcaacctgatttttgatggagatgaagccggtcaaaaagctgctgttcgttcgattgaattgatgcttcaaactgatgtcaattttaaaattgtttccttacctgaaaatgaagaccccgactcatttattcgaaaatcgggaagagaaaaatttctcgaattagttgaagatggaaaaaattacattgattatgtttttgaactcgcatcaaaaagaaatgctcttaacgatactaactcaaaattaaaagtaattgacagtttgcttgaatatacttcgaaggttcgtgaccctttgcggagagaaattttagccagagaaatcgctaaaaaatttaatgtgactgtaaactcagtaattcaaaaattaaacaaacatcttaagaactacattaaaacagaagagaagcaatttgaatatcaaaacaacttttacagtcaaacaaacgacacaaaactgaatgatgaaatttctcctcttgaaaaagggatcttaaaactcatctgtgaagttgaccacatttatctcgaaccgatttttgcacacattgatgaagaagattttttgaatcctaaagctggagaaatttttaaggttctcaagcaatattatcttgaactcacctctgaccagaagattgatgctcaattggtcattaataaattagaaaaagatgaacttaaaagtattctttccgatgcattgattgaaaaatacaaagtaagtgatggatgggaagaagttcagtattatcctaatccggaaaatgacctcagaaaaatgattattgattatataaaaaagctaaaagatatttctctcaacaaaaagattgatgaattaaataaaaaatgtctaaatacaattgaccttacagaaagcaaaaaaatacttgaagaaatcgataagttgaacaaacagaaaaatctttatcagaaattagaattcaattttgattgaacctgtttccttccttcaacgctttcaaaaaagagaatagataactaacagcaattagaagacagccagaagaaaaaagaaaccatttaaatttttgagggataaaatttcgaacagcttcccagaattctggtttttctgttatgctggcaaaatccctccagaaattatttttgctcatcaactggaaataatcataaataaaagtataaatgataatcagtaccccgagaacaataattaaaacttgaagtagcttaaatcttatttgataattcttttcatttaaataaacataaatcagagcaatcaaaatcattccagctgagcaaattaaaggtgcaaggactggtccaacccaggtgattggaattaagaataatatatcccaggttaataaactctcaggccaatcaaggaaaagtttgagggcgacataataaaagatatcccacacagcaaaagtaaaaatgaaaaacgagaatcgttcacttaattttttcccgagtatccacccaaaagttacaagcattattattgttgaaatttctctaacaatttcaatttgaatcatctgtggttcaagtagagtaagtggaaatgaaaaaccctggggataataaatttttcgaagatagactacgacaatagcctcaagaaatccaaaggcaattccaaagatggttgctggaataaagcgtttcataagctacctgcaaagtttgttcattccttcttaaataaaaataaaaaattggaagaaagtttttttggccagaaaaaattcagttaaacaccaaataaataagactgaggttaaggtaaaaaatcaaattcattaaccttaacctcaaaactcaaaattaaattttataattcatttaagagatgatcgacatctttctgctcaattggtccatcaataactattataaatctatccagtgtaaaatatttcttagccagtcttataacatcatcactggtaacttttaaaatcctgtcagcctttttatcaaagtaatcgagaggttttccttcttgaattaattcaaaaactcttgaagcaatatcgtcaggtgtctcgacatacaatggtagtaaactcaataatctgactttagcagtttttaattcctcgtcagtaattccattatcaattagatttttgatttcagaaaaaattccttttataactttgtcaacattctgcggagctgtttttgtattaaatttccagtagccgattccatcagtagtggaccacaattcacttttaattccataaatcaatccctgtttatctcttaaattgactccaattcttgatgtcaatgcacttgaagcgagaatgtaattcaaaacattaacagcatcttcttcctcagcaggaatgttattgaaaggagaaaaaccaatattaattgtgcactgagtataatctttctcggtgaacactttaatctctttaccttcaagaggttttacttcgggcattatcttataatctggtactggttttctggttttgaattcagaaaaatatttttccgcaatcttgattagttctttgtgtgtgtaatctcccataatcacaactgacatcaactctggttgaaaatatttattccacagttgaattaaatcttccttcgttatcttgtttaatgcttcttctgtacttaagtactgagaataaggatgatctttgaaaatcttattgaacatatagtaaaacgccttgacatttgttctcttgaaacgatttctcgcttgaattaaatgcctgcttctcaattcttcaatttctctgtcatcaaatcttggagcctttaagatatcgagtcctgtcttcatcatttcattcagatcgtctttcaaacaataaccctgaaaataaattctacgataatttgcctgaacactaaattgaaatggaacgaaagaaactttatcaatgaactcatcatatgttagattttttggtcctcgatttattacatcggttaaaaggtcaacaatacctggtttttgatttccaatagcttcttcaataaaaccaggttgaacaacaccgccaatataaatcgaaggtgtgaggtgattttcaatcgtataaacagtaattccatttttcaattttgatgacttcacaagtggagcgatggaaattggttttaaaatatctttaaaatcttcttcttcaatttgatttactaaatcaattaacacttcttccggtttgaaatagaatttaccatcaaacacatcaatcttttcttcctgctcttctttaagttcttcatcttccttttctgatttttgaggattctttggatagagataagcaactgtcacctgttcaggattaaaatattttttcataactctctgaatatcttcacgagtgacagattttactcgattactaaaagtatcgataaattcataattaacataattttcatagagacttaacctcgaaccgatatcagcatttttggtgtagctcgtcaattcatcaaaacggaatctattttttgctttctgcaattctctttcagttacaagagagtcttgaagttttttaatttcctcccatacgattttttcaacactatcaacattcacatcgggtttcaaaacaattgagatttgataaagagttggatctttggtaaaaccaaatcctccagctgcagcagtagccagtttttctttttcaacgagtctattgtaaagtcgagcacttcgagcttttgcagtaaaaattctttgaacaagtttcaatgctggtgcatccggatgttgataattagggacatgaaaagccattcttagaactggttgagttacatcattgtgatataaagtaaatgttttccttacaatttgattttgcaaatcaacatttagtttaggaacatcaggacctggtggaatctttccataatatttttttacaagttcgatgattttttcggtctcaaaatctcccaccagaacaagaatagaattatttggagtatagaatgttttgtaataagtgaaggcatcatctcttgtaatacttcttaaatccgtgggccatccaatgacagggtctcgatttggatgagcatcataggcaattgcattcatcatctcatgggcaataccatttgatgtactttctgttctcatccttcgttcttgaattactacttcgacttcagatttgaattcatcaggatcaaaaatgcaattctgcattctgtctgactcaatatccattgcaagttcaattttattttttggcagatattcataataacttgtcatatcattcattgtaaaagcgttaaatactccaccatttttagaaattgtttttgaagcaacacctttgggatatttctctgtacctttgaacatcatatgttctacaacatgacttattccagtaattccaaggcgttcatttcttgaacccacacgatatgtcagttgatgataaatatatggagcaagatgtcgttccatagttagaacaacaagtccattctcaagttgatgtcgatagactttaccttcttcatattttttctgttgagcaggtaaatcagtattagaaagaataaaaaataaaatgcttatcaaagtaaagattaagtttttcattgttcttctgtagctccttcttgaatttttgtttttctaaattttttgagtcgttgaagcgattgttccaccagtgcttttctttcatctatcgaaagttctttgaagactggtttaaagtttgagttagcaagatttgatattgcaagaaatcccagttttgttactctctcgagtttatcaaaattaattttattataatcatcttctggtgtatgataatcgtcgtgcagacctgtaaagaaaaatgctgagggtatgttctttcttaaaaatggtgcttgatcacttgcaaagtttaataaaccagtattgtaaagcatctcaaattttgttgagtcatttgaattttcgattaactttttgatgtcgtcactataaaatgcaccaccaatccagagtaattcaggttcatttctaccaatcatatcaaaattaaacatggcaatagttttatcaagtggttttaaaggttgataataaacataaaacttcgagccgagtaaaccattttcctcaccactgaaagcaataaaaatgagactcctctttggtttctcgattgaaaaagcttcggcaagttcaattaatgcacttgtacccgatgcattatcatcagcaccattatgaatttttcctgtatcggatgaattcatcgctccataatatcctaatccaacatgatcataatgagctccaattacaataaattcatctttaagtgattcatcagag

SEQ ID NO: 952 - DNA, 24284 bp, synthetic construct
  source 1..24284: mol_type = other DNA
  misc_feature 1..24284: note = Synthetic
tagatctctgttcagctcccggctcaaaaacaactcttctatccgaattgatgaataacgaaggttttatccttgcaaatgaaatttcgcttgatcgtgcaaaagctttgatgtttaatattgatcgacttggaaatttgaacattactatttccaactatgatggggttcgattagcttctcattttataaattacttcgacaaagttcttgttgatcctccctgtactgcacttggcgataccagatcaactcctcaaaaacaaattgagagaaacttaagtcgtctcgaaaatctaacgcaaattcaatatcaattgctcgtctcagcagcaaagatggtgaaagtcaacggagagattgtttattctacctgcacaaccacacttgaagaaaatgaatatctaattgataagtttttagctaaatatccttttgaggtaattgagcataatctttcagaattcaaaaccggaaattttgttggcaaaaatgtccgtgatgaactttttcgttcaattcgcattgatccaaccgaagatgaggaaggattttttattgtcaaattgaaaaagaaaaacaatttttctgatcacgaaaatttacaggagagcagtttcaatttcaacgaaaaaatatttgatgctgactcaaaagaaattaaagagattattcatcaaatttcgaataactatggtattgatgaaaatttctgtaaagattttctttttatcttgagaagcggggatgtttatttcatttcaaggaacgattttgattacagcagaattaaattcttgcgaatcgggataaagcttgcttcacttgataaaaaaacaggatggagattaacttcaaacgctgtccaaattttaggcaataatcttactcaaaacatattaaatctggagaataaagatcaattaaaaacatattttatggggcaaaagacaaaagttgattttcccgattcaagtttcgttgtggttaagtataatgattacttcattggaagcgggaaagtaaaggattcgattttactttcatatttcccaagaagcagaagaacaattgaaattgatttttctttaattccttgattacaaggtaaatgtctctccgacttcgtaaatcataacctgagttttgtactttggagccgattttttcaaccactgaactggctcatcaaatggttctcttccgtggggaaatgttcttgtgtgcattggaaggaaatattttgctttgagatcatcagccatcatcaatgcttcttcaggatcgcaatgcgacattctccagggattgtaagctccaattggcattattgctacatctatgttttcgtttccatatttttttaaccaatctatgtaagcagtatctcctccaaagaaaattttctttcccattctttcaataatataagcattaaaacttctcccattttgaaatccttttgatctgtcttcctgccaaggatatcgccagccaaaatgtttaaccctgatagctctaatttttaaatccgaaatttctgttgtttcatcccaatcaagttcgattatttctttaaatggaagattttcaataacatcttttgttttgaatgctgtaataaccggaattttatttgaaaatttttctgcgaaatatttcaatgtcgggtaatccatatggtcaaaatgtgcatgcgatagaagaattaaatctggttgtggaattttttccggtctgaccgcaggtgcaatgattcttttcggacccagatttgtaattaaagcatagagtccaattcgatttgaaaaaacagggtcagttaaaattatcttgccgtaaaagttaatcagataagttgaatgcccaatccagcaaaaatttattttatcatttgtccaataactaagatcgggtttgaaaggtgcttccttaggttcaagactatctgtcgcagcgaaaagtttttcaaaaattcctgataacagaataccgaaggaaccagctgaaaagatcttcaaaaattctcttcttttcatcattgattgtttgagttgtttaaattgatccttcttttctctgtgattatggttcgaatagtaatggttgataaaattatcaatccacccaggattgcatagggagaaggtttttcaccgtatccaatataaacccaaattggattcataaccggctcaatcattgcgattaaagcagcttcaattccttcgattcttttaattgagtaagtaaagaccgcataagctaaaccgatctgaaatattcctaaataagcaaccatcagaaaattctttaaatcaatttgaaattctggatacacagaaaagaaacatagaactggaatgaaaatgttcccccagaaaattgatgggacccgaaattcttcgctgctttttcttattccgattaaaaatgcggcaaagcaaactccagaaagcaaggcaaccagattcccctccatatgcgtgggagaaatttcaccaacaaaaaacaaaatcattccaataaacgaaataaaaacagcgattacatttataggcttaagtttggttttaagaatcaatggttcaaagattaaaacataaataggagcagtatactgaagaaaaattgcattggctgcggttgttagtttagttgcaacaacaaaaagaataagaattccagcatagaacaatccattaattaagattgggaaattaaaaacaaaaactttctttctaaaaagcaaaatgaaagtcaaagcagaaaaaagcgaacgataaaatgaaagctggtacgcatcaagtgaaattagttttataaataaaccacccgtgctccagagcagagctgctgttacaattgctataattcctttacgatgttcagtcataatttttcagaattttttgtttattaatttaattgaatttttaatagatgaaaaaattgtaattcgatcaatgaacaaaaatataaaatgattatttgcacacgataagtctaacatcaatcagaaaaaacatttttagattatcaagaaacaaatttagagcttaaatcatctaatgtgctggaaatttactgatcattttcaaataaagtcttttatttttaatttttagtatgtctacgccattaatgaagcaatattataagataaagcaaaaataccctgatactattttgcttttcaggatgggtgatttttacgaaacttttgaagacgatgctgtaattacttcaaaagtacttggaattacattaaccaaaagagcccatggtgcatcaggtgatgttccacttgctggatttccacatcatgccctcgattcttacttaccaaaattgattcgagccggatatagagttgctatctgcgagcagcttgaagatcctaaatttgccaaaggaattgtcaaacgagatgtgattgaagtcgtcacacccggtgttgcattctctgaaaaattgctcgaccataaatcaaataattatttatgtggaatttacattaaagatgataaagcaggaattgcttttgccgatgtatcaactggtgaattttatacaaccgagatcccgttcaaaaaaataaaagaaactcttgaatcaatcacgcctgcagaagttttgatctccaaacgagaattgtccaaacttcaatccatatttgatcaaattccattcaaatttacaattacaaaagtagacgattggatcttttcatatgagtattgtttcgaaatactcacgatgaattttaaaacaacatcgcttaaaggttttgggatcgataacaatcaaactgaagccataattgcagcaggagttgttctccattatcttcaggaaactcaaaaagcaaatctttctcatattaaaaaactctctctttacaacccaactgatttcatgattttagatccagcaacaaaaagaaatcttgagatacttgcttcgatgtcagatggttcgagagctggttcgttaatttctattttagataaaactaaaacttcaatgggcggaaggctcctcaaaaaatgggtttctctgccactcttgaaacttgaacaaattcaaaatcgtcttgaagctgttgatgagctatttcaaaatgaaaatctcagaaatcaacttgcagaagaattaaaacaaattggcgatctggaaagaatcatttctaaaatatgcaccggcagagcaaatccaagagatgtgattaacttaaaattaagcttgaaaaggatccccgttattaaagacattctgcgaaatgtaaaatcccttgctttgcaaaaaattcgtgataatttaattggactgacttacattgttgataaaattgaaacgatgcttgttgatgatcctccgctaaatattgcagatggcggagtgattaaagccggttttaatgccgaacttgatgaactgcgaaatctttccacttcgggcaaagattatcttgctcaacttcaagcaagagaaagggaaagaactcagattccttctttgaaagttgcttacaataaagttttcggttattacatcgaagtatctaacgctcacaagaacaaagtccctcaagattacattcggaaacaaactcttgtaaatgctgaaagatacattacacctgaattaaaacaatatgaagaaaaaatcttaaatgctgaagaaagaatttatcaactggaaacagaatttttcaatgaattgagaataactatatcagatgaagccgaaaaagttcaaaagaatgcacaactgatagcagcacttgattgcttcttaagttttgcagaagtagcaattgaaaacaattatgttaaacctgaagtcaacgacgatgatgcaataattattaaaaatggaagacatccagttgtagaaaagattcttccttatggagaaaaatttactcctaacgatacatatttggataattcaaccaatcaaattatgatcattactggaccaaatatgtctggtaagtcggtctatcttcgacaggttggattaatagttctgctcgctcagattggttcatttgtcccagccgaaagtgcccgaataggaattgtagataaaatctttgcacgagttggagcttctgataatcttgctgccggcgaatctactttcctggttgaaatgcacgaaacagcaaatatcgtaaacaacgctactccaaaaagtttaatcctcctcgatgaagttggtagaggaacaagtactttcgatggcttatctatcgcctgggctttgacagaatatcttcatgaaaatattaatgtagcagctaaaactttatttgccactcactatcatgaattaaatgagctcgcaaatatttatccaagaattgtgaattataaagttgatgttaaagaagttggcgataaagttattttccttcacaaagttgttcccggctatgctgatcatagttatggaattcaggttgcagagatggctggacttccgttttcaattacaaaaagagccaagcaaattcttaaaaatcttgaaagcaaagaactaagtccattagaccatcgtaaaaagaaagcgaagcaagaagaggaagaaattcaattatccctgtttgaaattagagatgatcctctcagaaaagaacttgaagaacttgaaatcgaaaaacttactccaattgaagctttgataaaactaaacgaacttaaaaacaaaacaaaacagaattgaaaggaatatgactttgacaaaacaattaattgtggttggagatcgtgtcttaataagacccgatgaagcacatgaaagaacaagtgctggtttatatcttccacctggcgtaaaagaaaaagaaaaagtgcaaagcggttatgtcgtcaaagttggaccaggctacccaattccaactccagatgttgttgatgatgaaccatggaaagaaaaaaaagagaagcctaagtatttaccactccaggctaaggaaggtgattacgcaattttcctaagagatcaagctgtagaattcgaatttgagaacaaaaaatacttgattgttccacacagtgcaattttggtcttattaagagatgaatttctcgaagagtaattcaaagctatttcattgagattaaagctcaaccgcaagcagttacaaaaagttattctgctaatttttgtaaaatcttttctttgattttttcagctgacggtattccatttggataaaatctacaggcaaggacaggttcttcaggttcgggcaaatcttcaatatcctgtccatttataagtaaagttggtgatccacgaaatttaaactttttggctgtctcatcatcttcaactaaaattttttcaagctcaattttatcttcaagtcctttaatcgcttcaagtaagtttttgtgaagtttttcatgatttggacaaccttcaaaatactggaattgcagcttcagtttcattgtattctaatctccttttttagtcgttattatgtgtaatgatcattatggaaaataataaaaaccataattcataatataaaaaaatcgaacaagcaagaagatcttttgtttattaaatcagatttcaatcaatcaacccgagattttttagaaattaaaagaataatctaacgaaatgaaaggtttttaaaatcttactggctctttttaacttgcagaaaaaattagcagaaaagaatgaaacgagtaaccgtctttttaccatacagtaatcgagaacattcaaacttattaataaatgaatttctctatcatccgcttgtagaaaaaataattttaatagctgatcaaaattataataatggttttaccaccattgtttcaaaatccattttttcgtctaaagttattcaagaagttctgaaacttgcaacaagcgattactttttacttgtaacaaaagatactttgatcagactaaatcaatttgctcttgaaagatttatctcttttgcagaaacttacgatgcctctcttctttattcagattattatgatttgaataatgataaaaaaacacctcatcccgttcaggattatctgcctggaagtgtaagggacaacttcaactttggtccgcttttattcttctcaaataaaaaaattcaacagataaaaaaatctttcggaaatctttctcaaaccaattatgcaggactctacgaattacgcttacgaattgccaccgaatatttccagaagaaaaattcaaatcctattctgcgaattcctgaatatctttactcacagattgaaaccgatatcagaaaatctggagaaaaactttttgattacgtagatcccaaaaaccgagaagcacaaattgaatttgaaatagtcttcacaaaattcttaaaacaaattggagcttaccttccaccaaagtttgaaaaaattccagccgatgaaacagaatttccagtcaaagcaactgtcattattcctgttttaaatcgcgtcaatacaattggagatgcaatagaaagtgtatttaagcaaaagactgatttttcgttcaattgtattgtagtggataatcacagcacagatggaacaactgaaaaactcaaagaactttcttataaatatcctaaactatttcacatcatacctaaatctaaaactctcggaattggcggatgctggaacgaagcaatctttcacgatagatgcgggaaatatgctgttcaacttgattcagacgatatttacgctgatgaaaatacacttcaaagaattgttgatttattagataccgggaaatatgcagctgtaattggttcctacaggatggtaaacttcgacttgaaagaaattccacctggaataattgatcatagagaatggactgataacaatggaagaaataatgctttaagaattaatggacttggtgcgccgagagcatacagaacttcgcttctgcggaaaattaaattccctaatgtcagttatggtgaagactatgcagtttgtcttgaaataacaagaaaatatcgaattggaagaatttacgagccaatttatttatgcagaagatgggaaggcaatacggattctcaactttctactcaggctgaaaatcaacataacttctacaaagacacaatccgaacaaaagagatatttgaccgcattaaatatctaaaaggcaagtaaattaatgcacaaaagccttgatgatttaatcaggaaaagactgctttctattgaagaacttaaaaaagtacatccatctctggatgaatccgattacactgaactgatctatgcaacattccttcatcaaaaacaaaactggggaatgttcagcgatggatggaatggctttttatcaagtgaatataaaaagtttcaattcgattggtttcaaattaaagttcaatttaatccaacaagatttgtaagttcatctgccaaagtggacgatgagtcaataaaaaaacgaaaatgtttcttatgcctcgaaaatcttcctgaagaacagaaaggaattttgtttgaaagtaaacttaagccagaagataaattaatttttctctgtaatcctgcaccaatctttaacgaacattttacaatctcaaatgtaaagcacaaaccgcaggaaattttaaataatttttcaatgatgcttgagcttgctcagctgtgcaataatgagtatacagttttctacaacggtccaaagtgcggtgcatccgctccggatcattttcattttcaagcctgtccagccgaagaattaccaacagaaaaagattttctcaaacaccctgaaaagttccaaacattgattgataaaggtgggataactataaaattcataagtcaaagagaatatttaagaaatgttctggttttctcatccagaaacagattagaactaattaatcaattccaaaaattttacaaggcattacaggaagttaacggcattactacagagccaatgatgaacctttttgcattgatgagaggtgaagattatcatattgttatatttccaagagagaagcacaggccggatttttattttgctgaaggcgatgcgaatatgttaattagtcctggacttgttgatatgtgcggaatgatgataactccattgcagaaagattttgaaagaataaatgatgagataataaggcaagtttattccgaagtgagtctttcaactccaaaatttgaaaagctgctcgatttacttaatcaatcctgataaaataaaagaactcatcaccaattaagatgatgagttccttctgatttatttttcagaaaagctatttaaggcttatttattttgtgagcctctggcttcgctgacaacaatttttcttcctttaacttcactgccgtttaatgcctctaaagcatcgttagcagcttcatcggaagtcatttcaacgaaaccataaccctttgagcggcgagtttgtttatctctgattactacagcagatgttacttcgccatagggttcgaacaatttttggagctcctcatttgtagttgagaaaggcaagctcccaacaaaaagttttttggacatagaactacgatccttataaaaacatcttgcagctgcccttcatagaatcttataaaaagattttcactccattaactatgaaagctactgcaattgattttaatttagataaataaaaatggatttcaaaacgattgagggggaaattgctatgttttttaagatcgatcagccaattaactaaatcactgtttttagataataggaaaaagctagtaagaaaaagttctataaaatgaaaaaattaaagtcttaattaaatttttgaaaacttacaatcgttacattttttgctgggtttaaaacaacaatcccgacgaatgtcgggactgttgtaagttattcactacggaataatccttattgtgatttgctggtctaaattaattatttttataacaaaaagaaagggctaaaaatgaaaaaaatattgggcttagacatcggttccaactcaataggttgggctctcattgaaaataattttaatgagagaaaaggaaaaattcttggaatgggtagcagaattatacccattgaaaccgagctacttaaaaattttgaacaagggttatcagcttcaaaagcagcagaaagaagagcagcaaggcaaattagaagactaaggcatagatataaattaagaagagaaagattaataaaagtatttaaacaactcggatggttcccacagaatttccctgagaaatttgattcgcttgaacaatttaatatcaatgatttggttccattttctgaggaaacaattaatgaagctaaacaaatctttaaagtcgaaaaactacccgttgattgggcaatatattacctaagagacaaagcattaaaacaaaaaataactcttaatgaacttgctcgcgttatttatcatttcaatcaaagacgaggctttaaatctacgagaaaagaaaaatcagatagtgaatccatagaagaaattgataacaaaaaagtattcttagaatatattcgtgttgaaagtattacagatactggcgaaacctccagagggaaaaaagttttcttactaaatggcaaatctcctgatggcaaaatttatacagggaaattgatcagaaaagaaatcccatctgaatggataaataatacaattcaattagaaatagcagaaacacagacaagaaacggagaaaccaaagtagaatttcgtaaacccgatctaactgattggaaaaaacaattaacagcactggaaaaagaaattaaaagttcgggtttatatgtaggtcaatatcatttttataacctcatcgctgatccaaattatagaattaaagaaaaagtcgtaagcagaaatttttatcaagaagaacttgaagcaatctggaaaaaacaatcagaattttatcctgaattaaatgacagatctaagctcgaagatgttgctaaacttctctatccacacaatattcaaaaacaacaggaactcttaaaaggtgatttattaaacattattgaaaacgatatcatttattaccaaagacccttaaaatctcagaaaaaattaatcgcaggatgcagatttgaaaagaaaaattatgttgatatctatggtaaccgaccaggttataaagtcgcacctaaaagttctcctctttatcaagaatttagaatatggcaagacattcataaccttagagtatttcaaaaagaatttaaaactccagatgggaaatatctttttgacatagaacaaaccgatattttgctaaacacagaaaacaaagaaaaactttttgaactttttgataataacgcaaaaattaaagttgatgatattttgagcactttatctgattctaactttaaagtatctaaagacactcatcgaattaatttccctgaggataaagaatttccaggcaatgaaactaaacataaattcaggcaagcatttaaaaaatttaattacactgaagaaggagaaaaaattctcaacgatcctgacaaattttttgaactatggcatatcttctattcattagaagacgaactggtaattaaaaatgttttaattaaaaaatttggatttagtaacgaactggcatcttatatatcatctttaccttcatttaagaaagattatgctgcatattcttcaaaagctttgaaaaaattattaccattgatgcgctgtggaaaatattggagacccgacgaaattcatccagaaacaattgaaagaataaataaaattatttccggtgaattacttccaaaatttcccgagaacattcaaaagatttttaaaaatggtaatttccaatctttaaatgattttcaaggactgccggtttaccttgccacttatgttgtttatggattgcattcagagagagagaattacgaaaaatttgaaagccccgacgaaatcgatacaaacaaacttttaccaaataattccctaagaaatcctgttgtcgaacaggtggttcgtgaaactctaaatctggtcaaagatgtatggaaacaatacggtcaacctgatgaaattcacattgagcttgcaagagatctaaaaaacaatagcgaaacacgaaaaaagattgcagatgcaatgagacaaaatgaaaaagatagaagaagaataataggtatcctgagacatctaaaaaacgctaatccatactctgaaaacgatattgaaaaattaagactctgggaagaaaccgccaatatcgatgctaaactttcaatgcctaaaatttctgataaccctaccgaagctgaaattcaaaaatatttactctggggtgaacaaaatcacatttctccatatacaggtaaagttatcccgttgagtaaactcttcacaaacgaatatgaagttgagcacataattccaaaatctcgtttctttgacgattcttttgccaataaaaccatttgtgaagcagcagtaaataagtacaaagatcaaagaactgcatttgaatttatttctgaattaggtggaacaactgtaccagatactaacatccgaatcttaacaatggatgaatttagacagcatatcaatcttacatttaaaggaaaaaagaaaaattatttcttaaggcagtcaattccagacaattttataaatcgccagattaatgaaacaagatacatcaacagaaaacttggacaactacttttcccgattgcaaaagaaagcattgtatttacatcaggacagataacagctgcactaaaatcagagtggggcttaaatcgtgtctggaaagaattattgcttccaagatttgagagattagaaaaaattcttggtcaacaaattattattagagatgaaaccaataatgatattcatttcaatattgattgtgataaaaaacgaatagatcatcgtcatcacgcactcgatgcgcttgtaattgctgctacaactcgcgaacacatcagatatttaaattctctcaatgctgctgataaagacgaaatacagcaaataagatataaacttgtcaaaaaaggcatacgggaattccacttaccctggctaactttcacaaaagaggctaaagaaaaattacaaggcgtgattgtctcatacaaaaatcgtatgcgaattgttcagaaaggatacaacaaatatcaaaaatgggtttatgaaaatgggaaatgggtgaaaaagtttgtcactcaggatagaagtaaactttattcaattagaaaatcattatttaaggaaccgctcggtgttattaatttagccacttataaagatgtaagagtaaacgaagcaataaaaatacagttcgaatatcttacaaattataaagactccctgcaaccaagaattgcaaataaaaatctgagaaatcaagtaaaccaattgattaaaaattgttcctttgatcttaaggaaactttagattacatcaagtcaaaaccattgaaagatgaaaatggaaaaccattagatagaattacaattctgaagtttgaacaatacgcaggaaaaagagtgcagcttgatgcgacttttgatgaaactaaaattgataaaattccttactcatatcataatccaattgtaaaaattttaaaagaacatcttgccgaatataataactcttcaaaagaagcttttaccggcgagggtttagaaaaactttacaagaaaattggtttcccaatccgcaaagtgacccgctttgaggatattggcaataagttgaattttaaaggaaaactgttcgaaactgataaaggcggaaatgtatttttcattatctacgaaaatattcacgatccaacggatagaataattacagccgagtcaagtatttcggttctggatgcagtacaagctttcattgaaggcaaaaagaaaaatgatttaggtgaatacaaaccaggctatagaaaaattattttatcaccgcttgacttagtttatgttccggatgatggtgaagtgattgaaagtattgattggagtaatacagaaaagttaagtaataaaatttacaaagctgttagcttttcaaaaggttctattttcttcgtacctcattttgttgctaaacctattgttgaaacaaaagaactgggttcaaataacaaggcagaacgggattggactggcaaaatgatcaaagaaagatgcattaaactggttgttgatagactcggaaatattaaaccagaataaaaattcttgattctatgattaaaagaacaatttatatcggaaatcctgcttatctctcaaagaaaaatgatcaattaataattaacttcattgagaaagattccaaagatgtttcagaagatagaattgaaaataaagctcaatcaattccaattgaagatattggttttttgatactcgataattttcagataaccgtaacgcaaagcttgctcatatctcttcttgaaaataattgcgccatagttacctgtaacgataaacatatgcccaaaggtctgttttttaatcttgaacataacattgaacaaagtcagcattttcaggaacaggtaaatgcatcagaacctttaaagaaacaactatggcagcaaacaataaaagcaaaaattcttaatcaggcgcttgtcctcgataaatacaaaaaaccttctgataatttgaagaaatgggcaagggaagtaaagtcaggcgatacttcaaaccttgaagcaagagcatcatattattactggaagaaactttttcctgaagacttaaattttgtacgagatagagaaggttatccgcctaataatttacttaattatggttatgcaattttaagaagcgttgttgcccgtggacttgttgcttcgggtttattacctactctgggcattcatcaccacagtaaatacaatgccttttgtcttgctgatgatataatggaaccttaccgaccctttgttgatgatattgttgcaactataatttacaatggcgaagattttacagaactttcaaaatcaattaaacaacaattacttcaaattccagcaattgatgtcagaattgaaaaccaaacaagaccattaatgatagctgttcaaagaacaacatcttcccttgccagctgcttttcaggagaaactaaaaaactaatttatcccatttttcattatgagaataaatcaatatagaacaatgtggattttagtcttttatgatttgccaaccgatactgaaacggatcgaaaaaactttactcgattcagaaataatttattgcaagatggatttacaatgtttcaattttcaatttatataagacattgtgccagtaaggaaaacgcaaaggtccacatagatagaataaaaagttttctcccgccgaaagggcatgttggaattttaaccataaccgacagacaatttggaatgattgaaatattttatgggaaagaaaaagaaaagaatcctatccaggaaccccaacagctcgagttattttaataaaaaagcggtgaaaaattcaccgctttcaacttaaaaaaacaattaaacgagcaaaatttttatcctgattttgctctaactcattatattttaatgagatattatataatgagctgattcaatatttgaaaagaactatttgaaagcaaatcacaactaaacaaagtttcaaacgaaggagaacaaagctgattcaatatttgaaaagaactatttgaaagcaaatcacaactggagctgtggggattcgaaccccagtcctgctgattcaatatttgaaaagaactatttgaaagcaaatcacaacgaaagtattttcaacgaaaaagttgaaccgctgattcaatatttgaaaagaactatttgaaagcaaatcacaactcaatctcttttgccttttctggattaagagctgattcaatatttgaaaagaactatttgaaagcaaatcacaactaaaaatgtaaagttctttgctttcgaatagctgattcaatatttgaaaagaactatttgaaagcaaatcacaacactttactttcataaataataagagagcctgctgattcaatatttgaaaagaactatttgaaagcaaatcacaacctaatgcttccttaaaaaccttagcatattgctgattcaatatttgaaaagaactatttgaaagcaaatcacaacccctttcttggacgaattcattgactattcgctgattcaatatttgaaaagaactatttgaaagcaaatcacaacacgagtatttgagccaactaattggaatttgctgattcaatatttgaaaagaactatttgaaagcaaatcacaacaagagaatataacggtcaccaagttttactgctgattcaatatttgaaaagaactatttgaaagcaaatcacaacaacttatttgcgagaaagttttcaagatttgctgattcaatatttgaaaagaactatttgaaagcaaatcacaacactttactttcataaataataagagagcctgctgattcaatatttgaaaagaactatttgaaagcaaatcacaacaaacagaaagcagtggttaaaacttcgttcgctgattcaatatttgaaaagaactatttgaaagcaaatcacaacttatattactaatggctatatagcgttcgcgctgattcaatatttgaaaagaactatttgaaagcaaatcacaacataaaaatcaatagcaaatataatctttggctgattcaatatttgaaaagaactatttgaaagcaaatcacaacctttctaccttgaaatggtctaagaaattcgctgattcaatatttgaaaagaactatttgaaagcaaatcacaacttaatttatcaattctatttctgtccctttgctgattcaatatttgaaaagaactatttgaaagcaaatcacaacaaaatcatcatattcacatctgcgagtaaggctgattcaatatttgaaaagaactatttgaaagcaaatcacaaccccatttacaataacaagtttatacctttcgctgattcaatatttgaaaagaactatttgaaagcaaatcacaacttgatgaaagaacacaaaaaggaaagacaagctgattcaatatttgaaaagaactatttgaaagcaaatcacaacgaattcatcaattttcattgtttgactcctgctgattcaatatttgaaaagaactatttgaaagcaaatcacaactaatatagatgaaaaagaaagaaggttagtgctgattcaatatttgaaaagaactatttgaaagcaaatcacaacgaaaaacttattgtcattcaaaaagttattgctgattcaatatttgaaaagaactatttgaaagcaaatcacaacagagataatgatactcttttagtttgttatgctgattcaatatttgaaaagaactatttgaaagcaaatcacaacccgatgcttgcataatcacttaaagaaaagctgattcaatatttgaaaagaactatttgaaagcaaatcacaacatataagtggagtaactaataacaaaataggctgattcaatatttgaaaagaactatttgaaagcaaatcacaacttttagaaagagcaattgcaaatgagtatggctgattcaatatttgaaaagaactatttgaaagcaaatcacaactgttgagtatacattcatcaatggtgtttagctgattcaatatttgaaaagaactatttaaaagcaaatcacaacatgactgtaaatatatttttaaatttaaaagctgattcaatatttgaaaagaactatttgaaagcaaatcacaacaggattgagattttaaggattgagattttagctgattcaatatttgaaaagaactatttgaaagcaaatcacaactgaatgaattgaatattaattgtagttcatactgattcaatatttgaaaagaactatttgaaagcaaatcacaacgcaaattccgaaacgatgtcaattacttccgctgattcaatatttgaaaagaactattcgaaagcaaatcacaacattccatataaacatcacaatcattacatcgctgattcaatatttgaaaagaactatttgaaagcaaatcacaacacatggagttcaattgcaaagaaattttacgctgattcaatatttgaaaagaactatttgaaagcaaatcacaacaatttgttctttaactcgggaggtattagcgctgattcaatatttgaaaagaactatttgaaagcaaatcacaaccgaaatcaacaataggaaaattaaattcttgctgattcaatatttgaaaagaactatttgaaagcaaattaaaacaatagtaaccgaagcctcccggctttcgttgctgattcaatatttaaaaagaacattttgaaatcaaatcaaaacgtatccaaactaatcagtcgaaatcggtcggtaaggcgggatttttgtagtgttcaaaaaatctttcaatttgttttcgagttattctgccagtgcttaattcgggcaattcatcaagtccaaagaaaccgacatcttcagtctcgtaacttgtttttgattctccgccaataatttcgcacaagaagaaaatcttataaagatgaaaaatataaggagtgtgtccctgcttgttgcgatcgtaaacggcaagtacttttttagcttttactttataaccagattcttcaaagacttctctttctgcattttcgcttggagaagaaccaacatcagcccagccaccgggaactgtccactttccatcaactttctcttttactaaaagaatttttccatctttgaacacaacacctcgaacatcaacttttggtgttgaatgtccagcctcactcataaacaatctgtcaatttcctctttatcaaaacctgtattcatcgaaatcatttcttcggcaatttccattaccattttgtagcgttcaatttcaaactcattattcgaataaaataatcccgattgagcaattgattgaagtttttgagcaagctctaaccatttttccttcatctcttctcctcaaaataatttgaaaaataatttacaatttccagaacatcattgctcagaagaacatttatttcttttctgccttccagtgtgtttctgttattcattaatcttgtaaggtcaaaccaaaagtctttatcagctgcaattggttttgaaacaattaagctcttgttaattaattcgagtatggcagaatattcgagtaatgttcctgttccgccttttaagacaatgtaaccatctccgagagaaatcaatttttgaattctatcaaaaagatttgtgaagtgaatttcttcttttatataactattagctttaagattaaacgaattgacagtgacgccaattgtatgtgcgcctgcttcaaaggcaccttttgctgttgcttccattgtcccgtaaaatccgccgttgcagatattaaatccagcttttccgagttctttaccgagttgataggcaaactcatattcgtcatcacctggtttggggaatgaagagccgaagattgtaataatttttctttcagtcataaaactcccagattaatccaaatctaaattggatatcattagtcggataatatggaattaaatagaattttctattcaaaagattctcaattgaaagatagacaattgccgattccttaattctgccggatgcaaacaaatcgattgtaaagttcgatggaatttttattaacgcaaaattaattaagctatcgttataaagccgcacatcaacaaatgtcaactttgaaggcgaaaaacttctcgcagaatacgaactaaatacatttattctaaaaccagccatcaagtcaagacttgatttgaaaagtaaatcgcgataataagtttcaaatcttgtttgaaatctcggctgagtgattttatgaaaagaagaaccgttaaaattctgaattctgtcattgtaaagaaaagaaaaattcgagtgaagtttccagtaagaatattggaaatcaaatttgccgccgtaaagtttttctgatgaaggataataatttagaagattattgtactgctcaattgagtaataagttgttggattagaaaaatatttttctgttctaagataactctcgagattgatttttaagttttcacttgaataattaatctttccagaaattattttatttcgaacttcaaaatctgtaagatcaaaagcattgaaatatcgttcatcgaagcttaaagttgaaataaaatcagcgtatccaataatgaaattaattttatccgaaaggtctacacttaaatcagatccgtaagacaatagagttttatttgggttgtccagctttgtaatctttgaatagaacgatggttttattttttcagaaatttttaatctgtaaaaaacataaccggataattgatcatcaataagttttgaaaagtagaacggcgattcaataattattctttcatatttaagctgaagttctaatacatttattgcgtaagtcagattttctttgagttcaagaccaagaacttttgaccagtgattattaaaaatcctcaaagaatcagctttgtgttcattatcacgaaattctcttaaagcttgattgaaataaaaatttaactgcgtcagagaaaaatcaatcggcttaaaaagtgattgaaaattgactctgtgtattgtccatttatggtaagcatcatcgttaataacaatagctctttgattatcataaagaacattctcgacaggttcatctggagcaaggagaggattatttaaattaataccttcattaaaatgaacaatagactttgagtagcgataaactaaatttagatttaattcatttgacaggaaataagttgattttaattttcctgcccaaagatctttttcactattcaaaaatcttcctaatgcgttgtgtttcgttacgccaaattcaaaattaatttttggtgaaaagttcacattaaacataccatcaaaaaacaaattatcatagggagcttcaatgtatttaacttttgaataaggaatggaggaatatctgctccattcgtttaagataacggctccagctaagttagacctggaaagtaaaaatgatcttgaaggaaatacaatctcaatcgattcaaattcatcaaatcttaaatctcttaaatcaacaaggtttgttaacggctcatttagttcaaggttatttattaaaaacgagattgaacgattattcagctgaaataaattaaaatcgtaaaagtttgaggggagaccagtatcaaggagaaaggaatttgtctgccagttaatcaagtgaattggtgagaaaaaattttttctttcaattaataatttatcaacgatttgagaattgcttgttataaacgaaactgacctaattggaataatcgaatctttcactgaaacatagtttaaggaggcgtttaaagaatcatcaaaagattttggaattgactctaattcgtcgtggaattttatcgaagtattaagatcaaaaggataaacagaatttgtaaaacttaatgagaataaaattacagcaagaaatttagagacgagacttttcaatttatctttcaagaagtttttgaaataagttccctggtttcgtgagcaacttgggctatataagaagcgatagcagcaagatcgtcggatatgcatgcatcggcaattagactttcgacaattactaaaatatccatatcatcttcgttgataattgcaaaagagccatactcaagttcaaagttatttttgagaaatgtataaagtaaatcagcatttttgataattggtcctattgtaacagtacaatcaattttgggcacatcgtaagagtcaatagtttcataaaaactaacttcttccgtatgcccgtcttcggtttttatcggcaaagtgtaaacatcatcttcgagcgagtatgtcgtctcgagcaattcacaaacttcttcaattaattctttgagattaattctctcttccattttatttccattcacttttgttatcaaattaaaattaaataatgaaggttgaaaattaaaatgaactgaaaaagttgatctgaaatcaaatcttgaattaaaagagcgagtttttagttcgggctaaaaataaattaaatcaaactaaaatactcactgaaatcaattttgaaattttcaggatagtagctgcctgtttttctatcctgtctgtaatttcctttatattctttgttaattattttcctaagtatctctatgaattcatcgatttcttctctggtgttgtaaattccaaaacttgcacgaacagctccgggcagatttgagcgatcaccagccagaattttttccttcattaattcatattcttctttgcttactttgaggagtttctttacataaggatgggcacaaaaacatccgttgcgtactcccacgcctccttcataacaaagaatggctgcaacgagtgaatgatacatctcctgaacattaaaagtcaaaactccgagtttattttcaaaacttgcaaaatgttttggacctaataaatctactttttcaagttcatttatctttttgaatgcatattcggttatttccatttcgtgctgagcgacattatccattccaattttttcaagcatttgaatcgcacaagctaaagcgactgcgccgattagatttggagttccagcttcttcacgatctggaagatgagtccatttgacttctgtttctgaaacaagatcaactgttccaccgccaacctgatcaggatcgccttcattgaagatagattttggaccaattaaaacgcctgttccaaaaggtgcatacattttgtgagctgaaaaaacaagaaaatctatgtgctgtgcatcttcgtctggcttcatatcaatctttcgatgtgggattaattgagcagcatcgactaaaatttttgagccatatttatgtgccagctcggcaatttgatgaattggattcacaagtccagttacattggctgcacctgtaatggcaacaagtttaagttgtttctgatattttttgattttttcttcaaggtcatttaaatcaagagtcccgtcttcattaacattggagtgaattaaagttgagtattttctccacggcaaatcatttgagtgatgatccatcaaagaacagattacaacatcatctttttgaagatttaatcgattagctactttgttaatagcttcagttgtgttctttgtgtaaatgactgtattgttctcaagatttgcattcacaaatctggcgacaatctctcgactatcgtcataagcttttgttgcaacaagtgattttattccagcaccacgatgtactcccgaataccattcaagaatttcgttaacagcgtctctgataaaagtaaaagtcggagtgcttgcagcgttgtcaaagtaaatgtattgtttttcagttccatcgaggagtttgacttttttattgatgccaactaagtagtttcggacattttgaattgaaagatcggagggaaataagttttttgaacaacacatatatcactcgatttagttcaacatctaattcaaaaataagaaagtgaacaattaaaatttttttgattaagagaaaaataaaggtaacaacgaactatagaatggactattaatcaaaggcagaatttaaattgtgaagtatcttttttcaaaattttgtttgagcttttttgtctttactgttgaaaatgttttgaggtttgaaattgatttaaccggaataatgccgtgcaaagagttggttagaaaaacttcgtctgctttctcaagttcatctttatgaacggttgtttcaatcacctgaatatctttttcctttagaaaatcaattaatatttttttggcaattccaggtaaaacaccgcactcagttgctggggttttaattgtaaaactttttttatcatcatcatcaaaaattagaaagatatttgttctcgaaccctcaagtatatgatcttcgttatccaaaaagattacttcatcgaaattttgtgtgcgagctttattaaatgcataaatataatggaaagcgtttgttgtcttatattttctaatttcatctccatgtaataaaatgtga

SEQ ID NO: 953 - DNA, 13995 bp, synthetic construct
  misc_feature 1..13995: note = Synthetic
  source 1..13995: mol_type = other DNA
gctcagactgacattaagtttaaaaccttctgtcaccctgagcgatagtcgatgtgtgataatttcttaatgtcacactgagtttaatcgaagtgtgacattaaacttttttgaaacttcaaacatactcccgtaagtcttcgacaagctcagactgacattaagtttaaaaccttctgtcaccctgagcccgtcgaagggtgacattcatattaatgtcacactgagtttaatcgaagtgtgacattaagctttttcgaaactccaagcattctcccgtcagtcttcgacaagctcaaggcaggctggctcagcctgacattggaatttaaattctcatcgcactgagtttttaagtaacgattttaaggaaagagatttaaagatttactgagaaaagtcttcgagaggaacaaaaatctttacttttgttccttcatcaactttactttcgattgtcaatttaccattgaagataatcacaagtttattcacgattgttaatccaagtccaccgccttgctgttcataatattttctattgtattgataaaaaggttctaaaattttttcaatttcatcttcaggtattcctcttcctttatcttcaacgattaattcaaaaaaagtcggagtagcttttgcgtaaatgaaaacatccaatctatcctcaggagaaaatttaattgcattactgacaagctcggttaaaatgatattcaatgaattgtaatcaaaaggacaaggataattaattccttcaagagtataattgattttgtaattaaacttttcagacagatcatttaaaattgtctcgaattcagccttccagttttgatttctgattgatcggatttcacgaactttattttcatctgtttctgtgatttccaattcagcaagttttaagaaattcattacaagacgatagagacgatcgctactttgttttatgtattttaaaaactcttcctgttcttctggtgatttttcatattgcctatcgagtaataaagataaaaatccattcattgtgctgagtggatttttaaattcgtgtggcagtgcatacagaattgactttcgaatttcatcaagtctttcattcaatgttcgttttcgttcagcatattttttaagctttgcatttattgaaacaagcaaatcttcgaattcaaatggcttggtaatgtaatcttctgcaccaagtgatttgccgaatcgaatatcttttttatctgattttgcagtgagaaagatcaagggaatgtctttaaatctttgatcctgacttaatctttcagccatagtaaatccatccataactggcatcattacatcgcacacaatcaaatctgggtggaaagatttaaccttatcaagaccttcggcaccatttgctgctacatcgacaataaaaccttcgttctcaagttccaacttgagaagttcacgaattggttcttcgtcttcaacgactaaaattttaaatgatgtctgatccataggatttaaacttttgatttttgttttctaacaagacactttgcgtgtttattgttatatctgtctaaaattttacaccagactgctaaatctcttctgcaggctccaacgcattctggttcggtgaaatctgcgaaatcacaactgtaatcgcaatataatggaaggtcttcaattttgaatttcagtttcttcttattcattatcatcatctttttaactgaacaaatttaatattttcgtaataaagattgaagacaaatgaaaactttagttacatcctcaattaaaaaggcagctgagtttattaagaagggcgagatagttgcttttccaacggaaaccgtttatggactcggtgcaaatgtttatgatgacgaagccattaaaaaaatcttcattgcaaaaaaacgaccaaccgataatccactgattgttcacatctcaaatgtaaatcaaatcgaatcactggtcaggaaaatgaacaaatgcgcaaagactatcattgaaaatttttttcctggtccaattacaattgttctcgagaagaatgatgcaatatcagaatttgtaagtggtggattgaatacaattgctattcgaatgccttcacttgaattgacgagaaaattcattgatgaatgtggagttccaattgccgcaccttcggcaaatctttcgggttcaccaagtcctacgagttggaaacatgtctacaatgatttgaagggaagaattccctgcattctgaaaggaccaaattgtgaagttggtattgaatcgacagttgttgattgtacaggaaacataccagttatacttcgacctgggattatttcaattgaagatttgcaaaaagtttttcccgaagtgaaagtggataaaccaaaaaatgttaagaacccaaaatctcccggaatgaaatataaacactacgcaccaaaagcaaaggtgattttaatcaactcagaagaagatctggaaaagatttcttatgataaaaataaatcagcatttattggattgatgaaaatcaaaggtctgaaaaaaataaaacgagttaatgatttaagagattatgcgagaaacatttttgattttttccgcaaatgtgatgaagaaaagattagagtaattttttgtcagagtgtgcctgagagtggattaggtcttgcaataatgaatcgtctgaaaaaagcagctcattcataattctgaaggagaagagttatgacttttgaagaatacagaaaaaactttatcgagaaactaaaaaactgggaagagaaaactctaaatcctttcattcaaaaaaatccagaacaacgagaaaactttgttacaacttcaaacaaagtgattaagcaactttatactccgcttgattttgacttagaaaagttcgatgagaaaattggttttcctggagaatatccattcactcgtggaattcaaccaacaatgtatcgcggaaaattctggacaatgcgacaatatgctggatttggaactgcaaaagaatctaatgaacgatacaagtttttattaagtcagggaacaacaggactttcagttgcttttgatctgccaacacagattggttacgatagtgatgatccacattcagaaggtgaagtcggaagagttggagtggcaatcgatacacttgccgatatggaaattctttttgaaggaattccactcgacaaagtttcaacatcaatgacgattaatgcaccagcatcaattcttctggcaatgtatattgtcacagccgaaaagaatggagtttcgagagataaactttcaggcactgttcagaatgatattttgaaagaatacatcgctcgagggacatatatctttccaccaaaaccatcaatgagactcgttacaaatttgtttgaattttgctcgaaggaagttccaaagtggaatacaatttccatctcaggttatcacattcgagaagcaggagcaactgcagctcaagaaattggatttactttagcaaatgcaattgcttatgttcaggctgctattgatgcagggcttgatgttgattcatttgcaaatagaatttctttcttctttaattctcataacgatttgtttgaagaagttgcaaagtttagagctgctcgtcgattatgggcaaagattatgaaagaacgattcaaagcaaaagacaaacgatcaatgatgttaagatttcacactcaaacagctggttcttcattaactgcacaacagcctgataacaatattattcgaactacgattcaggcacttgcagctgtgcttggtggaacgcagagccttcatacaaattcaaaagatgaagcacttgcattaccaacagaaaattctgctcaaattgcattgagaactcaacagattattgcatacgaatcaggtgttgtaaatacaattgatccacttgcagggtcattttttgtcgaagctctgacagatgaacttgagaaagaggctgaagaatacatcagaaagatagacgaacttggtggatcaccaacagcaattgaaattggttatattcaaaaagaaattcagaaatcggcatatcaatatcaaaaagatattgaagaaggaaggagagtaattgttggtgtaaataaattcatcgttgaagaagaagagacgccagaaattttgaagatcaatccagaaatcgaaaaaaatcaaattgaatttctaaaaaagattaaagcagaaagaaataattcgcttgttaatgaaaaacttaagtcattgaaagaagctgctcaaagtgacgctaacttgatgcctttcataatcgatgcagttcgtgtttatgcttcaattggcgagatttgcaatactttaagagaagtatttggtgaatatcgagagagtatttagttaaatcaaagaactgagatttgctttcattagtttggtttttgaaaattctaaaagagcaaacttcgattttgactttatgaaattgaaaacaattgtgtgtaattcattcaatcaattttgaatttttactaattgcattttgtttctacttcaaaaatggagtgatttatgtccgaaaagaaaaaagttattcgcacggaagctgagtggaaaaaaattctttcaccagaagaatattatgtacttagacaaaaaggaactgagcctgctttcactggaaaatattattatcataaagaaaaaggaatttatgtctgtgcagcttgtggtaatgaattattttcatcagaagcaaaatatgaatcaggttccggctggccaagtttttatcaaccaatctcatacgacaatatagaaactgaaatggattattcatttggtatgcgtcgaatagaagtaaaatgtgcttcctgtggttctcatttaggtcatgtctttgatgatggtccagaacctactggaaagagatattgtattaattccatttcattaaaattcaaaaaatcctgaataaagaaatcagaatagattaaattttcacaattagtcttttggcgcccttttagttattcaactttgcttgacttttaattcaaaaaatatgtaaagtgaattagaagaaattagtcaaatataagttttatgaattccaccattgaaacgaaagcattgcaggttataaaagaagaaatagagagaagaggattaaaaattcttaaagtaattctcttcggttcgagagcgaaaggcgaagctaaggaagatagcgattgggatttttaaattattgttaataaaaaattaagcttcaaagaaaaatggtcaattatagatggtataaaactcagattagctcgactaaaaataccaaacgatatttttataaaatccaatgatgaattagaagaaagcaaagaagatgtgggaagaattatatatattagactctaaaagaaggtatggaaatagaatgaaaaatttagagattgagaaaaattggatcttacttgttgaagctgatttaaaaaccgctttatttttttagacaagctcaatttttaatggaaatattaattctttaatttttgtaataaatggaagtcaaggcaataaaaaaagatcaagagagaaatgaacatttatccaacttcaatcaaacaaatttcaccagagttactggaaattcaatggtctgatggacacatcagcaaatacgaattgaaacatttaagacttgaatgcccctgtgcaacctgtaatggcgaaacaattttatggaaacattatggaccaactaaacaaattatgatcccaatgcttgatcaaatcactctgacaggaattcaagtcgtaggaaactatgcgatacaactttcctggaaagatggacacaacacaggaatttacacttgggaatatcttagaaaactctgtcagtgtgatgaatgtaaatcaaaaaacgaggacaaaaatgagtgaagcacatatttacgaaataaatctcaaatggacagaacagaaaaaaggacttttatcatcacctggtttaccagatgtggaagttgcaactccaccgcaattttctggtggtcacgagggtatatggtcaccagaacatttgtttgttgcctcagttgcaacctgcattatgacaactttctaagcaatagctgaactttcaaaacttgaatttgtctcttatgaaagtcgtgcgaaaggtaaactcgaaaaagttgaaaacaagtttatgattaccgaagttacagttgagcctgtaatagcaataaaatacgaaaaagatcttgatcgagcggaaagaataattcacaaagccgaagctaattgtttaatttctaactcgatcaaatcacaagtgattttaaatccacagataaaaatttcataaagttttaaagttatgtatgagtcaaaattttcaaaaccgattactgttaaaaaattctatcatcgagtatttaatcattttgttgtttcaactttaatgatgattatttctcttttgatcggaatgatgggttatcatttttttgaaaatcttagttggattgatgcttttattaatgcagctatgattcttggcgggatgggacctattgaaatacctcaaactgttgcgggaaagattttcgctggtttttatgctttgtattctggccttatttttctcgtagcaatcggagtaattttcgctcctattgttcatcgaatgtatcatttatttcattggaaagaagataacgaataaaaaaattctggaggtaattatgcctgtttatgaatatcgttgtaaagattgcaatacaaaatttgaaattttacatctcacaaaagaaaatgctgacgaaattatttgtccaaaatgcaattcaaaaaattatgtgaaacttctctctcgaattgcaaaaccagtttcagaagattcagattttgcctcatctgactttagttcagatgataatgatgattattcgggttcaagttgttgctctggtggaatgtgtggatgtaattaaatcaagagtctcctcaagacgaggagactcttccaacaaaattatttgatataaactaacttcttgatttcactctgtccattactttcaagtttataaaagtaagtccctgatgaaagattaaatttacttgcatcaaaatctatttcatagaaaccttcttttttgaaatcatcaactaatgttgttatctcttctccaaacaagttaaagagacgaagcttaactaaaccttctttccttaattgatatgaaattttagttgtgggattgaaaggattggggtaattctgatataattcaaaatctttaatgatagaattctcattctcaaccgaagttgtggttacatttacaacaaaatttggagcgaaattccactggtcaccacttgatgaaccgttaaaattaacagagttgccgttagcataaaatgtaacttgaccagttgtgttaggtgcagtaaactcaaaatcaaaactcactactccaccagatggtgcttttggtgatgtgtgcgtaagttcatctccaattttttgtaaaccacttccctgaattactgatagagttccattacttgcagcaatgttagtccctgctctgacgagtggtccaccacttattgtaagtgtataagttccttttgaaccaattgacagtgtgtttggtccggagattgtcacattaactgaagttgtaggtgagcttccgtggcaggtacatccatcaccatttttccgcgtcttgtttgtaattcccgatgaatatccataaaaaagaaaagatgagagaacgacaaaaattacaaacaagttagtgatgaagtatttgttttgtaaaaggcgttccataaaacctccattttttattgacgaacaattaagagaagaaaagagttcaagagagtatgattttcaaaaatatttacttttttaatgtccacaatttttaggataagatataaaccttgttgacttatttaatagattataaagttgattaattatttaaaacaacaatcccgatggtttacatcgggactgttgtaagttattcactacggaataatccttattgtgatttgctgagcaaaattatttaattttaaataaaaaagaaagggctaatgttatgaaaaccatactcggtttagatattggctcaaactctattggttgggcgttaatcgaacaagatataaataataagacagggaaaattttagggatggggagcagaataattccatttgactcagatttaataaaaaattttgaggctggtagatctgcttctttggcagcagaaagaagaaagtttcgtcaaatgcggagattaaaatcaagatataaattaagaagagaaagattaattaaggtttttaaagttcttggatggttccctgaaaattttcctgaaaagttcgacaaactcaatcattttaatataaacgaatacgttccattctcacaagaaagtattgaagaagctaaaaaagtttttaatgtggataatttacctattgattggacgatctattatttgagagacaaagctttaaagcaaaaaataactctgtctgaacttgcaagaattatttatcactttaatcaaagaaggggcttcctatcaacaagaaaaacagaagaaattgatacgtttaaacaaggagatgaggaacagaatgataaaagtaaagagattttatatgaatatttaaaagtcgaagagattattgatacaaacgaaaaagtgggaaacaaaaacaaattcaaattaatagctacttcgcctgacaacataaaatatgaaggaagtataacaagaaaagatttgccaaaagattggattggaaaaactatactttttgaaataaaaaagaccacattgaaaagcggcgaagtaaaaattgagttcaatagagttttggaatccgattggaaaaaacaaataacagctttagaaaaggaaatagtaagttctggtttatatgtaggacaatatcattttaaaaatttgttagctgatccaaactacagagtgaaagaaaaagtagttagcagaaaattttatcaagaagaattcaaagcaatttggaaaaaacaagctgagtatcatccagaattaaatgatacatctaaaattcccttgattgctgagaccctttatcctcataacattcaaaaacaaagagaattatcaaaattaaatcttcttgaaattataaaggacgatatcatttattatcaacgacctcttaaatcacaaaaaaagttgatctcggaatgtagatttgaaaagaaaaattatattgatgatttaggcaggcaacctggttataaagttgctccaaaaagctcacctttatttcaagaattcagaatatggcaggatattcacaacctaagagtttacctgaaagaaaagaaattagatgacggttcaagaatttttgatgttgaagaaactaattttttgcttgatactaaaggtaaggaaaaactttttgatttatttgattcaaaaactaacataaaaatagatgacattttaagtgcgttatcaaaaccagattatccagtttctaaaaaaacacatagaataaattttccagatgatagggaattcaaaggtaatgagacaaaagctaaattcagaaatgcattcaaaaagttcaattataatgaaggtgaagaattattacaggataggaataagttatttgaactctggcatattttttattccattgatgatgagaaagtaatttcatcagtcttgcaaaagaaatttggatttagtcaagaattagcgaattatatttcacaacttgaaccatttaaaaaagaatatgcagcctattcttctaaagccattaaaaagttactaccacttatgagatgtgggaaatactggaatcaagaagatataagtgatgatgcgattgaaagaattaataaaattatttctggcgaattaatctcagaatttactgaaagagttcgagaagaaatttcaaaaagaaattttatgactattcaagattttcaaggtttaccagtgtatttagcaacttatatcgtatatggtcttcattccgaaagggaaaattacgaaaaatatgataacccagatgagattaaagttgataaacttattccaaataattccttgcgtagcccaatcgtagagcaagtaattagagaaacactgaaggttgtgcaggatgtctggaaacaatttaaacaacctgatgaaatacatattgaattagcaagagaattaaagaacaatgcaaaaattcgtgaacaattgacaaaagcgatgtcagaaaatcaaaaggaaagaaaaaggattgttgaaatattgaaacatattaaaaatgcaaatccgaactcagaaaaggatattgaaaagttaagactttgggaagaaactgcaacacctgagcataaaaaagcaatgccaaaaatttcaactaaccctaccagtgaagaaattgaaaagtatttattatggggtgaacaaaatcacatatcaccctatacagggaaagttattcctttaagcaaattgtttactcaagaatatgaagttgaacacatcattcctcgatcaagatattttgataattcttttgcgaataaaaccatagcagaagcctcagttaataaattcaaaggcgacttgacagcttatgaatttataagcatgtatggtggaacaattgtgcctggtactaaaattaaacttttcacacttgaagaatttaaacaacatattgatggaatatttaagggaaagaaaaaaggatattttctaaaacaggaaataccaaaggattttattaatcgacaattacaagaaacaagatatattactcgaaaactcggtgagctcttatatcctattgccaaagatgatgttgtttttacaaccggacagataactgctgaactaaaagaaaattgggggttaattagagtctggaaagaaattctgaaaccaagatttgaaagacttgaaaaaattttgggcgaaaaaattataacaataaataaagagacaaatgaaattatattcaatattgagtatgataaaagaatagatcatcgacaccatgcactcgatgcacttgtaattgcagctacaactcgagagcatattagatatttgaattcgttgaatgctgcgaaccaagaagatctcattaagattaagtatcaattggtcaaaaaaggaataagagaatttcgtctaccttggccctcctttactaaagaggcaaaagaacatttgaattctgttattgtttcatttaaaaagaaaaatagattagtacaaagaggttacaataaataccagaaatgggtttttgaaaatggtaaatgggttaaaaaatttgttcttcaagatcgttccaaattaatcgcaatcagaaaatcactttttaaagaacccttaggtataattcatcttgcgtcttataaagatgttccactaactgaggcaattaggcttcagtttgaatatttaaccaattttaagaatcatttacaaccaaggattgctgataaaaatctaaggcacaaagttaatcaattaattaaaaattgttcgtttgatttgaacgaaacactaaactacttaaaacaaaatccactcaaagacaataaaggtaatgaattaaagaaaataaccattctttattttgaagagtatgcagctaaaagggtaaacatagatgaatcttttgatttgactaagatagacaaaattccatacgcaaatcatcctaacaatcgaattgttaaaatattgaaagaacatttttctgaatatggtaataagacttccgaagcgtttaaaggcgaagggctcgaaaaactttataagaaatttggtattgtgattagaaaagttacaaggactgaaaatgtaggtaataaaattaatcttaatgataagctacttgaaatcgataaaggtggaaatgtattctttattatttatcaaaatatccatgatccttatgatagaattgtaaccgaagaatcttccatctcattattagatgtaattgatgcttatatacaaggtaagaaaatttccgacttaggtgaaaacaaacctggttacaaaaaaataattttatcaccaaatgatctggtttatgttcctgatgatggtgaggtgatcgaaagtatcgattggaataatagaaaagctttaagcaataaaatttacaaagtagtaagcttctcaggaagacaaatattttttgtaccccactttattgcaaaacctattatagaaactaaagaattaggctctaataacaaatctgaaagagattggaaagggaaaatgataagagatcgtttgataaaattaaatgtagacagacttggtaatgtttatccagaataaggaataatttttttatgattaaaagaacaatttacattggaaatcccgcatatctttctaaaagaaatgaacagatgattgttcaaaccattaaaagtgattatactgatactaatgataattcagaagctaaggaaactgataaagttgaaaattctatttcaattgaggatgtaggatttttaatcatagataatccacaagttacaattacacagggtttaatgctcgctttactaaaacataatgtagccattgtaacttgtgatgaaagacatatgcctaaaggaatgtttttaaatttagatcacaacattgaacagagtcagcactttcaagaacaaattgaagcatctcagccattgaaaaagcaactatggcaacaagtgattagctcaaagattttaaatcaagcaatggtgctaaataaatacggcaagcaatcagataacttgaaaaagtggtcacgggaaatcaaatctggtgattcaacaaatttagaagcaagagcttcatattattattggaaaaatttatttcctgaagatttaaattttaatcgcgataaagaaggtgaaccaccaaataacttactcaattatggttatgcaattttgaggtccgttgttgctagaagtttagttgcttctggtttattgcctaccttagggattcatcatcatagtaaatataatgcattttgcttagctgatgatatgatggaaccttatagaccatttgttgatgatattgtggctacaatcgtatataacggagaagatttcacagaattaagtaaatcaataaaggaacaacttttgaaaattcctgctcttgatgtaataattgacggtaaaaatagcccactaatgattgccgttcaaagaactacctcttcattagcaaaatgttttgctggtgaacagagaaaattattactaccagtatttactttgaaaatcgggaaaataaaatgaggataaatcaatatagaactatgtgggtaatggttttatacgatctaccaacagaaacacaggcagataaaaaaaattttacaaaatttagaaataatttattaaaagatggttttgaaatgtttcaattttcaatgtacatccgtcattgtgcaagtagagaaaatgcagaagttcatattcaaagggtaataaataatctgcctcctaaaggaaaaattggaatattgactatcacagataagcaatttggttcaatgcaactcttttatggaaaagaaaaagatgataagcctttcgattatcctttgcaattagagttattctaataaaaaaagcgatgaactaaaaagaaaatagttcatcgctcaaaatcggcattttgctaaaagattagaaccaactcgactaaatttttattcctatttgtttcgtaattcattgtaaaataatgatttatatataaatgagttgattccaatctataaaagaactttttgaaagcaaatcacaacgaaaaatagttgaacaatgaataacaaagagttgattccaatctataaaagaactttttg

SEQ ID NO: 954 - DNA, 13467 bp, synthetic construct
  source 1..13467: mol_type = other DNA
  misc_feature 1..13467: note = Synthetic
  variation 12479..12486: note = n is a, c, g, or t
taacaaaaataactcatccccttaatccccttctcttaataagagaaggggaaataggggttgagttcataagaataatatgcaaagctgctaacctgacagcattgccctctactccccctccttgaaaaaaggagagggaagtttattacaaatatgtttccgtcagggaatggtccctgacggctgagcaaaaaaaattccttaaaaacgtagttctcggacagactcctggtccatgacgtccgggttatgggtcttgagtacaaagtaattaatctaagaataaattattaattccttcatttttttttcgataataaatcagtgaataatccttcagaaataaattatatcatttattcacaaatgattgtccaataatgaattgaggattccgcaatgagtaaaaaattaaaaaaatatcttaaaagtttattattagtcatgggagtagtacttctttgtggcttatttattatggaaattattagttactcaagtttgaatgctaatagccctgaaaatttttccacttcgctaccaggttttaaaacttacctatataccggaataattggaagttttgcagtaactttaatgatccttattttcatatatttcaatctttaccgacctttaagtacaatttcaaaaaatgtaaaatcactagcggaaaaagattcagcgtcaattacacatgctatgtcagaaatggcacaagggaatttaactgcaggaattaaattggatacgagtacacttcaaacttccgtaaatggtaaaataggttcgatggttggagatatcaataacatcattgccaacttaaatgaggcaagcaaagaatttaattctgcaacagatattccatgccaaagattattttatgttggagcggattcatatttagaaggcaggaagtgcggtgaagcaatgggaatagctaccaaaggaaaaggtaaagttgcaataattgtagaaaaatttggattgacaggtcaagaactaagaagaaaaggatttcagaccctgctaaaagaaaaatttccggaagtacaagtcgttggtacatctgaagcccaggttggcgaaagttgttatttgaaaacaaaagaactacttcaaaaatttagcgatctggatgggatttatatttcgcatgtcggcggagcacctgctgcaaaagccgtcgtcgattcaggaagaaatgggaaagtaaagattatttgtcatgatcttgccgacgacacaatggattacatccaaaaagggataattacttcgacaatatctcaagatgtttttgcgcaaggacatgatccgattattaatctattcaaccatctagcagataattgggaacccaaaaatccaagacttctaacaaatatggagatggttaaccaaaagaactattcaaatttctggcagaaaggaaagggattaattgaatctgaatcgacagccgccaaaagaccaaaaccaataaaagcatcatcaaaaaaaataagaattgcagtacttggaagagaaggtaatccattttgggacggatttaaattgggtgtagattctgccgcaaaaaaattattacagtataacgcccaagttgattggattataccaaaaggatcgcatttcaatggaggcaccaatatttcggcagaaatttacggagccgcaataaatgaatgtattgagaaaaaatacgatgctatctgtacaggaatctttgataaaaatttagttacctatattaataaagcagtcaattgccgaataccagttgcaacgtataatagtgagccgatgagtctgcgcggacttttaaaaacattaattgaaaaaacaaaaaaactatctgagtttagccagaatctttcaaaagccgcagagaattcaatagaaacatccacacagaatgcgcgttctatagaacatatagcccatagtttgaatgaagaagtaacatctgtaaacacggcaaatagcaacatgatccaaatttcagcatcgattgataacattgcgcatgattcacacgatcaaaaaattgctgtagatcaagtttctttttccgcacacgatattgcacaggcgattcaatcggcaaattcaatagcggcaaatgttgtaaaacattcttccgaagcaattgatgaagcaaaactcggcgcaaaaagtgtcatgaaaaatttggatcagatgcgcgatatcgataatactgttaaaaactttgcagaaaaaattgaggaaatggctaaacagtccgaacagatagaagaaattattcaaacaattgattccatagctgaacaaaccaatttactagcactaaatgccgcaattgaagcagcaagagccggggaatacggacgaggatttgctgttgttgccgatgaagtgagaaacctggcagaaagatctgcaactgcaacaaaacaaactacaaatttgattaatagtgtccggagaaatattacggaagcaagtaaagcaataatacttgttgttgaaaaagtaaagaatggttccagcagtgcaaatgaatcaggtaattcaatcgacaagttactttcaacatcacagagcatgaacaagcaaatagatgaaatggctaaagcaaacggtgcagtttcagatgttatgagttcgctgctgtctgctatagataaaatttctatggttgttgaacaaaatatgagcgccaccgaggagttaagtatgggagtgagacatacagtggagatgattaataatatttcttctatcagcgatttcaatgcaacaacaataaatgaaatatctgaaaaaacaactcaagccaaagaaggagcacaaaacttaggcaatgttgccgacgggttagctggtatagctaatgaacttcatgctgctacagctcaattcaaaattgattcggatggatttagtttaaactgagggtttagttccgtcaaggaatgggaggcgaggcaagatcaccattcggtgagacgcgagaggctagacgctagacgtgaaaggtaaaaacggaagacgggagaactttgatccgaaagctgacggaggcgggtaaaccacggagaatgaatatttagtactgaggactaagtactgtgtacttagtatctagtacttagataaaaacctttccttgacttgcaggaatccgtcggttgacggacggtgaataaaccgggctgcggtaaagacctcacccctgcccctctccttaaaaaaaggagaggggaaactttgactagggcggactcgtcaaacagattttaccgcttaacgcatcacttcacgaaatttcttaacgcaattctttttaggtgtccctgcaaactacgcggggaaaactttcagctcagggtaaaaattgagaaccatgcctagcggtccgcctacatttatgacttcggcggatatgttaacaaaaagattatgattaagattaagaatatgattatgaataaggctggtattaatattgtctaagaaatatttcaaaggaaaccacagatactgccggtatgttcacaaatacgggatcaggcatatttttcttcttttcctcaactccgttcagatttttaacgcaattcttattaggtgccccgacataagacgtcgggacaggcgggaaagacctcacccctgcccctctccttaaaaaaaggagagggtgttctatctggtttgacggacgggtaaacagcctattaatatttaataattcttgctctacgcacagttttatttaggagcgggttagttacaatttctttataatatttattgtaataataatcgagattagcctggtttttattttcaaatgattctttcttttttaccagcaaagtctctttgtaaatattttgtaagaagttataaaaaagcgttaattcgtgagatttaagttcaatagttgagtgaaaaagagaatgatattgtatgacttgacacgatttatatttaataaatttaataaccagatcactggtaggaacatctaatgcaatggcatcagaaataaataatttatcttcatcaattcttgaaatcaggcttctcaaaatgttaacttgatcattagtaatggtaccctgatacaacccaattaatttaacattatctcctccaaacccggtatactcaattgctctatctgaattaattttaaccataaacgccgggcatgtcccaaaacaaaaagagctaaataattgaccacttataattactattgaatcagtggatgctttatttgatttatacagtaatagtttatttttttggccattgttataaaaaaacattttgagtgtatcttgagttgaatagtagagataatattttggattagagttttgaaacttattatcgtgaattacaattgaatcatctattatcgagaaatcttcttttttataatttccgttttgtgtaaagttagttaattgtgattcagtaaatgaataaaaacaagtatcattaatccaatcacctttaattttgtttactatttcttttttacttctttcactgttacaagaaataagcagcacacttgaaataaatatggataaaatcagtttcataaatttattatgcctaattattaatttaacatgcctgtgacaaggaccaccctcccgcaaaaaacgcgggacaggctctttaattccccctccttgaaaaaaggagggggtgttttgtctgactagatggccgggtaaagctgctaaggatattttgttaggtatttattctcttattaatctttcctgtaaaagtttttgcatgtctctgcggccatctaaaatacaatgaataaaaacttctttcccggtaacctggtaaataattctgtaaggtttatagatgatctctaaaaattcatttattccgaaaagacttaattcgggaggaacatggccacgttttggatttttttgtagcaataaacatttctcatataatttggaaaataatttctctgctttttcttccgaatcgttgaaataaacatattggtagatttcaaacagatcttcttcggcagaagcaacaatattaactttgaatttcactttgtccctgtttaaacttatttatacggcttcgcacattttcaaatgatttattcagagttttataattaccctttttaagttcttttccgctcagtgcaagaattttgagcaatgcaatgctctcttgcgtcttctcatatactttaacatcctgaagtattacttttgcttcaccgttatgagttattattaatgtttcctgattttcagaaacgttccttattacttccgaagcatgagtttttaaataactgattggttttacagcttcactgaatttcatttaacaccctttctttttacgactataatatagtcctttaagtagtctatatcaatgcaagcattaaatcattttaaattgagccacggaggatgaaaatttagtactggggactaaatactaagtactgggtccgccgcggcggattagtatctagtatttagataaaaattgagacctgcctgccgaagttgtaaacgtaggcaggatggagaatggagaattgtgaattgtgaactgccttctggtatagccacaagccggacaggctgtgcctatgacagataaacttgacggcatggtaaaaatttggtttactgttaattaaaaaaatgttaggttaaaggtgtatgggaggctaatattccgaattatccaattacttagaataaaaatttaatatatagatttccgtttctttaaaacagcaatcccgcatcgctgcgggactactgtaaacttttcactacggaataatccttattgtgatttgctaatacaaagattaaaatattttcattaaataacaagtggactaagcgatgcaaaaaattcttggtttagatatcggaactaattcaattggatggtctgtaattgaacatgatttagagaaccatgatggtaggattgttggtttaggaagcagaataattccgatggaaggaagagaaaaagattttgaagctggaacaactgtgtccaaaacggcagatagaagacaaacaagaagcgcaagaaggttattacaacgctataaaatgcgaagaataagattgattaaagtttttaaagagctcggatggtttccaaatgatttccccgaagagttcaaggatttagaaaaatttaatattaatgacttcgttacatttgaacaaagcacatttgaagaagctaaagaaatatttaatacggacaaaatttctactgattggataatatatttcttgaaaacaaaggctctcaaagcaaagataacactccaagaacttgcaagagtaatatatcattttaatcaacgacgcggttttagaagcagcagaaaagacaagaaagaggaagaactcaataaaggagaaattaaatatccattgagagaaaaaattattgagatattgaaagtcaatttaattgaagaaacggaagagaaaagtaaatatggaaaagtatttcaagtaaccggagttaaccctgaaggaaatgattacaaaggaactctcataagaaaagcaaaaccggattgggaaaagaaaagtgttgaattagagataactaaggtaacaaacaaagccggtgatattcgttttgaatttagattgcctgatagaactgattggacaaggatgaaaattgcccttgaaaaggacattaaagaatccgggctatttgttggcgaatattatttgatgcatcttcttcaagataggaattacagaataaaagatagaatagtagatcgtagtttttaccagaatgagtttgatgcgatttggaaaaagcaatcagaatttcatacagagttaaatgataaagcaaagttacccacgctcattaatatcctgtataaacacaataacgagaagataaatgaattacaagctaacgatcttcatcatttaataaaaaacgatattatttattatcagcgagacttaaagtcgcaaaagcatttagtggcagaatgtaattatgaaaagaaaaaaaacgaaaaaggagatgtttttggaattaaagtagcacctaaaagttcacccgtttttcaagaatttagaatatggcaagatatacatagtttgaaaatattcagactagagcaaacacaagctaattgtaaaactaagtttgatattgatgaatctaatattcatttaaataataggggaaaagaaaaattatttaagctgtttgaaaggaaaacgagcatttcccgaaaggacattttcaaagaactttcaactgaagagataaaattgacagaggcaacacaccgcataaattttcccgaagaaaaagaatttaaaggcaatgagataaaaacaaagtttagaactgttttcaagatacatgattatgaagatgagggagaaaagattttaaataacgataagaaattcgaattgctgtggcatatagtttattcactaaaggaagaaaaacatattgagtctgcagtaaagagaaattttggtcttgatgatgagatagcaaaacatatttcaaaacttccggaattccctagtcaatatgctgcatattcttcaaaagctcttaaaaaattattaccaatcatgcgctgcggttcaatgtggaatgaagataaaataaatactgagacaatagaacggattaataaaattattaccggtgaatttgatacaaatattccactaaaagttagagaagaaattacaaagaaaggatttaaacaaatatcggatttccaaggattaccaacttacattgcttgttatttaatttatggaagacactcggaaagagaaaacgaaaacaaatacaactcttttgatgaaattaaattgcttgaacaaaattcattgagaaatcctatcgttgaacaaataacaaatgagacacttcaagttgtaaaaaatatttggaaagaatatggaagaccagatgaaatacatatcgaattagcaagggatctaaaaaagaatgccgatgaaagaaaaaagatttcgaaccaaataacaaaaaatgaagtggaaagaaaaaaaacagtagctatattaaaagaattaaaaagtgcaaatgcagattcccaatccgacatagaaagattacggctttgggaagaaactggggatagaatagcaagagaatcttatccaaatttttctaaagagccgacaagacaagaaattgagaagtacatactttggggtgaacaaaatcacatttcaccatatacaggtaatgtaattccgctaagtaaattatttacagccgagtatgaaatagagcatataattccccgctcaagattttttgatgattcattcggaaataaaacaatttgcgaagcatcgattaataaatttaaggataattatacagcaagacagttaatagaagaatatggaggaactgagataaaagcaaccggaataaagctcttgagtagtgtcgaatatattcagcacgttaagaatactttctacggtaaaaaacggaggcactttctaaatgaagaaataccggaaggatttattgaaagacaaataaatgatacgcgctatattggtaaaaaacttggtgaacttttatttccggtagcaaatgacggggtcgtgtttactattggatcaattacaagcgaattaaaagataaatggggactgaaccgagtttggaaggaattattgaaaccacgctttgaacgtttggaagagataactggcgaaagattaattgacttcgacaaagaacataacgacataagatttaaaaaagattacaaacgtgttgaccatagacatcatgccttggacgctttaataatagctgcgacaagacgagaacatattagatatattaattctctaaacgcagcggatactgataaagagttaagagatattcgattaaaattggtcaagaaaaaaatccgtgaatttgttttaccatggaaaacatttacgaaagacgctaaagaagcgcttcaaactgtaattgtatcatataaaaatagaacaagagttgtaactaagggatttaatctgtttacaaaatgggtgttagaaaatggtacatggattaaaaagtccattagacaagaaaaaggtcaattgctctctgtacgtaaatctatgttcaaagaaccattaggaataattcatattgctgaatataaagatatttctataaaacaagcgatagaaattcaatttgattatctgacgaaatataattctaaattacagacaagaattgctaataaagaactacgtaatacgataaatacacttattaaaaactgcctgtttgatttaaccgaaactcagaagtacgtgaaaagtaatccaataaaagatgacaatggaaatacaattacgaagattcagattcttgagtttaataagtacgctgcaaaacgtgttgcattggataagagttttgatgctaaaaagattgataaaattccatacgctaaacaacagaacaaccggctcgtaaaaattttgcatgaacatttgaaagataatggtgataatccgcaagaagcatttagcggagaagggctaagcgtactggctaagaaatatggtaaaactattgcaaaggttactacatttgaagaagttggtaacaaaatatctttcaagggaaaactttttgaagcagacaaaggaagcaatttattttttattatctatgaaaatttttcggatagccgtgatagaattataaacacagaatcatccattgcgcttattatggcggttgatgcatttgcgaatggatttactaaagaagatcttggtgaagataaacctggatataagaaaataattctttcaccaaatgatcttgtttatgtaccagaactggatgaaaatatgaaatcaattgactggaacaataagaaaaagatttcagaaagaatttataaagtagttagtttcactggtcaaaagtgctttttcttacctcattacatctcagcattattgttaccttatgataaagcaactggaattggtgaatttgaaagtcaaaacaaatcagaaaaatcattagataatattataataaaggatgtttgcataaaggtaagattagatcgccttggtaacataaaaccaatcatgtaaaaaacaagtatgatcaaacgaacattatatttcagcaacccggcgtatctatccaaaaagaacaaccaattggtaatcaactatccggaagataaggaaaaagaaaaacggccagaagaaatcaacaccgtcccgattgaagatatcggaattgctattctggataatcaacagataactataacgcatgggttactctattccctattggataataatgctgtacttgtaacgtgtgataacagccacatgccaaacggtctttttttaccgctctcaggtaacacggaacagagcgaaaagtttagagctcagattgaatcttccgaaccgcttaaaaagcaattatggcagcaaactatcacgtcaaagattataaaccaagcagtgcttttaaggcaaaacaaaatattagttaccaacatgtttacctgggcaaagaaagtacgttcaggcgaccctgataattttgaagggagagctgctgcatattactggaaaaatttcttcccgataattccggattttattcgcgaccgtttcggtgaacctccgaataatcttctcaactatggttacgcaatactacgcgctattgttgcaaggggattagtcggttcgggacttcttcctactcttggtattcaccattcgaataaatataacgcatactgccttgcagatgatgtcatggaaccatacagaccttttgtggacaagttagttttagaaattgttagcaacggtgaggatttttatgaactgaccacatcaataaagaaacagcttctttcaattcccgtaatcgacataatgatcgggggtgaaaaaagtccgttgatggttggagtacaaacaacaacagcatcagtagcaaaatgctttgaaggaaaggcaagaaaaattatttacccggaaatgtcttagtaataagtttacaatcgatctgaattaacatcaaaaataaattcaaaagggtttaaactctttattgtaaaaaatatgtacgttggaaaaagatttaatgcatatagaataatgtggatacttgtcttttttgatttgcccacagaaaccgcaaaagaaaaaaaagcttacactcatttccgaaaagaattaatgcgggacggattctctatgtttcagttttcaatttatgtaagacattgttccagcagagagaataaaaacgtgcacgtaaaaagaattaaaagtatactgcccgaaaaggggcatgttggaattctttcggtaacggataagcaatttggaatgatggaaatcttttacgggaaacaaacggaaagcggttttgtggaacctcatcaattagaattattttaactctttcaataatccctctctttttaagagagggattcagagagagtccttaaaaccaaactggattttttcaatcctagaatccttgtaagttgtttaatttcaatgacctattttgacctacgttggttttaatattgtcaaagaaacatttgaaagcaaatcacaactcctattctttgctacgatttacaccctgagttggttttaatattgtcaaagaaacatttgaaagcaaatcacaacggaagtagaccaattcaaaacagaggatgggttggttttaatattgtcaaagaaacatttgaaagcaaatcacaacaaactttcgtagatttaattggaggtaaaggttggttttaatattgtcaaagaaacatttgaaagcaaatcacaaccatggtattgtattggcggagtagccgatagttggttttaatattgtcaaagaaacatttgaaagcaaatcacaacaccaatatggggtttaatcgtaataggactgttggttttaatattgtcaaagaaacatttgaaagcaaatcacaacattcaagtggctcgttagcgttatcagacggttggttttaatattgtcaaagaaacatttgaaagcaaatcacaacccggagacatttactattcaggtggtagaggttggttttaatattgtcaaagaaacatttgaaagcaaatcacaaccataaggacccgattaaccacgcaaaatcagttggttttaatattgtcaaagaaacatttgaaagcaaatcacaactgttacccatttcagcccttcaatacagggttggttttaatattgtcaaagaaacatttgaaagcaaatcacaactataaatcttatgtagtgcaataggatttagttggttttaatattgtcaaagnnnnnnnnaacatttgaaagcaaatcacaacaatttccgtttcttcaattgttctgattagttggttttaatattgtcaaagaaacatttgaaagcaaatcacaaccaaaggctcctaaatatgtttcacagacagttggttttaatattgtcaaagaaacatttgaaagcaaatcacaacacttccgttatctgatccgaaccgtgaactgttggttttaatattgtcaaagaaacatttgaaagcaaatcacaacaaaaactcttcacagaagtcacgttgttttgttggttttaatattgtcaaagaaacatttgaaagcaaatcacaaccgttcgcttaattagccttaaaccaaaagagttggttttaatattgtcaaagaaacatttgaaagcaaatcacaactatgttcattcaagcgtttttgcatcctgcgttggttttaatattgtcaaagaaacatttgaaagcaaatcacaactagatgcctttgcccaagagtataaaccggttggttttaatattgtcaaagaaacatttgaaagcaaatcacaactattttggtgagacatggaaagaacatttggttggttttaatattgtcaaagaaacatttgaaagcaaatcacaactctacaggtggactaaataaaggaataaagttggttttaatattgtcaaagaaacatttgaaagcaaatcacaacgcaattgcaattatagtttatgataaaccggttggttttaatattgtcaaagaaacatttgaaagcaaatcacaaccaattgatacttgatgacccggttggtaagttggttttaatattgtcaaagaaacatttgaaagcaaatcacaacgttattgctctcctttcgataatacttttggttggttttaatattgtcaaagaaacatttgaaagcaaatcacaacactctaatacaggtgcaagttatccgaaggttggttttaatattgtcaaag

SEQ ID NO: 955 - DNA, 11186 bp, synthetic construct
  misc_feature 1..11186: note = Synthetic
  source 1..11186: mol_type = other DNA
gacccggatatcctttatcctgaagtacagctcccggtttacaggagatgcattcagccatgcttcaatgacagccgcttcctccggtgtagaggtgccatcaatcacactgatcaatatctggtaatccggttcgtcgttgttgggtaaaagtgccatttcaatgatatagacgatgagtaaattgtttttacgtacgcgggaatgaaattttttttagagaaagaggctgatgaaataattcaccttgcgcaccattccgcggagctgtttgatagctttatacagctgggtttccacggtacgggaggagatccccatggcatcggatatttcaacggttttcatgccctgctgatatcgtaatttaacgatctcgcggcatttgggtggtaattgctctatcgcctgccagacgctggtttccgattctgattccagcaggcttttttgaccggtattcgggtgaaagaattcaagttcctgacggatgatggacacttcctccaggaattttttatgtactgcctggtgtttgaaatggtccaggcatttattgtaaacgcttcggaagaggtagctgcgcacgtttgccggcagcttgttgtgggcctgaatgaatacatcctgtacgaggtcttctgcggtctgggggtctacgaacttcgccgcataccccaccaatgcagcatagtactgatggaatacctgggcagtatccgggccatgcatggaaatgttcaggtcttcgtcacgatcctcctgcataagatagattcaggttttttcaaataatcgggtggtaactgtttaacgtggttttggctgataagagtccactgtatacataagagtaaaactattcaattacagggaaaagagtatgcgtattttaacacaaacatatatttttttacccttaacatataaagaaagccgttgggcaacggccttctttatatatctatttttgcgcagatcgttattcctgccgcgttgtttttaatccttccggctctttaccggcggcctgagcatcgcgggtatttttctgtacggcaatggcgccaaaaacgctcagcaggaaagcaaaagcataaaaccccttctcgctcggcaacaacgttgcattccacagtcccaccaccagcattattaatgttagtatcatggatgcccagctgataccataataaatatcggttacagggataccttcaagacggtcccgcacgcatttctgaacggacactgcggcaaacaaaccgtacatcagtactgtaaaataatatcctttttcattcagctgcatttccgcattccacaacccgataatataacccagcatgccggtgaacaacgccacccatgaggcagctacaaatgctaaagatggtttttgtttcatggtatttgataaaaggttaaaacagtcggtaaaatagggaattatatcaacttcaccacttcccttccgttacagatcggaatactccacaggccgaaggaaaaacttgtccgccttagatacgttgttcttgtattcttccatggcagagagctttttccagtcggggtcggcggagaaggatttccagcgtgcatccctgtctgcctgatccctgaacgtggtcatatacatcaggttcggcatcctgctcccggaaagcacttcagcatagaacacggcattgaacccgaggcggcggaagatgcctacttcatccccatcgttgaacatctttactttgttgatatgatatttttcggagggactttcatagctgcgcagttcatataccctttcgctcttcgggccggtcaggccgggcgtcgcatgtaccggcatgccgataaaggctctcagcaggatagactccagtcgcgtataggcggtattgttatgtgccgcgttgatgtaggagcttcccgcctgctgatatgccgcatctttctccagcgttgccggtaacttttcgaaatgttcgagggagcggaacgggatgagcacataaatcttcaggtccgcagtatcctgcgtaaccggcttgaacacgcctacttcccgtatacccgcgcggtgcagtgcggggaggtatgcggtgcgcaggaagctgtccacacgctgaacctgtgcttccgttttgacatgatagatcctgatctgataatattcgcgggccggcggtttgccggcagcgaacagagaaagactgcagcagagcagcagtgtgcagaaagacaaggtggaatttttcattgttaattggattctggagggaagatagggagtatggggggaagatgcaaggggcggtaacatttatatgcttccgtagttggaaaggctgatcagctgctttacgtcccggatatagatctttcgtcctgccgtatccacaatgcccgccgtctttaattccttcaggaaccgcaccacgttctccacggctgttcccaccatattggccaggtcattccgtgatatattgatcacgatatcttccccttcaacagtctcctccttgaatttctcccgcaatacaatgagcgtaacggccagtctttccttgaccgaacgatgtgcgaacatcgaaatgctgttggttaacacggcaaattcatggctgagtgttttcaacaaccgccgggacagtatggaagaacgctggatcgtttccaggaagtcttccttcgggatgaatgcgatcaggctttcttcgatggtggctgcggaatcagggtatctttcctccgcgagtatggcatgatagccgattagttcgccagtattcgccacgtaaatgatctgttctttcccttcccggtccagcttgtatttctttacttttccccgtttaatgaaaaatatccctcccggcgccatcccctcacggaatagcacatcccctttgctgtactgctgctccgtcatgttgcggcacaggctgttgtactcgtcttccggcaggttattgaggacggactgggatttgaaattccatttatcgatcgggaacagacccgctaaactcatgatcaacagtttttacatatcgaaaattgacttttatcaattttttgattgataagtttcaacgcgttacgaaaatactaacagtagctttgcagcatgcataatacaagtgtttcgagaccaaggatccatttcacgaaagaacatcaatggatcgattttaatggcacagtcgcttttataggagtatccaaattcaggttgacaggcatcaggcatatcgattccattcgctggatgtctgctaaaggtacgttggaaaaaggaacattgatcgcccatatctgttccggggacgacgttataccagtgcacgcgccactccattgtaaatttctgggcccgaacgcgaagttaagcaataatcccaatcttatcctggaaagcccgcaggatcagggatggctctttttcgtgacgccactgaagttccagccgaaagacaaagaagagcttttgcagccggaagcttacaagaaacttcttcacagtattcattcttcctgatcatccaatgcagcagccgatccctcccacatcatcttattacagatcagatgccgctttcgactggttgtacccggagcggatacagcgattgtccaggcgccactggacgcccatcggcgtggtcaaaaaagcagcgcaattccttgcacaggagcctggcagaaaagtgctggacattggcagcggtgtgggcaagttctgtattacagcagcccactattttccggaagtttcctttttcggagtggagcaacgtaaatccctgcaccggcatgcactctccgcacagagagcggtgggcatacccaatgtaacgttcattcacggcaacttcacgcagatcgacctcacggaatatgatcacttctacttttacaatgctttcttcgagaacctcgatcaggatgatcccatcgatcaccagatcgaatactccgtgagcctgtatacttattactcgcggtatctctacaaggcgctggaaagcaagcctcccggcacgaggctcgtgacgttccacagcctggaagatgaagtgccgcccggtttccaggtagtagatgcttccgttgatctgttactaaaaatgtggattaaatactgatctgccatgttcaggcccaagctactgcaaacgctgaaagattatacctggagccggttttcaaaagacgcgcttgccggcctgatcgtaggtattgtagcgcttccgctcgccatcgcattcgcgatcgcatcaggcgtttcgcctgagaaagggttattcactgccatcatagcgggtttcattatttcagcgctcggcggaagcccggtacagatcggcggcccaaccggggcattcattgtgatcgtgtatggtattgtgcaacagtacggagtcggcgggctgaccatcgctactttcattgccggtattatgcttgctatcatgggctttgcaaggatgggctcgcttataaagttcattccgcatcctttgatcatcgggttcacgagtggcattgcgctgatcatatgttcgtcccaggtcaaggattttctcggattgcagatgggggccgtgccttcagggttcctggaaaaatgggaagtctatgcacaacatctgtcatccgcaaacatctacgcattccttatcgcggcaggcaccagtttactgattgtgtactggcccaaagttacacatcgcatacccggatctctcatcgccattatcctttccacacttgccgtacaactttttcatttacccgtagaaacgatcggcagcaggttcggaagcattcccactacattgcccgcaccttccctgccccatatcgatcccgcaaccatccggcagctgatacaacctgcattcaccatcgccctgctggcgggcattgaatcacttttgtcagcagtagtggcggacggaatgaccggcggacggcataaaagcaacatggaacttgtagcacaaggtactgcaaatgtatgttctgccgtattcggcggtatacctgccaccggcgccattgcgagaactgctaccaatatccggaatggcggtcgtacccccgttgccggtatgatccatgcactgacgttgctgctcatcctgttattcgccggcaaatgggcggcgttgatccctatggccacgctcggcggagtgctggtagtagtcgcttacaacatgagtgaatggaagaatttcagctccatcctgaaaggcccccgcagcgatgccgtgattatggtcaccacttttgtgctgacagtcatggtagaccttaccgttgccattgaaataggcatgatactcgccgctttcttcttcctccggaaaatgacgcagttcagcaatgtgcaagtccccgaatccatccagaacatttcgcttcctcccggtattgccgtatttgagatcaccggaccgctcttctttggcgcagcttacaaattcaaagatgcaagcggcattatcgaagcacctccggctatcctgatcattcgaatgaaagacgttcctatcattgatgccacgggcatacatactttgaaggaagtgtacagggatctgcggggtaaggggacgaagctgatcctgtccgaagtgcagcatacacaggtgttggaagaattgcggaaatcccgtttgctgtttgcgattgggaaggcgaatgtggtgcgtacgtttgaggaggcgttaaccagagggatggtgatactggaggatgcaaagtgagttttttgttttcgaacttatatgttaacttgagattaacaattattactgctgaattcaagtaaaattgaccctttactataccgggaagaagcaagcgaaccctgtgaaatgtgtaacctgtaaaaacaacaatcccgccatgggcgggactactgtaaaagttttcactacggaataatccttattgtgatttgcttcgatccgaagataataaaaattccaaaacaaatccactatgaaaaaaatccttggccttgacatcggcactaactccatcggatgggcaatggtagcaatgggagaattcgggaagaccggtcgcatcctgggactgggaagcagaattattccaatggatggggatgccctgcaaaagtttgaatctggtaatacggtttccaaaactgctgaccgcaggatggctcggacggttagaaggatgaagcaacgatttaaactccggagaacccggctgatacaggcgttgaagaccctgggatggataccgggtgaattccccttggacttcaggcaaccggagatgcgtccatttgtgctaaaagactacttaccatttgagagcgctacaatagaagaggcaaggagggctttcagtgtggaagccttgcccgaagactggatcgtttattatctccgcaggaaagcgttgtatgagaagatatcactggcagacctcgctcgtattatatatatgatgaaccagcgcagaggattcaggagcagccggaaagatcagcgggaagaagatgatatcaatgaggtaaaatatcccatctatgagaaatgggtacagatacttccagtcaccggcatcgcagaaatatccgaagagaaaggaataaaaacactggaaataaaggcaggagacctgactggtcaaataaaaagaaagaatatccctgattggtcaggaaaggaaatagagctggaaatcactaaaaaaacaatcaaatcaggagaagtaactgtcagctttgcattgcctgatccgaatgactgggaaaagaagaagaaagccttggaagagaatattaaagattccggctattatgccggcgagtacttctttcatcagttggtgctcgacaaacaatatcgaatccgtcagcgtattatcgacagaacattgtaccggcaggagcttgatgcgatctggcaaaaacaggccacattccatcccgctttgaacgatactgcaaagcttccggaaatagctaccatgctttataagcacaatgttcaaaaacaaaatgaactcattgcgaacgatcttttgtacctgtttgcaaatgatatcatttactaccaaaggccgctgaaatctcagaaacaccgggtagaccgttgtacgagggagtacaaagaggatgacaagggtaataaatatggggtacgggtagcaccgaaatcgagtccggagtttcaggaatttcgcatctggcagcagatccataatctgaaaatattggaaatggagggggaaacagatgggaaaccacaattagatgtcgaccggacggaattatatcttcgcagcgagcagaaagccaaactgttcgatctgtttgacgggcgggcggccgtttcctccggtgctatattaaaagaactgggtctggctcatcgccagttccggttgaactacccggaggaaaaagaattccctggtaatgagaccaaggcagtttttcggaaggtattccggaagcatggttatacttccgaaggggaaaatctgttaaatgatccggtaaaatgctatctgctgtggcacatcctctactcgctgaacgacgccaaagatatagtctcggcattgaaaaacgctaagcatggttttggattgacggaagaggtgatctaccatctatccaaactccctgatcttcctaaacaatatgcagccttctcttccaaagcccttcgtaaaatgctcccgttaatgcgctgcggaaaatacttctcaccggatgctattggtgctctaaccagggaaaaaatcgaaaaaatactggatggcgagcttgacagtcgtatcagtgatgatttaagggagatgataaaaaaactgaatttaaagacggtcgaggatttccagggtagtgccacctggctggccgacttcattttgtacgacaaatacgccagtcgggaaaacaatagtaaatatgaattccctgatgatatcaacattcccgaacttatacccaataatagcttacggaatccggtagtagagcagataataaaagaaactttgggcctggtaaaggaagtatggacgcaatatggacagccggatgaaatccatctggaacttgcaagggagttgaaaaaaacggcggacgaaagaaagaagattgatgaccggaacaaagcgaatgaagctgatagaaaaaggatacgggcaattttacgggcgctgaagaatgcgaatcctgattctgttaccgatatggaacggataaggctatgggaagaaacaggaaacgaagaagccagaacaaatgccattaaattttccaaagaaccaacttctgctgaaattgagcgatacaagctgtggggagagcaaaatcacatgtctccctacactgggaaagtcatcccgttaagcaaattattcacacctgaatatgaaatagagcatatcatcccacgcgctcgcttcttcgataattcgttcctgaataaaacaatctgcgaatcgtccgtcaataaattcaaagacaagcttactgcccgccagctaatagaagcaagtggaggggaaacaatatcgaacaacggcaatacttttactttgctggatgcgtccgcttattttgatcattgtaaacgaatattccgcggtgggaaatacaggaatctcatgcgggaagatatccctaaggatttcgtacagcggcagatcaatgatacgcgatacattacccgtaaactggcggaattactctaccccattgcaaaagataaggaaggtattattttcacgatcggctccatcaccagtgaaatgaaagagaaatggggactgaatcacgtatggaaagagttgctccgtccgcgttttgaaagactacaggtaatcaccggagaatcccttatcgactttgatccggctaacaatagtctccattttaaaaaagattacaaaagagtagaccacaggcatcatgcattggatgcgctgatcattacctgcaccaccagggagcatatccgatacctcaataccctccatgctgctgaagaggcatctaaatataagtatcttgtaaaaagcaaatacagcagctttgtacttccctgggaaacttttacaaaagaagctaaagaacagttgggaatggtcattgtttcccataagaacagaaaccgcctggtcagtaaagccgtcaataagatcactaaatggaagatgggtaaggatggcaagtggagcaaacatgttgtgccgcaggtaaaaggagagctactggccgttcgaaaatccatgttcaaggagccattggggaaaataacgctgcgcgaatataaagaggtatccattaaacaggccctggaaatgcagttccaggctctgaagatgcctgacaaaacatccattccgcaagtggccgatactttcctgcggaaacaattgaacgaattgatcaggaattgcggattcgatctcaaagaaacggaaaagcatctgaagaaatacccactgaaagatatggagggtaatatcctcgccaagctcttcgtcacgcaattcaacacatatgccgccaaacgtgtaacgctagataagtccttcacggtggataaaattgcgaaaattccgaatgcagaacattcctggctggccaggctgttacttcagcacctggaaacatataatagtgatccgaacgaggcttttcgtggggaggcattggaagcactgaataagaaggccggcaaacccatcaacaaggtcacggtttatgaggagataggtaagaaagtagatttcaatgggaaactggtggagggcgataagggcaccaatctattctttgtgatctatgaaaaactggccacgggagaaagggtcattaatgaggatagcgcggtaccgttactgacagcaattacccgtcttgctaataagtggccgatagcggagcagagggatgagttcaggccgatcgtcctttccccaaatgacctggtatacgttcctgaaccgggtgaggaagtaagcacgatagattggatgcatgataaagcccggatcaacaaccgaatatataaagtggtaagctttacaaaggcacagtgtttcttcatcccacatttcgtttcccggccactggatgacaatgctcaggaattgggctccaataacaaagctgaacgcgcctgggatggacaaatgatcaagaacgtatgcgtgaagatccgggtggataagttaggaaacattacagaggtgaacgggaagaaaatataccactcttcacatctcgagaatgcggcatctaatctcacacaatgatcaaacgaacattgtactttggtaatcctgcttacctaaaaaccagccatgaacaactcgttatcgaaatgagtgacgccgatgcacccaaaagtgtgccgatagaggatattggcctacttatacttgatcatcaacaaatcacaataacacaggcagtgatggccaggctattgcacaataatgtggcgcttatcacctgcgatgcaactcaccatcctgtaggcatgctattaaacctcgatggtaataccctgcagagtcagaaatttcagtcacagctcgaagcctctgtgcctcttaaaaagcagctatggcagcaaaccgttgccgctaaaatagtgaaccaggcaaagctattagtggaacagcgggaagatggcaagtatctgtttgagctctcaaaacaggtaaaaagtggtgatagcgagaatgctgaggccaaagccgctaatttctattggaaacgggtattcccggatttcctggaattcaggcgggaacggtttggagcgccacccaacaatctgctgaattacggctatgccattttaagggcagtaatggccagaagcctggttggtagcggattattaccaacattgggaatattccacagaaaccaatacaacgcttactgcctagccgacgacattatggaaccctatcgtccattcgtggataaagtcgtatgcgagattatccgcatgaacggcagatacctggatatgggcactaccataaaaaaacagctattgagcatcccggtaatggatgttttcttagtgtgactgggaattctgctgatgattgtcgtgagtctggctacttggtgtgtcaagaagtacgggtgt

SEQ ID NO: 956 - DNA, 8300 bp, synthetic construct
  source 1..8300: mol_type = other DNA
  misc_feature 1..8300: note = Synthetic
tactcctatttaacctaataaaataacaaaataattacgtcttatattgtaattgtgagttttaacctcacaatatccatacaagacatcataaacataaattttgttttaataatatacaagtagttaaggagttacaaaaacagatcaaaccttagtccctgtttgcgaaaggcagtgtttaacgctaactgttgcaaatgattattcaataaatttataagtaaaactacgtacaataataaagtctactcaggaaattaattaattaaaaaacttaacgttgagaattgaacattattctaaatgttgaggagactgtataattgaattggctattgctgtggatatcctaaagagggaatgctgattaaagcagacaggattcttaatggttttttaataagcaattaaaaataaccatatagtgagaggcaatgaacttccaaaacagatttaacaaaagaagctgcggataaacttgcaagacaaaagaatgaagaaatattcaagggtaagtctgattattataaggtggtggagatggagagtgtgaattttttcataagcaattaaaaataactatgtagggagaactaagtaatgaattgtgttgtcagtcgtaactttgttagtataaaatttttgtatttaacaattgatcatttgttaataattttttaacttaaattagttatgatatgttttattaacatcctctttcatttccaatattttataccttcagtggatgctgatatggcgggtaaggcaacgcaaattataatcacaaaattgaccagatgatttaaaacaacaatcccgcatttctgcgggactgctgtaaacttttcactacggaataatccttattgtgatttgctgatacaaaaattaaaaaataattcttaaatatcaagcgagataaaaatgaaaaatattttaggactagatatcggttctaattcaatcggttgggccttgattgaaaacgatttagaagagcatactgggaagatcattgctgctggcagcagaattattccgatggaaggtagagaaaaagattttgaagctggcaattccgtttctaagaatgctgatagaagggtcacaagaagcgcaagaagattgttacaaagatatagattaagaagaacaagattgataaaagtcctaaaaactttaaattggatttctaataatttccctgaggattttaaacatctagataaatttaatattaacgattatttgccttttagtactgaaacgattgaagatgctaaaaaattatttaatagccaaagtattcctaatgattggataatttattttttaagaaacaaagcattaaaagaaaagataactctacaagaattagcaagaattatttaccacttcaatcagagacgtggttttaagagtagccgtaaagatagaaaagaagaactaaccgaaactgaagaaattaagtttcccttgcgtgaaaaaagtgttgaggtactcacgataaattcaatccaagaaactggagaaaaaaataaatttggtaaggtatttttagttcatgctgcaacaccagaattaaatcaaattgttgggactattactcgtaaaatgattcctgattggatatcaaaaaaaattgaattagaaataacaaaaattacaaataaagcaggtgagattagatatgagttccgactacctgacagatctgattgggaaaaaatgaaagtcgctttagaaagagatattaaagaatctggtttacatattagccaatatcatttaaaccaattgttagttaacagaaattatagaattaaagacagaatagtagatagaagtctttaccaagctgaatttgatgcaatttgggcaaagcaatcagaatatcacaaagaattaaatgacaattcaatattgccttcattagtcgaattattgtataaacataattatgaaaaaagaaatgaactactaaaaaacgatttacattatttactcaaaaatgatattatttattatcaaagagacctgaaatcgcaaaaacatcttattgcagattgtagatatgaaaagaaaatggataataacggtaatatttatggagtcaaagttgctcacaagagttcccctgtttttcaggaatttaggatttggcaggatattcaaagtcttaaaatatttagattagagcaaattgaatccaatggtaaaataaaatttgatgttgatgaaacgaaaatttatttaactcaagataaagttgaaagactttttactctttttgataaaaaaaataatctaacacaaaaagaaatatttaaagaattatctgatgaaaagcataaactatcggaaacaacccatcgtcttaactatccaaaagaaaaaatctttaaaggaaatgaaactaaatcttttttcaggaaagttttcaaaaagcataattacgaaatccaaggcgagcaaattttaaatgataaatcaaagtttgaattactttggcatattttctattcacttcctgatgagaaaagtatagtgtctgctcttacaaggaatttttcctttccaaatgacttggccaggcatatagccaaattgccagaatttaagagtgaatttgcatcttattcttctaaagctattaaaaaacttttatcactaatgagaactggttcgtactggaagatggaagatataagtcagcaaataaaagaacgtattgaaaaaattattactggcgaatatgatgaaaatatttcaattgcagttagaaataaaattgtagattggcaaatacataataaaaagctcaactctattgaatgctttaatggattacctttgtggctagcagcatatgttgtatatggccgtcattctgaaagagaaaacagtgacaaatttgaaagttttgatgaaattaagttaattaatcagaataccctaaggaatccaatcgtcgaacaaattactaatgaaaccttacaagtcgttaaggaaatttggaagaattatggtagaccggaagaaatacacattgagcttgctagagatttaaaaagaaatgctgaagaaagaaaaaaaataaatgatcagatatttaaaaatcagactgatcgtaaaagagttgtcgcaattttgaaagaattgaaaaacgcaaattcagattcaccttctgatatagaacgtttaagactttgggaagaaactggtaatagagaagctaaagattctttccctaaattttctaaagaacctaccaaacaagaaattgaaaagtatttactttggggggaacaaaatcatatttcaccttatacaggtaatatcatcccattaagcaagttgtttacacctgagtatgaaatagaacacattattcctaaatcaagattttttgatgattcttttggaaataaaactatttcagaggcatctgttaacagttttaaagataataatactgctatgcaaatgataaatgaacacggtgggcgtgagatagaacatcgtggtaaaagatttaaattgttatctgtagatgaatataagcaacacattaaatctactttttatggtaaatggaaaaaggtaaattattttcttagagaagatatccctgaagattttataacaagacaaatcaatgatacaaggtatatcagtagaaaattaggtgaacttctgtaccctgttgctgatgatgaagttgtttttactatcgggtccatcacaagtgagcttaaagataagtggggtttaaatcgtgtctggaaggaaattcttaggccacgttttgaaagacttgaaaaaatcacaggtgaaaaacttatcgatttagataaagaacataatgatattcattttaagaaagattataaacgtgtcgatcataggcaccatgcattagatgctttaattattgctgcaactagtcgtgaacatattagatatttaaattctctcaacgcggcatcagaaaaagacaagcttaatagaaagtataagcttgtcaaaagtaaaattagagaattcaatctaccttgggatacatttacaaaagatgttaaggatacattaaagcaaattatcgtttctcataaaaatagaacacgcgttgttactaaaggattcaatctatataccaagtgggtcttagataatggtacttggattaaaaaaatggtgcgtcaggataataattcattattttctgttcgtaagtcgttatttaaagaaccattaggaaaaattaatctcgctgagtataaagatgttaatgtaaaaaaagctgttgaagttcagttcaattatttaacaaaatatacatccaagcttcaaccaagaatttccaataaatatttaaggaactatattaataagcttataaaaaattgtgagtttgatttatctgctaccttaaaatacattaaagataatccaattaaggataatgatggtaaggtattacctaaaattcaaattttagaattcagtgagtacgctgccaaaagagtaacattggataaaacttttgatattaaaaaaattgaaaagattccttattcaagtcacaataataatcgtctcgttaaaatccttagagaacacttaaatgaaaatggtaataatcctgcagaagcatttagtggtgaaggtcttgatgtattagctaaaaaatacggcaaacccataactaaggtaactacatttgaagaaattggtagtaaattttctttgggtggaaaattagttgaagctgataaaggtagtaatgttttcttcgttatatatgaaaacactaatgatagaaacgataggataattacttctgaatcctctcttccattgttaaatgttattgaatgtatttcaaataatttaccaatagtacaggataaacctggttataaaacaattattctttcccctaatgatttggtttatgttcctgaagttgatgaaaatattaattctattgattggacaattaagcaaaatatttcagatcggatttacaaagtcgttagtttttccaaaactcaatgcttttttattcctcatttcgtttcaagtccattgatagaaacaactgagcttggacataacaataaatctgaaaaaacttgggatggaataatgataaaaaatgtttgtataaaaattaatatcgatcgactcggtaacattaaattagcaatatgattaaacgaactttatactttggcaacccggcttatctttctaaaaaaaatgatcagcttgttataaagctgcctgaagaaaaaaaagcaattgaaggacaaattgaatctgatcaaaatcaaaaatatttgaatcggggaaatattaattcaattccaatagaagatgttggtatagtcattctggatcatcaacaaattacagtttcgcaaggtttacttgcttcattattagaaaataatactgcacttgttacctgtaatttttcacatatgccttctggacttttccttcccctagaaagcaatttaacacaaagtgaaagattccaggcacagattgaagcatctgaaccattaaagaaacaattgtggcagcaaaccataagtgctaaaatttataatcaagctgctgtgttaagaaacagaaaaaagccaaatgataatatgaaacgctgggcaaaagatgtaaaatcgggggatatagaaaatcttgagggtagggctgccgcattttactggaaaactgtatttccgcaagcactggaatttgtaagagatagaaatggattgccgccaaataatctccttaattatggatatgcaatattgagagcaatagtagcacgtggacttgttgcctctggtttacttccaactcttggcattcatcaccataataaatataacgcttattgtcttgccgatgatataatggaaccctaccgtccttatgttgatgaattagtaataacttttgttgaagatggtgaagattttacagagcttacatcatcaataaaaaaacaacttcttacaatcgcggcaattgatgtattcattgatggagaaaaaagtcctttaatggttggaatgcaaaaaacaacttcatcattagtcaaatgttttaatggagaggcaaaaaaaattaattatccaacaatgtttaactcaccctaattcgtcgcgatgaacctctctttcttatagagagagacttttaaaatgttttttactaactcctctttgtaagagaagggttggggatgagttaaaagtattcataacttaaaaatattatatgaagtaattgctttaaaaaaaatcaatcctaaactccccttttctttctaagtgaagggttggaaatgcgttaaaaaatgtattctcgtttaaatcaatatcgtattatgtgggtattagtcttttttgatcttcctacggaaacaaaaaaagaccggaaagcttatacacgtttcagaaaagaaatgatgaaagacggattttcaatgtttcaattctcaatttatgtgcgacattgcgctagcaaagaaaataaaaatgtacacgtaaaaaggattaaaaacattcttcccgaaaaaggacacgttggtattctatcaattactgacaaacaatttggtatgatggaaattttttatggtagaaaaaaggaagaaagcggttttgtagaatcccatcaactggaacttttctaaaaatggagtccacctttgaggtggcctccatttcagaagctgatattaaaaaccggtcaataaaattatacttacggattttttcaatcgtaaaattctcgtaagtccttatttttcaatgaggtattatacaataagttgtttttaatatcctcaaagaacaaattgaaagcaaatcacaactaacaaatgctttcttaccattacttttttgttgtttttaatatcctcaaagaacaaattgaaagcaaatcacaactttccgtcgctgattcaaaattataaaatgttgtttttaatatcctcaaagaacaaattgaaagcaaatcacaacctgcctaacatagttaatagcataatttaggttgtttttaatatcctcaaagaacaaattgaaagcaaatcacaactgaaaaaagagaaggcgcattaaaaaatatgttgtttttaatatcctcaaagaacaaattgaaagcaaatcacaacaactgcaaaaggattccaaaaggtagtaagttgtttttaatatcctcaaagaacaaattgaaagcaaatcacaacatttttttcgtgtgggaaaattatcatatggttgtttttaatatcctcaaagaacaaattgaaagcaaatcacaactagccacgcatcaacccaactacgacttaagttgtttttaatatcctcaaagaacaaattgaaagcaaatcacaacattgtcaggttctttaacaacactcgctacgttgtttttaatatcctcaaagaacaaattgaaagcaaatcacaacaggccaaagagtctttcgatatgagattttgttgtttttaatatcctcaaagaacaaattgaaagcaaatcacaacataatccattcggaattatgaaaacattgcgttgtttttaatatcctcaaagaacaaattgaaagcaaatcacaacaatcttatcaattacttccacaagaaattagttgtttttaatatcctcaaagaacaaattgaaagcaaatcacaactgaaaataaaaaattacttcttaaaaaatcgttgtttttaatatcctcaaagaacaaattgaaagcaaatcacaactaactttactacggttaaaccaaattttttgttgtttttaatatcctcaaagaacaaattgaaagcaaatcacaacgtagcgatgatgttaatgcaccgtttattggttgtttttaatatcctcaaagaacaaattgaaagcaaatcacaacgctttttcatcagcattaaattctggtttagttgtttttaatatcctcaaagaacaaattgaaagcaaatcacaacactgtacagaacgcggctggacacggcagggttgtttttaatatcctcaaagaacaaattgaaagcaaatcacaactattgcagtgctgatgacagctccaaaattgttgtttttaatatcctcaaagaacaaattgaaagcaaatcacaacgctcgcgaatctgtcttctattagcttttgttgtttttaatatcctcaaagaatccgcctatggcggaaaagcaagttacaacgtattcgtgtctgtaaacaattg

SEQ ID NO: 957 - DNA, 24314 bp, synthetic construct
  source 1..24314: mol_type = other DNA
  misc_feature 1..24314: note = Synthetic
tcataaaccagtgagggcagtttggtggccttctgtactttcgtgatggtttcttcccaatgtttcagcaggactttcagttccgcatccagttctgccacgcgctttccttcggccacggtacgtacgatgactccgaagtttttaggcttgatgctctgcagcagttgtttgaggcgtgctctttcctcgctggatttgattttttgtgaaacggatactttgtcgttgaaaggtatcagtaccaggtagcgtccggcgaacgacaattcgcaggtcagtcgcggccccttggtggaaatcggttccttgacaatctgtacgatgacttcttgtccctgctggagcacgctggaaatggttccatccttttcaatgtcgggcagcatggaagctttcgacatgggatagagctttttccggtcgctgattacttgcttgaggtacttctggtaagaatgaaattgtggtcccaagtccaggtagtgaagaaaagcgtctttctcaaagcctacgtctacgaagcaggcgttgaggccgggcatgagtttccggacttttcctacgtacatgttgcctacggaaaaggagaggtttcgttcctctttctggaactctaccaggttcttgtcctccatgagggctatagagatttccttgggctgtacgtctactactaattcgcttgtcactttcttacttggttttttgtttttactagattgctaattacacaaagaacaaacctgaaagacttttgttgagctttgcaagtttgttctttattgaagtcggacagactaacaattattttttgcttttatgtctgttctttcttagtctttttttacgtttgtgagtagacattttatgtctttttcttttctttccgcttggcatagcttcaaaattttatgggttaatactaaatgttaattatttttttactgatagagtaaatgtttttgctggtttgaatgccggaatattgtgctccggaataataatggtagtgttcttagaaatattacgagcagttttctgcgctcttttctttacaatgaaactaccgaaaccacgaaggtagacattttcatctttcgacaaagattcttttactgatcccatgaacgcctcaagggttgccaatactgttgccttgtcaatacctgtgttcttggcaatttcgtttacaatatctgctttagtcatttcgctaataattattgttatacgttatcttaaatttttggactgcaaatatatagcttttctgtatctttcgaaaatttcttgagaatatttttttagaaaactcgtgcttttttgagggttacgagtcttttatacagctgtatgacgtggtttttctgatatgtcgggcaaatgtattatttttgcagccaaattatagattggatgaatttgtttgcaactacaataattgactggtacaaggagaacaagcgtgacctgccttggcgtgacaccaaagacccttataagatatggatttcggaaatcattcttcagcagacccgtgtggtgcaggggtatgattattactgccgttttatggagcattttccggatgtggaaacactggcaaaggcttcggaagacgaagtgatgaagtgctggcaagggctgggctattattcgcgagcccgtaacttgcacgaagctgcacgtacgattgccgaaaaaggggctttccccgtgcgttatgaggaagtccgggcattgaaaggggtgggagactatacggctgcagccatttgttcttttgcctacgatatgccgtatgcagtggtcgacggaaatgtgtatcgcgtattgtccagatggctgggcgtggaagaaccgattgacacaggagccgggaaaaaactgtatgcctcgctggcagatgaaatgatggataaatctcgtccggcattgtataatcaggccatcatggatttcggagccttgcagtgtgtgccgtcatcgccttcctgcctgttttgtccgctttcagacagttgtgtggcattgcaaaagaatttagtgggcaaacttccctggaaatcacgtaaaacgaaggtgttagaccgttatttttcctatatttacgtgcgtgcaggcgtgcatacatttataaaaagacgtgaagccggagacatctggcagaatctgtacgaattcccgctgattgaaacggaacaggaagtaggagaagaagaaattttctctcttccggcattccgagaactggtaggtgaccgctccatacgtatgttccgcgtggtatcgcctgaggtgaaacacgtgttgtcgcaccgggtaatccatgcccgatgctatgaagtggaactggcagaggaggatgctgtcccttctggatttcagcgtgttctgattgacgatttgcataaattccccgtgtcgcgcttgatatctcgttttttttcgttacttttgaaaccaaattataaaaaataaaattatgtcattgaataaagtacaattgattggaaatgtagggaaagaccctgaagtaagatatttggacagtggagtggctgtggctactttcccgctggctaccacagaccgtgcctatacgctggccaatggtacacaggtgcctgaacgtacggaatggcataacatcgtgttgtggcgcggactggctgaaacagctgaaaaatatgtgcacaaaggcgataagctgtatattgaaggaaaaatccgctcacgctcatacgacgaccagaatggggtgaaacgttacgtggtggaaattttcggtgacaatatggaaatgctgactccgcgcgctgcccagcctgctgctcctgcacaaccacaggccgcttcaccggctgctgctcagcctgagaacaatccttcggatgatttgccgttttaatctcaggcggtcttaaattgatgtttaactacaggtagatagaatggaccctgactcgtgtttgctccgctggacggagctttgtaacggaattaccgtaatgcccctttcgttaggggctgcttttgctttgctgctggcccttatgttgttatatacttcgggcttcgtttctgcttctgaaatagctttcttttcgttgtctccttctgatttgaacgatatagaggaggagaatcacccatctgactccaaaatcaaggctttactggaggattcagagcgtctgctggccactattctgatttcgaataactttgtcaatgtgaccattatcatgctgttgaactatgtgtttgccagtgtgattgactttggcgaggcaaagattttggaattcttgattgtaacggtcgtattgaccttcctgctgttgctgttcggcgaaattatgccgaaaatttattcggcacagcacactttaccttttgcccgtaaggctgctcccgtagtgacggttttgcgcaccgtgttctggcctatttcttcattgctggtccggtcttctttttttatcaaccgtttttcacagaagcggaaagtccggaatttgtcggttaatgaactttctcaggcattggaattgacagatattcaggaaacaccggaagaaaacaatatgctggagggaatcatccgttttggagaagaaaccgcgaaggaagtaatgacttcccgtctggatattgtggatttggaaatacattctactttttctgaagttctgaagtgtatcaatgagaacggatattcgcgtattccggtgtatgaagaaacgcgtgatcagattaaaggtatattgtatatcaaggatttgcttccttatttggacaaaggtgaggattttaagtggcagaacctgattcgtcctgccttgtttgtgcctgaaaataagatgattggtgatttgctgcgtgattttcaggcgaacaagatccacattgctgtagtggtggatgagtttggaggtacgtcgggtatcgtgacgatggaggacatcatcgaggaaattgtcggagaaatcaatgatgaatacgatgaggaagagcgcacgtacgtgaaactgacggaaaacgtgtatgtattcgaagggaaaactctattgtcggatttttataagattatcaaagatagtgaggaggtatttgaaaatgtatcgggggatgcggattcactggccggccttttgctggaactgaagggagagtttcccgcattgcatgagattatcaattaccagaattaccgttttgaaattctggagatgacttcgcgtcgtatccagaaggtgaaagtgaccatcttgcctgtggctcaggaagaagacgagtcgaaggagaagtaagtatgccgctgctgaagacttggacggaggagaatggcagatggggaatctggcaggtgacggaaacgatggaggagctttgtgcctgtctgtcggacgatgtggtgcggcaggaatttgaacgtctgaaagctccttcccggaaattggaatacctggcagtccgtgtgctgctgaaaacgatgttggggaaagaagtgcggattggacatgaaccttccggaaagccgtttctgacaggaggggagtatcatgtatccatttctcatacgaagggatatgtggcagtcggtttacatgagtctgcccagcccggcattgatattgaggtttatggcgagcgggtacgaaaggtagaatctcgctttatcagagaagacgagatgccggaaagagcacggatggagttgcgcgaagaactgtatcagttgcttttgcactggtcggccaaggaaaccatgtacaaagtgctcgatatggcagaagtggatttcctgcaacacttgaaagtgtgtccttttaaattgtcttcctccggaacctttgctggtgaatcgtaccggaaagcggacaaggcccgtttcctgattcattacctgatacatcctgagcttgtctgtacctattgcctcaataccgaggctcgtagaacaaacaacggatgagtttgtttatgaaagaaaaaagatgaacaagaaattacgtaaaacaattcggctgacggccatttcgttaggagcgttactgactgtattcttgttggccgtaaccatcgtggtgaattttatttttacaccggaaaagctgacgccggtggtgttgaatgtggccaatcagtcattgaatgcccgtttgcagatgaaaagtgtggagctgactttcttttccacctttccgcgattcggactgaaggtgacggatggagtattggtgtctaaagccattaatgacacgttgtggcagaagaccgattcactggtttctttcaagaagtgtgtggtagtggtgaatccggtggattatctgctgcatgataaaatcagtctgcgttatctggggctggaggatgcatcggtatatgccttcaagaacaaggaaggaaaaagcaactgggacatcgtaaagagtacggaagagacggtagaagaggataccacatctcagaagtctcagattcaggaaatagacataaaccgtgtggccttgaagcgtacgaacgtgacgttcgacgacagggatacaagggtatacgcccgtgtgcagaacctgaacatgaatctgaaagcttccttgaagaaagattattccatgttggcactggagtatgacaacgagaatctgctcttctggcaggacggacagctattggtgaatcacctggctgtaggactgaatgcggatatgcaactggatcgtgtttcccgacgacttacgctgaaggatacggggctgacattaaatggaatagccctcgacttgtcgggtacccttgggcgggatacgattggcggaccggcttcggtagatttgacctataagttgcatgccccgtcgctggaaaccgtgtttaatatgattccggagagtgtgctgaagcgtcaggagcttactgccaaaggagaggttacgttagaaggaaccttgaaaggacattatggcaaacagcagatgccggaagctacacttcacatgagcattaaccaggcctcggcgaagtatgccgacttgccctacggtattgacgacctgacggcggaattcagcgggtatgttgatttcatgcgccgaaagccctcgtatgccgatttgaagatattccgttttaagggagctcacaccgatatattggccgacggaaaagtggaagatttgttgggcgaccctgacatcactttccatacccgttcggaaatagaccttacagcactggctaagactttccctttacaggagggagtgtcaataggaggccgggtgggagccgatttccgcttgcattgtcgcttgtcgactattcagaagcaggactgggggcgtgtccgcttgaaaggaaagctggatatgcaggacatgttcttgcgcgataccaagaagaattttgaatttaccagccaggccgctctccgtttcattggagaagacaatcttgccgcacaaatggacattcgcaaggcttccttgcgtactgcggctatttctgccgatttggatgcattgaacgccaccgtccagtctacgaatccgcaggatacgacccgtctgattgacgtggaatgtaaattgcagatgagccgtctgaaaggagagatgggcgattcgttgaaggtgttcagtaaaaaggcaaaggcttcactgcacctgcaaccgggtaaactgaatccagccatgccgaatataaaggtggccttggagaccgatacactcttctgccgtatgggcgatatgaaaatgggcatggacaagggaggctttaacttgacggctgaaaaggtacgcgattcagtatggcttcccaaaggaattgtcggatttaatcgactgactttaagaacccctgaattggctttgccggtgagaatgcgaaaaacagctgtaacggtaggcgatagagtcatcaccttgaaaaatgccagcatgcgcatcggacgttccaacttgacggcaagcggatcggtttacggcctgtatgcggcaatgaagaaaggaaaaatgctgaaggccaacctggaaatcgcttcccgcaacctcgattgcaaccagttgattaatgcactgaatttcccgcaggatacgcttcaggcagagaccgacacggtatcgtcggcagaaccaatgcagctgtttgtcattccgaagaatattgatttcgagttgaagaccaacctgaaaaaggtgacttacggaaatatggtgtttgaaaatgtgcaaggagcggtagacattcgcaatcaggccgtttatctgaaaaagctgactatgcgcggactggaagcagacttggaaaccacactggtataccgtgctcgcagaaaaacaagaggctatgccggttttgatttccgtttgcgtaaggtaaatatcggtaagctggtcgatttcataccttcgcttgatacgattgtgccgatgctccgttccttcaagggaatggtcgattttgatgctacggcagaagcagtgctcgattccaacctgaacgtgaagataccaagtctgaaagcggccatgcacattaaaggcgacagtctggtgctgatggatggagaaacctttgccgaaatatccaagacgctgatgttcaagaataagaaacggaatgtgttcgacagtatttcggtgaacctgaccgtgcaggacggcaatgtgacggtatatccgttcttacttcagatagatcgctataaggcggccgtgggaggaacccagggtttggacatgaactttaattatcacatctctgtgctgaaatcgccgttgccgttcaagacgggagtgaacattaccggaaacctggacaagatgaaaatccgtatcggcaaggcgaagtataaagatgcagttacgcctgtggaaatccggaaagtggacagcacgcgtgtgaacatggggcaggagattattcatagctttgaacgcgtgataagccgtacgtacagaggaaaacttccgcaaggggctgagtgaggtaagtttgcatatttatctgaataattgtatatttgcgaactagagacagaatttatatgagtattaacactattaattattaaaatcttcattaacctatgtttagtaaacatcctaaagggctggtagccgcatcgttggccaatctgggagaacgtttcggtttctacaccatgatggcaattctggtgcttttcttacaggcgaagtttgcgttgagcggaacagaagccggatggatttattccactttctatttttcaatttacattctggcgttggtcggtggtgtgattgccgataagacgcgaaattacaagggaaccatcttgattggtattgtcctgatggcattgggctacgtattgctggccattccttctcagactccggtagtgaataaggcattgatgctgacagttacatgcggagctttgtttatcattgcgtttggtaacggactgtttaaaggaaaccttcaggcgctggtaggtcagatgtacgacgacccgaagtactccagcctgcgtgactcaggtttctcctggttctatatgttcatcaatatcggtgcgatttttgctcctcctgctgcggtaggcgtacgtaactggtggttgagccataacggttttgcatataatccagatcttcccggattgtgccacggacacttggccggcacattgcagccgcaggccgctgaaacttatcagacactggctaatgaggtaagcggtgctcctgtaaccgacctgactcagtttgctaacgactacttgaatgtgttctctacaggattccattacgcatttgcggtagcgattgtggctatgctggtatctttggttatttatgtggtgaacaagaaacgcttcccggacccgagcaagaaggtagccgacaaatctgctgcttctgcggctacggtagaaatgagcgcacaggaagtaaaacagcgcatcatggctctgtttgccgtattcggtgtggtaattttcttctggttctcattccaccagaatggtttgactttgacattctttgcgaaagaatatactgacctgaacttgtttggcatgcctattactgccgagctgtttcagtcactgaatccgttctttgtagtattccttactccggtagtcatggcggtatttgctcgtcagcgtgcgcgtggcaaggaaccttctacacccaagaagattgccattggtatgggaattgccgctacaggctttatcatcatggcagttggttcatttgtaagtgacctgcctttgcatcaggatattgtagcagcaggaacttcaccggttaaagttactccgctgttgctgatggctacttacctggtattgactattgccgagttgtatatttctccgctgggaatttcttttgtatcaaaggtagctcctccgaagtatcagggtatcatgcaaggtggctggctgggtgctactgccatcggtaaccagttgctgttcatcggagcggtattatatgaatctattccaatctggatgacatggactgtattcgtagtggcttgctgcatttctatgtgtaccatgttgttcatgctgaaatggctggaacgcgtagcaaaataaatttctcgaaatagaatttacttgtggaatccctcatgcggttgcatgggggatttttttatggaaatattttaggtaaactttggggatacttatgagaattcattatagcctaataaacaagtgacattgcttaattaagtgtaaataaaaatgggagaaatgctgaatcaaccaatatacattgtttatttttgtattattgaaaattatcttagctccacggagtacgcagagctgagataattttcgacttcagataactgaagtgaaatacttcggcttatagccttgttgtgaaaagtcttcactttttagtatcttggtagcaaagataaataagaatataacaacgacaaaataaaaatagaaaatgatatgactaagattttggcttttgatttgggttcgtcttctataggatacagtcttcgggatacagacaagaatggagaaaacattatagaccagttagttttatatggaagtataatatttagtccgggaatggcagataacggtgtttctaatgcggcagaacgaacaaagcaccgttcttcaagacacttgtatagggtacgaagataccgcatctgggaaactcttgccacacttatagagttcggttgttgtccgttgtcaaaagaagatttggataaatggaagacttatgacaagaaaaaaagcctgacacgccaatatccggttgatgctgtggagtttgaaaaatggataagaatgaatccatacgaactgcgagaagaactagccacccaacaatcagattttacaaaagaagaaaatcgtttcaagttgggacgagcattatatcatatcgcacagcgtcgcggattcaggagcagtaagggggaaaccttaaaagagcaggagaaagatataaatgagaatccagcagaagaaataagaatagactctgatttattgaagaaatccgaagaaaaaaagtcaaagaaattggtcgcatacatggaagagcattcactacctacggtggggaatgcatttgccaaacttattaagaataaagtaagagtgcgtgctagtgaatatcaggcagtacgttctcagtatagagatgaaatagaatatatcttcaattttcagaaaggtttggatgccaacggagaatttttcagacggatatacagcacaggtaatgacggtacaatcttttaccagaatcctatacgctcacagaaaggacaggtaggtaaatgcacgttggaaccagcaaaaccacgttgccctatcagtcatccgaaatacgagaagtatcgtgcattttcttttatcaacaacatcaaataccgtaaaagcattaatgaggattggcagacactcacagccagccagaagataaagctttacaaagagaaatttcttttggtaaatgactttgagtttgatgttatccgcaagtggattgagaaagagataggtttgccaaaagacataagtctttcaaaagagcatggaaccattaattatgatgacaggacaaatgtttctgtatgttctgtttcaggaaggttaaagtctgtttttggcgataattgggaggattatgtttatcagactgctaaaacaagaaaagataaagaaggtaaagagcatactgttacttacaccatagaggatatatggcatgtttgtttttcgtatgatgacgaagatgcagtggtgggatttgccaagtcaatcgggcttgatgccgcacaggagaagaagtttctgaacctatggatgaacattccgcaaggatatgccatgttgagtctgaaagcaatacgcaacataaacaggtttttagtgccaaaagaaaataatccgtcatataaagggtatatctacactgaagcaaccttgtttgccaaaattcctgatatattgggcgaaaagcagtggcaggagtctgaaagcgatatactgcgttccttaaacggattgatgaatgacgtcagggatgaaaactgtatcttgaagattgtaaacaatcttatttcagattacaaggctttggactatagagatttggactacagagaacatttcgccgttaatgacagaagttataagttggatgattccgacaggaaagatgttgaaatgcatacagtgagtttcttcggcaaaagtgtgtgggaaaagaaaccggaagatgaaagagaagaaatacttggaaaggttgaagaattatatcagaattttttctcttcctccaaacgggattattacaacttgccaaaacttggtgacaggataaaactgtatttatcaaataaattccccgaactgcgctgctgtaacgaagatgcggattctcagtctcagtgcaattgtcatgcctgtaaaaagctgaaccagttgtatcatccgtcaatggtggagttttacagacctgttgtctgcaacggcaagaagcttcttggaagccctgtaaccggttctttcaaaaatccaatggcaatgaaagtgctgcatcagttgcgccgtttggtcaatgggcttatacaaaaaggactgattgatgaagatactcgaattgttgtagaaacagcccgtgaactaaatgatgcaaatatgaggtgggctattgaggaatatgacaatataagggaaaaagagaataaggctattattaaggctattaaggaaataagaaaagatgatagtgaagtcggtgattccattcttgaaaaagcacgtctacttatagaacaaagtcctgactatctgtttgattatatggacgatgaaaatatgatagacaaaaagggtacagtaaagaagaaaaattcaggtttaatatatgagaaaggcgtaacgaaatatcgtttgtggttggagcagggaatgcaatgtctttatacaggtaaaattataaatttatccgacctgtttgatgaaaatataacggatatagagcatactattccacaaagccgttcatttgataactcaatggcaaataagacagtttgttttgcttactataatcgtgaaataaagaaaaacaggatgccggcagaactggaagactatgaggaaatcaaaaaacgtctgttgccatgggaaaagagagtggagcaactgaaaaatagagttgagttttggaaaaagaaggcaaggcaagccttgacgaaagaaaataaagacaaggctatccggcagaaacatttatggcaaatggaactggactattggaaagacaaactgtcccgtttcactatgacagaagtgtctgagggatttaagcataggcagctgaatgatacaaggctgattaccaaatacgcatatcattatttgaagtctgtgttcgataaagtagatgtgcagaaaggaataataacgtctgaattccgcaagatatttggtttcccagtaaaaacacgcgacaaccattcgcatcatacgatagatgccactattcttacattgatacctgtagcatccagacgggatgaaatgttaaggctattttatgaaatacaggagaataagaaattgaatatagataccaaagaaaaagaaaagcaactggaagggctgataaaatcttgcaggatagggaaaactgtcggtatcaccaaacatatagaaaataatatattggttaaatacgtttcaaaggatagagcccttactcctgccatacgaaacaaaagggtaggtggaaaggtcgtttgggaaaggaatgagaaaggagaaatacttatagacactgatggaaagaaaattcctcaatataagcttacaggcgattgcattagaggtgaattacatcaaacctcgttttatggtgctatcaaacaatcaaaaaaggaagctgaaaagaaagaagggaataaagaagaacgaaaaaaggatacaagttatgatacatcatacaataatatttcttatgtcatccgtagaaagctaaaatttaaaactagcaaaaaagacacaggtttcgaaagtttagatgatctgcataaagtaatagtagatgaacacttgttcgatataataaagaagcagtgtggaggaaaagattttaaagatgtttgcaatgaagggttttatatgccaaattgtaataatcgaatcaggcatataagatgttatgtatatgatgtaaagaatcctttacatattaggcaacaaacctatttgtctaaaaaagattataaacagacttttcatgtgaaaacaggtgatttatatgcaatgtgtagataccgtaatttagataaggatgtaaaatatgaggtcttaacgttatccgacatcagtatgaacggtaagaaaggttatggtatatcagaagttattgatgatgaatattacttggatgctatattgcgttcaggaaagcaagtaattctttataaagataagaatgaccttggtaatcttttgagaaaaccattaaacatgaagttgttatctgaaagactatatgttattgaaagatttgaaggtaataatgttgttaatttaaagaaacatctctgttccagacctttcaaagaaacaggtagaggtaaagccattaatttaaaatcatttgccaatggccttcctgaaaggatacgacagagtatggtacgattgaattatcttcttgaagatgtagattttaaaattaatcttgaagggaaaatcgtttttaggaataagatttaatattcaattgtgattttattatgaaagaaaaatcccgcttgtatggcgggattttctattgaaaacaacctcatttaggatttctgaatctctgtataaactattgatttacaattgatagtgcggattctgttgttcccaatacttcaaagatactaaaaaggaagcaattcacaactatataaacacataataattaaattattagttgttcccaatacttcaaagatactaaaaaggaagcaattcacaacccatcgaacgaatgggactgaaggagggaggttgttcccaatacttcaaagatactaaaaaggaagcaattcacaacccatgtatgtggtgttgtcgtaacctgtaagttgttcccaatacttcaaagatactaaaaaggaagcaattcacaacagctctccataggtccggctggaatgcaagttgttcccaatacttcaaagatactaaaaaagaagcgattcacacttccataccttttgataattatactattttgattgttttcaatgttacaaaggtaatcgaaaatagtgtaaattgaaatctggctgtaattttaacccctcatttatattctttttaatggcagataaaataatagagtctctttaaagtctttgcaacctcagtttattaattgaaaaatagtctggttaaaccaagaaagggctttttttagtactgccaaggaagtactccagtactgtcaaaggagtactgcagtactttcaggggagtactccagtacttccttgtcagtactggcattagggaaaattgtagtagctttagtctttaataaatacagaatgtcttgcttggagtgctttatccttatatatcttttttcagtgtgaagacaaattccagtcctcctttcggcatgttcttggcgaagatggttccaccatggaacaatacggcgttcttcacgatggccagtcccagacctgttcctcctaatttccgtgaacgtcccttgtctacccgatagaagcgttcgaacaggcggttcaggtgctcttcgggtactcccacaccggtatcagagaaactgaaatagtagaatttctcatcctcgcggaagcagttgatggtgatttgtatgtcattacccgcataggctatggcattgtcggtcaggttgcggaagatggagtagagcagcgagctgcttcctgtcagtatgacttccgacgggagcttgttcaccacagtgatatgcttttcttccagaccgagtgctacctcgttcaaaatgttttctacaatcttgctcaggtttacctgctctttctctaccagttccggtgcctcgtccattcgggtcagcacagagatatcgcgtaacaggaaggtcaggcggttgctctgggcatagcttctttccaggaagacacggacattttcttgcggaatgttcgggttgctgataatggtttccaggtatccctgaatgctgctgacgggcgttttcagctcgtgggcgatgttctgagtcagctggcgtttcaggcgggcctgctcttcttcctgagtaatatcgttgatggatatttcgaacgacatatcctgaaagatgatgcattccacggtgaacgagcgtgcgttcttgttgaggtgcatggcataccgcttttcctctttgctgaaattgccttcgttccggtttaagaactcaatgatgggttgcagttccggaatatcgaaaagttcattggtagaacgcaaattacggtcggatatattgttgatgtattgcgtaaacaggttgttgactaggatttcctgccgttctttggtaaagacacccaatccctcgtgtgaggtctgaaggtgcgaaatcagtttctcacgctcaatgtagagagcttctttcgcccggtgcaggcgtttgtatatcttaatgatgtgttgtgaaatctctcctaattcgtttttagggaaagtttgcaggatgtccatgtcaatcggttcgttccggtcggccttcatggcaaactgttgcagtttggtgatggactttcccagcttcctagtaaaacggtagaagatgaaaatcagtaccagacagataatcagcgcaaaccataggtagccggagtcagcttgcaggtgttctgccagactcaggttgtagggaagggcagaccgtatgatgatgcggtagggaggataatagcgtgcggaataaaaatattcttctccctgaatgctttccgactggcggctgatggaatagccgcttccatacatgagtgcgtcttgcacttccttgcgtgaagagtggttggcaaagcttttccagttgacatttgtattgtcgtacactactttccctgacggctcaatgagcgtcacccgcaggttgggcatcatgtgagtcgtcacataactctgcatggagtcagagttgaccccatgatgatcggccagaaagtcgcacagctggttgttatagttttgcagctgcgtgttcagtaattctattttgtaagccttttcgcgtttgtattgaaacagcatgaagcatactgcatatcccagaaaaaggaatatgacagaaagaaacagcctctgactgaaagggaggatgcgataagaaaattttgtcatgattgtgccaccgtaatttattcacattcgaaacagtatccataaccgagacgggttacgatacaagcaccgtattcaccgattttcttgcgaaggcgagtgatattcacatcaatcgtacggtcgagcacatacacttcatcgtgccatactttcgccagaatgtcttcgcgggagaatacgcgtccctggttctgcaacaggagcagaagtatttcaaattcctttttcgttaatgaaatttcctcgttgttgatggatacttttttcttcggaatgttgacagacaatcctttataaatcagctgttcgggcacctgagtctgtacgccggccgtgcgtcgtaacaccgcctttaccctcatgatgacttcacgcagagagaaaggctttgaaatatagtcgtccgctcccaggttgaatccggtcagcgtatcattttccgtatcctttgcggtgatgaaaatgataggaatgttctgtgtagccttgttctttttcatcatgctggccattttgaatccggaaatttctcccatcatcacgtccagcagtatcaggttgtaacgtggcaattcaagcttcaaggcttcttcggcggaattggcagtatctaccatgtatccttccatttcgagattgaattttagaatctcgcacaagtcttcttcatcgtctacaactaaaatccggtaatcgttcatgcgtattttctattaattaatacaaaattcaatgtgatttagttttcgttacaaagatgaccctttcttgtttcgtccttatgaaatagatgttacatttaggttacaacacgggcttggtaaactctccggctatggagcggttcatttcgctgcgtatttccttgggagtaagcccgtggccgagcaggaacatcagcttggtgagcacgctttccacagtggcatcatatccgctgatgacgcccgcatcgagcaggtgcagaccggtttcgtaacgtgccatttctaccatacccgtctgacattgtgaaatgttgacgatgacgattccctttgccgtagcttctgccagcaagtgaatgaaccagggcttctggggcgcatttccggagccgtacgtcttgagcactaccgctttcagaccgggtgtgttgagcatcgtgcgcacgatattttcctgaatacccgggaaaagtgtcaggataatcacattcgtgtcgaagacatagtgtgcatgcatgggcaggttgggatccaccttccggatacggtcgtattcgtacttgatgtggataccggccgtggccagtgccggataattgtaagaacggaacgcgttgaagttttctgcattaatcttggtcgtacggtttccacgcaacaagtggttctcgaagaaaatgcagacttccggtaccacggcagttccgtccggatgttttgctgcggctatttcgatagaagtaatcagattttcctttccgtctgtacgtagcacaccaatgggcagctggcttccggtaaggataaccggtttgctcaggttctccagcatgaaactcagtgcggaagcggtataagccatggtgtccgtgccgtgcagaatcacgaacccgtcgaagttatcgtagttatattggatgattttgaccagtttggcccacaaggccggctccatgtccgaggagtcgataggagggttaaactggtaagaggaaatgcggtagttgaaccgtttcagttccggtacgttctcttgaagttggtcgaagttaaatgcctccagggcaccggttcccggattttcaatcataccgattgtacctccagtgtagatgagtaatacggaaggataatctggttttatcatttgatgcttcgtttagtttggcacaaagatagcaaaaatatgctttgactgaaagaataagccgctaaaaataacagaatgattaattatccttcgttttctagcatttccaataatttatcgatggccttaccagcatctttctcttcttcaagcaaagtcacgaatttgctcccgatgatacatcctgaggcgtatgtcgctgccgattcgtaagtggatttgttggagataccgaacccgatcatccgtgggtttcgcaactgcatttgcttgatacgctggaagtaagcctgcttctgtgcattgaattccttttgtgctcctgtcacggccgcagaagataccatatagatgaatccgtcggtatgtgcatcgatttgccggatgcgttcttcgctggtttccggcgtgatgagcataatcacgtggatgccgtattgttgtgcaatgggacgatagctttctaagtagtctttataaggaaggtcgggaataatcacgccgtcgatgccgcatgcctgacattgccggcagaaattctcaaaaccatactgcatgatggggttcaggtagcccatcagcaccagcggaatgcggacatctgtgcggatttgctccagctggctgaaaagtttgcggagcgtcatgccgttgcgcagggcctgtgtggctgcgtgctgaatgacaggaccgtcggccatcgggtcgctaaacgggataccgatttcaatcatctgtacccctttccgttctaaggtgcggatgacttcggcagtaccttccaaagttggggtacctgcacagaaataaatggaaagcacgtggtctttatgtgtctggaataattggtcaatgcgattcatatcagtaagtttttagaggttgtacttgttttgtttgaaagagtaaataaagtcagagagggcagccgcatctttcaggccgggagcctgttcaaagccgctgttcaggtcgatgccggcccagcggggatgactgaatttcagtaatgcatccaggctttcaggcttcagccctccgcttaacaggaaaggcgtctcgctgtggtagtgcgtcagcattttccagtcgaagcttttgccggaacctccgtatccgttgcagggagtgtcgaacagaaaatagtcgcagaaggcggcatagctttccgtagccagtaggtcatcaggcgtacacagggagaaggccttgatgacacgtaggccagtctgttgcacttcccggcaaaactctggcgattcctttccgtgaagttgaacgtaatccaattgccatgttgctaccctttcccggatttgcgagagggaagcattgacaaacactcccactttctgcaccgtctccggcaggtattccggtacgcccggtacatagcggggagaaccttcgtagtcgatgaatcccatccagtcggcccctgtttgctccacctggcggatgttctccgcctccctcatgccgcacactttgacaatcataaggctacagattgaagaaagtccgacaaagccttttccggtgaaggcgttttcatgaaggtttctcccatcaggaatcctctgaaaccggcttcacgcaattgcctgaacgtgtcgggttgcgagatgccgctttcggatacccacagcagttccttcggcaacttccgggccaggcggaacgaattctccacatccgtatgaaatgtgcctaagttccggttgttgaccccaatcaggtctacatgctcgtgcaggtagtcgagttccttttccgtgtgtatctccagcaggacctccatctctaactggtgggccaattttcccagggctttacattcgtctacggtcagggcggctgcaatcagaagtaccacatctgcaccggccagcttggcttgatatagctggtagggactgacgataaaatcttttcgcagcaccggaaggtgtgtcagcgggcggacggcctgcaaatctttcaggttgccgccaaagaatttcgggtcggtcagtacggagatgccggaagcacctgcacgctcatagccggggacgatgacggtcgggtctgcttgtggagcaatatctcctttcgacggggagcgtcgtttgaattccgcaatgatgcccgagggcgatgcggccagtgcctgcttcaggcttttcgacggacggggagtgcccaactgctggatgaggaagtcttgagatacagcttcttcctgaagggcaatttctgtgcgcttatgagccacaatggtatgtaagatatcagtagtcatcattcgtctaatggttaagggtaaggaacttgcgtagagtggccagggcttttccgctttcgagcgattctgtggccagtgccacacattcttctattttcttctgaggctccagtgcctggatggcaaacgaggcattgatcagcacgcagtcggtctgtgccttgctgccctcattatgcagcacccggtcgaaaatggcggccgcctcttccggggtatttcctccgtaaagttcttcctggcgtgccatggaaaaacctaattccgaaggacgatagatggtttcgtaacggttggtcatcaccttgaattcgtcggtcagtgagatttcatcgtatccgtccaggttgttgaccacggcaaactggatgccgagctgctggagcgtgttggtgtaaagccgcatctgcgggaggtcggccactcctaacaactggcaggccggatggcaggggttgaccagcggacctaataaattaaataaggtacgtacgcctaatgccttccgcacgggagctacggttttcagggccggatggaagaggggagcgtgcagataagccatgccgcattgttcgatggaacgtttcagtttgtccgcgtcgtttgtgaattttacgccgtagtgttccatgacgttgctggctccgctcaccgaagtggctccgtagtttccgtgcttggctacccggtaaccggctccggccacgacaaagcaggcacatgtggagatgttgaaggtgtttttcccgtctcctccggtacccacgatgtcaatgggatgaaattcatgcaagtcgacgggcacgcaagcctgaagcagcgcatcgcggaagccgaccagttcgtccaccttgaccccgcgcatctggaaggcagccagtagggcggctgtctgtgcttcattcatctcgccgccggtcattctctgcatcagcatgcaggcttcttcgcgtgtcagctcttcgtggtggaatatccgtttcagtatttgtttcatattgtgtatctaagttttatgagtgagaaaatagggttttctttattgatggtgtatccagttgcccagcatctgttttccttcgggggtgagaacggattccggatgaaactgtacgcctcgcacatcgagtgtgcggtgacggagtgccatgacgtatccttcttcacttacggcggtcacctccagacactccgggaaatctttccgatcgactacccaggaatgataccttcctacctgtacggtggagggaagtccttcgaacagatagtccgtcgcagtcagggtgacaggactctgtatgccgtggaacacttcatccaggttggtcagctttcctccgtacacttcgccgatggcctgctcgcccagacagactcccaatatcggtttctttccggcgtacctgcggatgacatccagcaacaggccggcttcttccggaacgccgggaccgggcgacagcagaatcttgtcgaattcctccagttcttctaaccggaactggtcgttgcgttttacggtgacttctgctcctagttcttttatcgcatgactcaggttgtacacaaatgagtcgtagttatcgatgatgacaattttcatggtgtgttatattttttcggccaggagaatggcttttttcaatgctcccaacttgttgtttacttcttgtagttcattgttctcgtcacttttggctacgatgccccctccggcttggaaccagagctcgttgttacggctcacgaaggtgcggatggtgatggcctggttcaaatcgccgttcagcccgatgaatccgatgcaacctccgtaagcccctcggttgtgcggctctatttcactgatgagctgcatggcctttaccttgggagccccactgagtgtgccggccggaaaagtatcgatgaatgttttaatcgggtcggcttccttgtccagtgtgccgcttaccctgctcaccaggtgaattacatggctgtagtattgcgactgtttgtagaattccacgtgcgtgtcgtggcaattccggctcaagtcattccgtgccaggtctaccaacatcacgtgttcggcattctccttcgggtcggccagcagggcttcggtcagtgcggcatccgtctttttgtctccgcttctgcgggtggtgccggcaatggggtcgatggtggcctttcccgcttcaatcttgcaatgcgtttcgggagaggaaccgaaaatccggaaaccgccgaaatcaaaataaaacaggtagggtgaaggattgatgcttctcaatgcccggtagagggtgaaatcatcgccctcatagcgctggatgaaacggcgggaaagcacaatctgaaatacgtcgcctctcttgcagtgggcaatgcccttgcggatattggccttgtgttcctcgtcggtcagcgtactggtggtgtcgcccgtcgcccgaaaggcgtaggtggtgtagtttcggttcagtaccgctttctccacttcgtcaatgtgactcggctcgtcgttgccctgcagctccaccagcaccatctcgctctggaagtcgttgaacacaatcaggtacttgtagagaatgtagagaatctccggcgcatcgttcttcgggtcgctgctgtctttcaccggaatctgttcgaagtagcggacggcattgaacgtggtatagccgtacactcctccgtagcgggcatattctccttccacctgaaactgtctcaggaaatactggaaagcatcttccacctggaactcgggggtgagcggacgttcttcacggcttttgtctggaaagaccatggtcacgattccgtggtttacggagaaactggcaatggggttcagtccgataaaagagcggttgttttccactccgtggtaatcggaactttccagcagaatactttgcggaaacaggtcgcgcaccttcaggtacgtgctcacaggcgtatgcaagtcgccgggcagcgttttgtagtgggtggtataagcaaattttttcatggcttttctcgtttaaaaaatttcagggttgtttttgtatttcagataagtgtcaatgtctttgtcgcctcttcccgatacggtcagtaccacgatgtccgagggctggaacttcactttctccagtgctcctaaggcatgggccgactccagtgccggaatgatgccttccagtcgtgtcagttcgaaggcagcccgcaggg

SEQ ID NO: 958 - DNA, 14566 bp, synthetic construct
  source 1..14566: mol_type = other DNA
  misc_feature 1..14566: note = Synthetic
atggagaggagggaaaacgaagcgataagccacaggggttatccaagaaacagacggaggctcgctattgtaaggaacactcaggggatgagcgtattgccaggcgtagcgctgagtattttgcaagtaagattgagacggccatcagcatgctcaagcgctcaatcatagagggtgtacgtttcgattatcttcttgttgacagctggtttacctgctctgaacttttgaagttcgtggtctcaaggcactttggatgccaccttatcggaatgataaagatgggcaagacaaagtatgagacagatcttggaaacaagacagcgcctgaacttatcaaggctctccagaaatccaagaacgtaaagtatagccgctcaatcggttactacacagcaactgtctctgctaaaatctccagcattaaggtctgcctgttcttctacagaagaggcaagaacggcaattggaatgctctgcttacctcggatttgaaacttgatgcgaaagaagccttcagactttactcaagaagatgggttatcgaagtggctcacaaagagatgaagcaaaatcttaaactcggaaagaaccagtgcagagacttcgccggacagattgcaggcatatcattgtgcgtactgcaatacaatattctcagttatgtcaaacgctatgagtcatacgaaactatcggaggactctttgctgaaatttcaaagaactctgttgaactttcagtagcagaaaaaatctggctgctgattgtagaagttataaacgtcattgccgaggtacttaactgtgatgcaatggttctgactgaacaagtaatatcaaacgataaacaaatcaaagctgtgaagcaggctttcgacaggctgacaccagccgcctgaggagctacactttacttgcgaaacttaagttattaattataaaaaaagagtgcgtgccagtgaatatcaggcagtacgttctcagtatagagatgaaatagaatatattttcaattttcagaaaggcttggatgccaacggagagtttttcagacggatatacagcacaggtaatgacggtacaatcttttaccagaatcctatacgttcacagaaaggacaggtaggcaagtgtacgttggaacctgcaaaaccacgttgtcctatcagtcatccggaatacgagaagtatcgtgcattttctttcatcaacaacatcaaataccgcaaaagcattgacgaggattggcagacactcacagccagccagaagataaagctttacaaagataaatttcttttggtaaatgactttgagtttgctgatatccgcaagtggatagagaaagagatatgtttgccaaaagacataagtctttcaaaagagcatggaaccattaattatgatgacaggacaaatgtttctgtatgtcctgtttcaggaaggttaaagtctgtttttggcgataattgggaggattatgtttatcagacagccaaaacaagaaaagataaagaaggtaaagagcatactgttacctacaccatagaggatatatggcacgtttgcttttcgtatgatgacgaagatgcggtgtcgggatttgccaagtcaatcgggcttgatgcctcacaggagaagaagtttctgaacctatggatgaacattccgcaaggatatgccatgttgagtctgaaagcaatacgcaacataaacaggtttttagtgccaaaagaaaataatccgtcatataaaggttatatctacactgaagcaaccttgtttgccaaaattcctgatatattgggcgaaaagcagtggcaggagtccgaaagcgatatactgcgttccttaaacggattgatgaatgacgtcagggatgaaaactgtatcttgaagattgtaaacaatcttatttcagattacaaggctttggactatagagatttggactacagagaacatttcgccgttaatgacagaagttataagttggatgattccgacaggaaagatgttgaaatgcatacagtgagtttcttcggcaaaagtgtgtgggaaaagaaaccggaagatgaaagagaagaaatacttggaaaggttgaagaattatatcagaattttttctcttcctccaaacgggattattacaacctgccaaaacttggtgacaggataaaactgtatttatcaaataaattccccgaactgcgctgctgtaacgaagatgcggattctcagtctcagtgtaattgtcatgcctgtaaaaagctgaaccagttgtatcatccgtcaatggtggagttttacagacctgttgtctgcaacggcaagaagcttcttggaaaccctgtaaccggttctttcagaaatccaatggcaatgaaagtgctgcatcagttgcgccgtttggtcaatgaacttatccaaaaaggactgattgacgaagatacgcgaattgttgtagaaacagcccgtgaactgaatgatgcaaatatgaggtgggctattggggaatatgtccgcaagagggaggaagaaaacaatattataatcgaagctatcaagaaaataagaaaagatgataatgaagtcagtgatacagttcttgaaaaagcacgcctgctgttagaacaaagtcctgactatctgtcttatataaaggaaaaagaagaagctgcagcaaataaaagtaataaagacaagaaagaagataaaaataagcaaaagaagaaagatataaagaactatagttcatggttggaaaaaggcattaaatgtatttacacagataagcctattagcctaaccagcttatttgtggaaaacgaaacagatatagaacatacaattccatgtagccgctcatttgataactcaatggcaaacaagacggtctgtcttgcctattacaaccgtgaagtaaagaaaaacaggatgccgacagaattggaagattatgaggaaatcaagaagcgtctgttgccttgggaagaaagagtggaacatttggaatacagggtcaggttttggcagaggaagtctaaacaatccctgaagaaagagaataaagacaaagctatccgtcagaaacatttatggcaaatggaactggattattggaaagacaaactgtcacgtttcaccatgacagaagtgccagagggattcagacgcaagcaactgaatgacacaaggctgattaccaaatacgcttatcattatttgaagtctatattcggtaaagtagatgtgcagaaagggataataacgtctgaattccgcaagatatttggctttccggtaaaaacacgtgataaccattcgcatcatgcgatagatgccactattcttacattgatacccgtggcatccaagcgggatgaaatgttaaggctattttatgaattacaggaggataagaaactgaatatagtcaccaaagaaaaagaaaaacaactggaatggctgataaaatcttgcaggatagggaaaactgtcggtattgccgaacatatagaaaacaatatattggttaaacacatttcaaatgacagagcccttactcctgccatacgaaacaagagggaaggaggaaaggttgtttggaaaagaaatgaaaaaggagaaagacttatagatacagacggaaagaaaattcctcaatataagcttacaggcgattgcattagaggaaaattacatcaagcttcgttttatggagctatcaagcaatctaaaaaggcaattgagaagaaaggtaaaaagaaaaaaggacagaaaaatgatataagttataaaacatcatacgatgaaatttcgtatgtcatccgtagagagcttaaagggtttgaaagtttagatgacctgcatagagtaatagtagatgaaaatttatacaaaataataaagcagaaatgtaaaaaagaacaatttagaaaagcttgcaataaaggcatttgtatgccaaattgtagttacccaatcagacatgtaagatgctatgcttatgatgtgaagaatcctttgcatataaagcaacaaacctatttgtctaaaaaagattataaacagacttttcatgtgaaagtaggtgatttatatgcaatgtgtagataccacaatgctaataagaaggtgagatatgagattgtaaagttatttgatatcagtaaaagtggggaaaaaggttatgacatacaggaagttctagatgatgaatattatttggatactattttgcgtcctggaaaacaagtgattctttacaaagatcaaaacgactgtgataatcttttgagaaagccattaaacattaagttgttatctgaaagactatatgttattgaaagatttgaaggtgataatattgttaatttaaagaaacatctctgttccagatccttcaaagaaacaggtagaggtaaagccgttgatttaaaattatttgataatggtcttcctgaaaggatacgacagagtattagacaattgaactatcttcttgaagacatagattttaagataactcttgatgggaaaattatttttagtaataagaattaattcccagttgtgactttattatgaaaagaaaaatcccgctgtatggcgggattttctattggaaacaggttcgtttggactttctaaatctctgcgtaaattattgacttacaatggataatgcagaatcagatgtttccaatgtttcaaagatactaaaaagtaagcaattcacaaccatttcattgaaatgtactgcgtcctgatagatgtttccaatgtttcaaagatactaaaaagtaagcaattcacaacgacgaaacgaatatgaatcttcccgtgagggatgtttccaatgtttcaaagatactaaaaagtaagcaattcacaaccatagatctgattaccgataccggcaaactgatgtttccaatgtttcaaagatactaaaatgcaagcaatccacaacctggaagaagagatcgaacggcttaaagggatgtttccagtgttttaaagatataataagctaaccatagtttcatatctttaattgctattgtagtatctatgtgcttaataattagagcattactaaagtgattaggatattatgaactatgtattgagtaagatgatatttttagcggccttaaatataaaaatggtttgttaatgaataaacaatgatatgttaggaggaggttttttcgctttgtcacattttatttgtacttttgcgccggtttttaaataaaggaaaaaagatatgttgacaaatggtatttattcgattgttttgctgattttttcgaatatcttcatgacttttgcctggtacggacatctgaagatgcgtgaagagttcagctggtttgctgcattgccgctgattggagttgttgccttcagctgggcgattgctttctttgaatattgtctgcaggttccggccaaccgtctgggattccgcgacagtgggggacctttcgacatcatgcagctgaaggtcattcaggaagtgattacgctggcagtcttcacggtgttctcaatgattgctttcaagatggagttgcgctggaatcacctggcagcctttgtctgtctgatcctggcggtctactttgtcttccgcaaataaaatacagtgcgtatagccgctcgggctttttgaaaaacgcttcggcgtgcagttgaaaacatttagacgtttcatcctgcacgccgaagcgtttttttctgaccggaccggtgatgctccgtctcagtgttcgcgctccttcaggtactggcgggttttctccacatcgtccttgcggatgcgcagtttttccgaatggaacatttcctgatagaacagggagtcctgtgctttcttttcgcggatatagtcgtagagttcatccatgttcttcggttcttcttctttctttttttcgggccgcggagcgggagccggacgttccggaatgacaattccccgatggtttgcctgatgaccgggcaaggtggcgggcagggtatctgccggaaggggagaggactgcaccgtgctgaggctgtcagccacgctgtccgtcacgagaggcatgaaagccaggctgttccggcggaggtagttggggaacttcagactgtcttcccgggtcggcttgtagtccttgtaggttttccaggcatttgcatatttgcggttgtgcctgagggtgcgtccgtgcttgttgaaggtctcgtagagggtcatgatgaagtccaggttgttgatgcagatcgcagggcctaccggggatgtattcatctgatacatgcttccggtggagggagtgggactccagtcatcgttgtagtaggaacggtaggggttgaaggtccagtagatcttctgttccttggggcggccttccaccgtgcggtcgtacacgggttcttcgccatatttcgtccagatactgtatggagcgagccggatgtatccggtgggttttctcactctggtggtgtcgatgaggcttctcggcagggagaggtcggctttgaattccatccatttcttgtcgagaggggcttccttgggctggttcatcttgctgaggtcgggggtgaagtcaaactggatcagcttgacggcatcggtgttcagcctgagttccgtggtgtcctgaggattcgatggtttcccgtccggatcctgtgcagcggcgggcaggaagcccagtgtgcagagggagagcaggagggtaaatgcgagatggtcgggatgtttcattgcctgttgtgtttgtggatggttgttgtcagatgcctttcacccgtccgccctgcatccagcagcggcggtagtagtcttcttccagccggctgacgatgactccccggctggtactggcgtgtacgaaccgtccgtctttcaggtagatgcccacatgagtggctttccgtttcttgcgtccgttgtggaagaacaccagatcgccttccttgaggttgcgtttggctactttccggcagtttttggtgcgctgttcttcggagctgcgtttcagtttgtggcgatacactttcttgtagacggccgaggtgaaacctgaacagtcggttcccttgcgggtggtgcctccgtgacgatagggggtaccgatccagtcggccacctcaatgtagaggcggtggttgtccttggcgtcgatgtccatgtcaagtcggacggcagcttttgccagctgacggtagtcgtagcggggagcccgtgtgccgcacgaagcaagcagaagggcaagcagcatgaccagcatgccggccggaaaacggaggtgtaagcgtctgcacatatcaattgttttgaacaaatgtacgtaatatccgggttgtgtgtacctggacttagggtattttatgacctgtttaagtttcttttatcttcccggaaggagaggtctgcagactgttcagccccgttcgcagcaggtccggcaggacttatactgggaatggggctgaatcatatggtcattgcggccggatcgtgcggtcgttcgggcctgatcgtgcggtcgttccggcctgatcgtgcggtcagttttcttcctttacttcgaagtagtcttccagttcttttccggcggctccgtcggtgttgtcaaggtcacggatgagcgatcctttttccatcagggcgatgcgtgtactgaggtctatggtgtggctcaggttgtgactcgatacgaggatcagggctttgtgttcttcgccgtagtgttgcagcatgtgtttcagcagcgactgcgaagtggggtcgaggaagttgaagggttcgtcgaggatgacgatctgcggactctggagcagggcattgacgattccgattttctgcttgtttccggccgagaggttccggatgaacttcttttcttccaggatttccgggcccaggaagcgttcatagcgccggatgcgctcgttgacggtgctccggtccagtccgcacatgcgtccgttgaactggaagtattcatcgggagtgaggtagtcgatcaggaaactttcgtccatataggctcccgtgaaggttttccattcttcgctgcgggccacgtcggtgccgttcatgcagacggttccgctgtcggcctgcaggaggtcgagcatcaggcggaagagggtggtctttccggctccgttgtttcccaccagtcccaggatttctccttcgtggagggtgaagtcgggtatgtctacggcagtcttgctgccatatcgtttgatcaggttgtttatcttgatttccataattctgtctgtttgcaggaggttgtaagtattagcgtgtgtcgcgcaggttcgtcaggatgtcatatttcttccggatgacctggcggtacaagtatcgcatccacaggggctgtgcggctattccggccattcccagcagggtgcataccagataagccatgttctcactgagcacgaggaaaagcaggttgctgaacaggatggggaagaagaaggcgaagaacacgattaccatctggtaaggtgagttccattgtcccttacccattatgcttgcgtccagcggagctgttttccggttgatccatgccagttgcatgatgaggggcaggatgatgcccgctgtaagaaacagctggctgactaccagtacggccggaagtccgctccagataatggacgggagaaggagaaccagcgggaaaaccagcagcaggcagtggaaataatacttggcccggaacaggctgagcagggattcccggcgcaccatcagtccgtccaggtaattgccttcgtacgccatgatgcgggtcaggatcgaaacagcaaatcccgtgaagcaatagatggaatagagctggatggagtagacgctttgggtggactcctgcgtgatgccgaagagcatggcagcaaaaagaaccaggacaatgcacatcatctggaagttcttgcgcggtgtcttgttgcggaagatcatgcgcagttccagccgcatgtattcaccggtcatgccgaagcgttccagatagccgtagcggctgaagtgtctgacgcgggagtcttccttccgtcccagttcgttgtagatgcatgcggtctgcacacggcagttgaccagcaggagcaggacgatgactgccagtacgcctgcatgggcgagaagcttccagcggaggaaggcttcacccagccacatggagaactggctgaccattccctgcgagggaacgaattccagcagggccagcagaccgtagactgctgcggggagcaggagccagagcgtgtgctgacgggccagtacgcgtaccagtatgctccagtaggcgttggctgtcatcagcagccagatacccaccgcatagccggtcactcctgccacgccgaagtatcgggcggccgtaagggcggcaaagggtacgaacaggaacagccagaacaggttgtagagtttgagactcacctgtacgaggagggtgttgatcagtcgctgtctgctgacaggcagcaacagatagggtttgatctcttgcgccggagtggggaagagaaaacggatcagaaagtcaatcaggaggaagagaatcaggacgctgtcgagtgcgtcatagggttccatgccggggatatcctcctcaaaagcaaaggacagcgaaaccccgatcagaacgaggtacgctgcccagaatgctgtaaacagataaatcaggaacttggcaaagcggttcctgtcgtacatggggttccgctttgctgcaagtttctggtttcttcttatttcggtcagtaacataggccggttgtcagttatttggtagccggagtactcatgctgacttcaatgacattgttctgtccgatgaaagctttggcaaatgctttcagatcatcgatcgtaacgccatttacggttgcttcgtagttcttgttcatgtccagaccggtccagtagaactcattcagagcgcccatccaatagccgttttccttctggttctgctgataggtcttcagcatgtattctttcaccttgttgagatcttcggtggccggtccgttgtcgatgaagtcctgcagaccctgcttgatcagtcctaccatctgttcgcggcggttcggatctgtatcgaagtagatgttcagggttccttcttcctgcggatacttgctgatggaagcccagctgctcacaccgtaggtaccgcctgcttcttcacgtacggtacgggtgtagagaatatccagcaactggtcgaacatgctcatcatgatcttgttcttcagggtatacgggcagttgccgctgtacaccatcatgatgcttgatttggcagtttccatgtcgcggatgaagttgttttcgtaatcacccttgcggatatccatcttcggatcgcggaagttttccttgcggctgatggtcggcagtccgcccagatactgctcaatcagcggagtggcagtggccaggtcaatgttacctaccagcaggaaggtgaagtcgcctgcttctgcatagcggttcttgtagagttccatgatcttgttgtagtccaccttgtccatcatttcagctttcagacggagagcacgcggatgatggttgtagagagctacggccagtgagtcgttgaaggtgctcatcgggttggcagcctggttggccagggcagccttgccacgctggatgtatgactggaaggcttcctgatccatacgcggagccgtgaagttcaggtaaaccagctgcagcatggtttccaggtctttcggagaacagctgccaccgagtccttcggtgagggtacttacggatgcattgacagaagctacttttccggccagtactttgctcaggtctacggcgctgaagttacccagtccgcccaatggaacgacttcgttcatgacggagaactgaaggacatccttgtcgtcgaagagagagttacctccggggctgaatgccttcatgcggatttcgtcggccttgaagtctgtcggtttcacgatcacgcgtacaccgttgctcagggtcaggatggttgatccgaaggctccctgttctgtcttcaccactttgccggcctgcggtttctccttcagcagcggctcgttggataccttgtccacgtagggttccagtttttcagccttcaccttgtcgatcacggctttcagttcggcttctgtggggtatttcatgccttccttttccggacagaatacgctgagggcgatattcttttcctggatcagctgcttcatcacctggttcacggcttctaccggaatgttcggaacgatctggttcatgagcggatattcgttttcgatacccggaatcggttcgttgtcgatgaagtgacgtacgtactctttgacgtagctgtttgtacgttgtttgtcgcgttcattgtaggccacttccagactgcggaggtagtcagctttggcacgtgcatattcgctggcggtaaatccgaactggcgtacgcgttcgatttcgcgcatcagggcttccgtagcggtcaggatgccgtcttccttggcagcggcaattcccatgaaagcacctttggtttttgacagcaggtagtctccgtcaccggcaaaagcctggatgaagggagcatcagccttctgggtcagttcttccagacgggtgttgagcatgctttcgatcatggaagtcaggtagctgtagaccatgtagtccatgttgcccttttcttccggtttgacggcttcatgcttgtggaaaaggtagatgataggtatgttctgttccttgtccttggcaacggcaatcagcggttcgtcgttgtcgggcacagggaagtaagtacgttcagcggggttctccggcatttcgatgggggagaacattctcttgatcttgttttcgatggagtccacattgatgtctcccacgacaacgattccctgctggtcggggcggtaccatttttcataatagtcacgcagtgcctgataggggaagttgtccaccacttccatggttccgatggggaggcggtatgcatacttgctgtccttgtagagaacgggcagtacggtttcatacatacgcatcatggctcccatgcctgtgcgccattcttcgtggatgactccgcgttccttgtcgatttctttcggatcaagggtcaggtcgttggcccagtcgtggaggatcagcagacaggagtcaactacgctttcgcgggtaacggggacgttattgatgttatagaccgtttcgtcgatggaagtgtaggcattcaggttggctccaaacttcactccgatgctttccagccattcacgcagggtattgtcggggaaatgggttgttccgttgaaacacatgtgttccaggaagtgggccagaccgcgctggttgtcgtcttccagaatggaacctaccttttgggcaatatagaagtcagcctgtttttccggcagagcattgtgacggatgtaataggtgagtccattgtccagtttaccgatgcgtacgttgggatcaaccggaatcggaggcatctgttgttgggcaaatgccattgttgctcctcccgtaagcaggatagcaacaaatgtttttctgattagtcttttcataaatgtatgtgtttgtaaaaaaagtgttctcgttttctaaacctgttcctaaataaaggcaggaaatcgcacaggcccggggtgcagggaaggtcagccctagccgtcagttcgggcctgtgtgtatgggggattacagcagtccgttggccgacaggtagcgttctgcttcgatggcagccttgcatccgcttccggcagctgtgatagcctggcggtagtgcgggtcggctacgtcaccggcagcgaatactccgggcacaccggtacggggagtaccttcttccgtaaggatgtatccagtttcgtctgtctttacccacggcttgaacagcatggagttgggctggtggccgatggccaggaagaatccgtcgatggctacgtcgtagcgttcttcgtcggcttcacccatgcgtttcaccacgtgcatgccttctactccgttatcaccatacaggccgactgcgttgtgttcgaacagaacggtgatgttggggtgattcagtacgcgttcctgcatgatcttcgaagcgcgcaggaaaggcttgcgtaccaccagataaaccttgctggccagtccggcgaggtaaatggcctcttcgcaggcggtatcgcctccacccactacggctaccgttttcttgcggtagaagaatccgtcgcaggttgcacaggcgctcacacccatgccggcatatttcttttcatcttccagacccaggtatttggctgtggcaccggtagagatgatgaccgtatcggctgtaatttccttttcttcatcaatgatgaatttgtaaggggcctggctcaggtcggccttggttacgattccgttgcggatatcggcaccgaagcgttctgcctgtttgcgcaggtcgtccatcaatacaggacccgtcacaccttccggataaccggggaagttttccacttcggtggtgatggtcagctggccgcccggctgcagtccttcgtagagtacgggagcgatgttggcacggctggtatagatggcggcagtgtaacctgccggtcctgatccgatgatcaggcatttcacatgttcagttgtcatatcgttcaattttactgtttatagagtttttataatttgcttaactggaccatcaggtcggtcagttgcttcagggaattttccttgctgtcggtcaggacaatttccacatgtccgttgtcgccgttgctgccggccgagatgtaggagatctttccgaccatctgaaggaaggctcctgccggtgtcgttgccgccattttggcgatggggagctgcagggctgcatcgacgttgatcaggctgtacaggctggttcccttgcggttgtccagataggagctacctttcagggaaggagacgattccttgccgatggtcttgtagaccatttcgtcgttggttgcatagaagcgtccgtccttgtatccgtagaatagcgacatgttgcggaacagtctggctgcattttcgatcatgtattcgtggtcagccagcttcacgagtttttgtgtgcgtttcagtcccaggctgtctttcttctggtaaagggcatccagggcatccggactcttcatttcgccgtagatgacgaaggccggcatgctggtcaggctgaagttcagcagaccgaaagttacttcaccgttgacagaacgtgccagggcttccatcagctggttgttgtctgctgatttcagctgctgccggtagaagctggtcagttcgctgccgttcacgttggcactgaagtacatcagtgtggacgacgggaacagcttgtcgaatttgccttcaatctttccgtagggtttgacggcagcttccagaaaggcacggctttcttcgtccaggcccagaggtttggcatctacaacgatcttgcctttttcg

SEQ ID NO: 959 - DNA, 5002 bp, synthetic construct
  misc_feature 1..5002: note = Synthetic
  source 1..5002: mol_type = other DNA
cagggattgtggcttggtgcaacagctgtaggtaatcttctgttgtggattggtcctcttatgtataacgccattcctattggatattgctgggctattttcatgattgtatgcctcatttcaatgggagtcatgctgttcatggtaaaatggctggaacgtgtagcaaaataaatttctcgaaatagaatttacttgtggaatccctcatgcggttgcatgggggatttttttatggaaatattttaggtaaactttgggggatacttatgagaattcattatagcctaataaacaagtgacattgcttaattaagtgtaaataaaaatgggagaaatgctgaatcaaccaatatacattgtttatttttgtattattgaaaattatcttagctccacggagtacgcagagctgagataattttcgacttcagataactgaagtgaaatacttcggcttatagccttgttgtgaaaagtcttcactttttagtatcttggtagcaaagataaataagaatataacaacgacaaaataaaaatagaaaatgatatgactaagattttggcttttgatttgggttcgtcttctataggatacagtcttcgggatacagacaagaatggagaaaacattatagaccagttagttttatatggaagtataatatttagtccgggaatggcagataacggtgtttctaatgcggcagaacgaacaaagcaccgttcttcaagacacttgtatagggtacgaagataccgcatctgggaaactcttgccacacttatagagttcggttgttgtccgttgtcaaaagaagatttggataaatggaagacttatgacaagaaaaaaagcctgacacgccaatatccggttgatgctgtggagtttgaaaaatggataagaatgaatccatacgaactgcgagaagaactagccacccaacaattagattttacaaaagaagaaaatcgtttcaagttgggacgagcattatatcatatcgcacagcgtcgcggatttaggagcagtaagggggaaaccttaaaagagcaggagaaagatataaatgagaatccagcagaagaaataagaatagactctgatttattgaagaaatccgaagaaaaaaagtcaaagaaattggtcgcatacatggaagagcattcactacctacggtggggaatgcatttgccaaacttattaagaataaagtaagagtgcgtgctagtgaatatcaggcagtacgttctcagtatagagatgaaatagaatatatcttcaattttcagaaaggtttggatgccaacggagaatttttcagacggatatacagcacaggtaatgacggtacaatcttttaccagaatcctatacgctcacagaaaggacaggtaggtaaatgcacgttggaaccagcaaaaccacgttgccctatcagtcatccggaatacgagaagtatcgtgcattttcttttatcaacaacatcaaataccgtaaaagcattaatgaggattggcagacactcacagccagccagaagataaagctttacaaagagaaatttcttttggtaaatgactttgagtttgatgttatccgcaagtggattgagaaagagataggtttgccaaaagacataagtctttcaaaagagcatggaaccattaattatgatgacaggacaaatgtttctgtatgttctgtttcaggaaggttaaagtctgtttttggcgataattgggaggattatgtttatcagactgctaaaacaagaaaagataaagaaggtaaagagcatactgttacttacaccatagaggatatatggcatgtttgtttttcgtatgatgacgaagatgcagtggtgggatttgccaagtcaatcgggcttgatgccgcacaggagaagaagtttctgaacctatggatgaacattccgcaaggatatgccatgttgagtctgaaagcaatacgcaacataaacaggtttttagtgccaaaagaaaataatccgtcatataaagggtatatctacactgaagcaaccttgtttgccaaaattcctgatatattgggcgaaaagcagtggcaggagtctgaaagcgatatactgcgttccttaaacggattgatgaatgacgtcagggatgaaaactgtatcttgaagattgtaaacaatcttatttcagattacaaggctttggactatagagatttggactacagagaacatttcgccgttaatgacagaagttataagttggatgattccgacaggaaagatgttgaaatgcatacagtgagtttcttcggcaaaagtgtgtgggaaaagaaaccggaagatgaaagagaagaaatacttggaaaggttgaagaattatatcagaattttttctcttcctccaaacgggattattacaacttgccaaaacttggtgacaggataaaactgtatttatcaaataaattccccgaactgcgctgctgtaacgaagatgcggattctcagtctcagtgcaattgtcatgcctgtaaaaagctgaaccagttgtatcatccgtcaatggtggagttttacagacctgttgtctgcaacggcaagaagcttcttggaagccctgtaaccggttctttcaaaaatccaatggcaatgaaagtgctgcatcagttgcgccgtttggtcaatgggcttatacaaaaaggactgattgatgaagatactcgaattgttgtagaaacagcccgtgaactaaatgatgcaaatatgaggtgggctattgaggaatatgacaatataagggaaaaagagaataaggctattattaaggctattaaggaaataagaaaagatgatagtgaagtcggtgattccattcttgaaaaagcacgtctacttatagaacaaagtcctgactatctgtttgattatatggacgatgaaaatatgatagacaaaaagggtacagtaaagaagaaaaattcaggtttaatatatgagaaaggcgtaacgaaatatcgtttgtggttggagcagggaatgcaatgtctttatacaggtaaaattataaatttatccgacctgtttgatgaaaatataacggatatagagcatactattccacaaagccgttcatttgataactcaatggcaaataagacagtttgttttgcttactataatcgtgaaataaagaaaaacaggatgccggcagaactggaagactatgaggaaatcaaaaaacgtctgttgccatgggaaaagagagtggagcaactgaaaaatagagttgagttttggaaaaagaaggcaaggcaagccttgacgaaagaaaataaagacaaggctatccggcagaaacatttatggcaaatggaactggactattggaaagacaaactgtcccgtttcactatgacagaagtgtctgagggatttaagcataggcagctgaatgatacaaggctgattaccaaatacgcatatcattatttgaagtctgtgttcgataaagtagatgtgtagaaaggaataataacgtctgaattccgcaagatatttggtttcccagtaaaaacacgcgacaaccattcgcatcatacgatagatgccactattcttacattgatacctgtagcatccagacgggatgaaatgttaaggctattttatgaaatacaggagaataagaaattgaatatagataccaaagaaaaagaaaagcaactggaagggctgataaaatcttgcaggatagggaaaactgtcggtatcaccaaacatatagaaaataatatattggttaaatacgtttcaaaggatagagcccttactcctgccatacgaaacaaaagggtaggtggaaaggtcgtttgggaaaggaatgagaaaggagaaatacttatagacattaacggaaagaaaatccctaaatataagctgacaggtgattgcattaggggtgaattacataaagcttcgttttatggagctatcaggcaatcaaaaagggaaactgaaaagaaaaaggaacaggaagaagatgcaagttacgaaacatcatacaacgatatttcgtatgtcattcgtagaaaactttctgatttcaaagacttaaacgagttgcataaagttatagtagatgaacacttgttcaatataataaagaaacaatgtgaaggaaaagattttaaagatgtttgcaatgaaggattttatatgccaaattgtaataatcaaatcaggcatataagatgctatacctatgatgtaaagaatcctttgcatattaggaaacaaacctatttgtctaaaaaaggttataaacagacttttcatgtgaaagtaggtgatttatatgcaatgtgtagatatcacaatgtcaataagaagatgagatatgggattgtaaagttattcgatattagtaaaagcaggaaaaaaggttatgaaataccggaaattctagatgatgaatattacttggatgctattttgcgtcctggaatgcaagtaattctttacaaagatcaaagtgactatgataatcttttgagaaaaccattaaacattaaattgttatctgaaagactatatattattgaaagatttgaaggtgataatattattaatttaaagaaacatctctgttctagctcctttaaagaaacgggtagaggtaaagccattaatttaaaatcatttgataatggtcttcctgaaaagatacgacagagtattagacaattgaactatcttcttgaaagcgtagattttaaaattaatcttgaagggaaaattgtttttaggaataagaattaatattcagttgtgattttattatgaaagaaaaatcccgcttgtatggcgggattttctattgaaaacaacctcatttaggatttctgaatctctttataaactattgatttacaaatgatagtacggattctgttgttcccaatacttcaaagatactaaaaaggaagcaat

SEQ ID NO: 960 - DNA, 23312 bp, synthetic construct
  misc_feature 1..23312: note = Synthetic
  source 1..23312: mol_type = other DNA
ttagcgctaagcattttggagtaaaagctataattattatgccagaagccgctccgctttcaaaagtatcaggaactaaagctttgggtgctgaggtgatattaaagggtaataattttgatgaagcttatgcatatgccttagaatatgctaaagagaataatatgagttttatccacccttttgatgatgagttagtccaagcaggtcaagggacaatagctttagagatgcttgatgaggttagtaatttagattatattgtcgtgcctgtaggtggtggcggtttgattagcggtgtggcaagttgcgctaagcagattaatccaaatatcaagattattggcgtgagtgctaagggagcgccggctatgtttgagagttttaaagataagtgccagcataactcaaaaagcgttcgaactatagctgacggaattgctgtaagggatgcaagccagattactctatctcatattttagagtgcgtagatgagatggtgcaagtagatgatgaagagatagcaaatgcgattttgtatcttttagagcagcaaaagattatggtcgaaggtgctggggctgtatcggtagcggcgattttggagagtaaatttgagtttaaaaagggctctaaaatcggagctatattaagtggtggcaatatagatgtccaaactctaagtgtaattatcgaaaaagggcttttaaaaagctatagaaagatgataattaatgttactttaatagataaaccgggtgctttaatggcgcttggagatgttttaagaatcgctggagcaaatatagttaagattgattatgatagattttcaaccaaattaagctatggcgatgccaaaatcaccatcacgctagaaaccaaaggcaaagagcatcaagataggattcaaaaagctttaaaagatgctggatacgaatatactcaagagttttgatatatttgggctaaatttgagagaatttagcctttaataatctttgtagctacgattttattggttacttttttaatctcatcaaaacttgcatttttaatattttcaaagtttccaaaatagttaattaatttaattatagaaccttttgaaatgcctaaattggctaattggctactttgcatatcgtttttttgcctaattttttgatgaaagctaatggcaaatctatgcgcttcatctcgcaaacgctgtatgaattgtagctttgtattatttggatttagactaaatttgcctatatttgtgtaaattttatcatttgccttgcctttagcacgatgggctttagtatcaattttttctttagaaattgcgattatatctacatttgcaccgctacttttaataatatcattagctaaatttagtagcgcatcgcctccatctattacccataaatctggagctgatgatttatcaaagcttttggctctatgagttagcatttgttgcatctggtcataatcatttatattttgtagatgcatatggcggtattttgccttattaaactctccattttcccacacaaccatcgcacccacaggggctgcgccaaatagatgagagttatcaaaaatctcaatttttaatggtagattatttagctcaaatgcctcttgaatatcccttgctagggtgtagtcatttgtttttatatgttttttgattaattcaatagcattttgataagctatatttactagctcttttttttcacctatttttggctggatgatttgaaatttcttattgtggcgagagtttaagatattttctaaaatcttagcatcttcaagcttcatatatgtataaattttagttgcaccaactggttgctctatgttaaaagtatctaaaatcattgtagaatatagagtctctagatctgattctaccatatctttagccggttttatagtatgagtagatgcgcacactctaccatcgcgcacgctaaacctgaccccgcaaacaaagctactactaatatttacactaattacttcaaaatcttctaatttagctaaatcgatttgaattttaatagctgtatcgttgattgcttttatctgatctctaatcttagcagcctcttcaaaattttcattttgagctaagtttagcattgttttttctaaatttggtattaaaagctctggatttttaatcttttttatagcttcatctatgattttagcatactcttctttatttattaatccaaggcaaggtgcgtgacagcgtccaatttgataaaataaacagccctttttttctcttaaacaagatcttttttgtactagtttaaactccaaatacaaagcttctaaaatttcattggcacccctaaaaaatgggccaaaatatttgatattagagccttttaaaacctttctagtgatctcaaatctaggaaaatctacacttaaatctacacaaatatatggatatgttttatcatctctaagtaaaatattatattttggatgaagttgcttgataaatgaattttctaatattaacgcatcttgttcgcttgaagttgtaatccactctatatgtatagcttcacttatcattttggatattctagggcttagtcttgggctaggtgaggcatcggcgttaaagtagctctttactcgattttttaaatttttagctttgccaacatataaaagttttgagtttttatcaaaatattgataaactccagggctattaggcagagattttagttcatcgattagcatttatagactctctaagcttttcaaaaagtgtataaatttgctcatcttttgcactgtttttaaataatccatcacttctttctataaatataggcttttgttgcggtgatacttcttgaaaattttttagttttgtaataaagattactacactatttattggttgtaatgcactatttggattgttgctaatataggtgtttaataggttttttatttgaaatttgatactatcatgatttagctcaaatttggcgagtggatgtgtaacggctatgaataaaattccatctttttgatagctaaatttaataagcttactcttagctacacctaataaatttagcaaatttcttgcctctttagcagcttttaaatttttatatttaggatcgttgataatatgattaataatctcaaaacttcgcatttggctattatagctgctttttgcttaatttttttagtagggtgtggatataagtctgatccattttatacagattcgcagcaagtaaatgtggctaattgatttatcagccaaatttagatagacttgcacaaatttaattttaggatgagttatgaaaaatgcagatattttggtactagattttggctcgcaatatactcagctaattgctagaagacttagagaacaaggagtttatactgagcttgtaccttttaatgctagcatagatactataaaagccaaaaatccaaaaggtataattctaagcggtggcccagctagtgtttatgatgaaaatgcctatttttgtgatgatgggatttttgctcttgggcttcctattcttgggatatgctatggtatgcaattaatcgcttacaaaaatggcgcaaatgtcgcaccagccaatcacaaagagtatggcaaggctaatatcgagattataaaagagtgtgaatttatgagtggcgtggtagataatagcattgtttggatgagccactctgataaggtaaatgagttaccaaaaggctttgaagtgatagctaagagccaaaatagcgaattttgtgtttttggtgattttgagcgtaaaatttatgctatgcagtttcatccagaggtcgctcatagcgagtttgggagtgtgatgcttaagaattttgccaagatttgtgggtgcgatagcacttggaatatgggaagttttgctaagactcaaattcaagctattagagaaaaagtaggcaatgataaggtgctttgtgctgtaagtggtggtgtggatagctctgttgtagcagcgcttttggctactgcggtgccagagaatttgatagttgtatttgtagataatgggcttcttcgcactaatgaggctaagcaagttgaggagatgtttaagctaaaacttggggtgaatttgattagcattgatgcgagtgagctatttttaagtcgtttaaaaggtgtaagagacccagagaaaaaacgcaaaatcatcggcgagacatttatagaagtttttgatagcgaggctaaaaagcacaccaatgtgaagtatctagcacaagggacgctatacactgatattatagaaagtagcgttgtaggggcttctaaaactattaaaagtcatcacaatgtaggggggcttcctgagtggatgaaatttgagcttattgagcctttaagagagatttttaaagatgaggttagagcgcttggcttggagcttgggcttagtcgtgatgtggttttccgccatccatttccaggaccaggtctagcgatacgcataatgggtgaggtggataagcctagtcttgagctacttagaaaagctgatgtgatacttcagcaagagctaaaaagcagtggttggtatgataagacttggcaagcattttgtgtgcttttaaatgtaagctcagttggcgtgatgggtgataatagaacttatgaaaatgctgtttgcatcagagtagtggatgctagcgatggtatgacggcgagtttttctagattgccttatgatctattagaaaattgtagccgtaggatcataaatgaagttagcgggatcaatcgtgtagtttatgatatcagctctaagccaccagcgacaatcgagtgggagtagagcgaattttgctagattaaaatatgatatatttaatctctaatacgccttttgatgatgagagtgtggagcaaatttcgctttgcgatattaaatttaataaatttaatatcgatttgagtgaatttgacgctcttatagttactagtaaaaatggtattaattcgcttaaatttaactctataatcttagctgatattttggtttttgctattggcaaggctacggcgctatcttgcaaggaatttggctttactcaaatttacgaagcgcaaaattcgcacggaagtgagtttggggctgaaattttagagaaattatatggtaaaagggttttatttatcaaggccaaagagacaatttcaaatttagatatatattttaatcaaaatggtattgatataagcgtgattgatggttatgagaatttaatattaaaagaagatatatctagcaagccaaaatctaactcaattttgatatttacaagtccgattaatgtgagagcttttatccaaaatttgggttgggatgatagctacaaagcagttgctatcggcaaagccacagcccaagcattaaagccatatacagatcccataatctctaaatctcaaactattaaagattgcgtagagttagccaaatctttaaagtgatagcgacaaaaaggccacccccaaaactatacgataaaccccaaaactaatataactaaaatgcgccacaaaacgcaaaaatagcttaatcactattaaagctacgataaacgccatagcagcgccggttaaaaatatccaaatttggtctaaatttgtagcgaaaatctctctatttttatagctatcatatattgtagctgctagcatagtagggatagcgagcaaaaagctaaatctagcagccacttcacgactaagcccacaaagcaaacctgtgataatagtagagccacttctagaagtccctggtatcatagctaggcattggctaagaccgattataaaggcttgattatagctgacattgtgtaggttaattgtgctaggagtgtagctagggcgtttatgaaatagctcaacaatgatgaaaataataccgccgattatcagcatataggctactgtatttggattaaatagctctttaatatatttgtaagccaaaaatccaataatcgcagtcggtataaatccgataattagcttaatccatagtgaaatatcacttgtcaaacgctctttaaaggcccacacaatagccaaaatactacctaattgaataactacttcaaaacattttaaaatttgagtctgttcaagacccaaaaagtgtgaagtaagtatcatatgaccagttgagctaactggtaaaaactcagtaagcccctctacaatacctaagattatagccgagattatatccattttacacctttaatatcgtgtttaatttggctagattttgcgtgattgacccagatgtatatagtgctgaaacaatggctatataatcaatttcaagatctttaacgatatttaaatttgagctatttattccgcctattactgcgattttactagttaggttattttttgcttcttttattatatcaagtgagcaaatagacgcatttggcttagtaggactagcaaacaaagctccaaaagctacataatcagccccattttttactgcatctttagcacgctctaagtcattataacaacttactcctatatatgcattatagcctaaaatatctctagctttttgtaagctatcatcatctttgcctatatgtactccactagcatctaccattttagctagtcgtacatcatcgttaattataaatttagcaccgctatttttgcaaatttggcttatatcttttagtaaagcgatatcgtgattttggcttttgtttctatattggattatcttgaccccaccggctaaaagctcatttatttgagcttttagagtgtttagtggggtgaaatattgatcggttagtgcgtaaatttgattcattttaaatcatatttgattaagagtttatcataagtgccgttttctttaacctcttttaatcctgcattaaatttagccaagaattcgctatctttgcctttatcaaatgcaaatgcaaacccatcgctaccatctgattcttctaaaaagcttatgatatcgctatttttcttaagatatccaaatcctactgaactatcaacgataactacatctaccttgccagcttttaaattcataattgaaccagcaataccttcagttggtataactttagctccttttatagcgtgagctacaccttcttgaacagtacctagcattacaccaatttttaatttactaagttgttctttattggttatatctttatttgtagctagttttagatataaatttttagtaaaaaagtatggatcgctaaaatctactgatttttttcgttctggtgtggcactcatactagctgcgatagcgtctattttaccagcttttaaagcagggattagagcatcaaagccaatctttgtaaatttatactcaaatccagcaatttttgaaatttcatctattaaatcgatatcaaatccagcaattttaccattttcgtctatataatcaaacggaggatattcagcatcagagcctactataattgttttagcatttaagctaactgcagtcagtgcaattacaagaataaatttgaatatatttttcattatttaaccttattttagattatatttaactaaaagcttatcatatgtgccatcgttttttaattcatcaatagctgagttgatttttgcttgaagttctttgtgtttgcctttatcaaatgcaaagctaaagccttcgctaccatctggaagatgtaaaaattcaactaaatctggattttgttttaaatatccatagcctattgagctatctacgataagagcatcggcttttgcgtttttgactgccataaccgcaccaaatatctcatcaatagccataaccttagctgatttaatatctttagcggctagctcttggactgtgcctaattggacggatatctttttgccttcaagttgctcaaatttagttagctctttattatcagctcttttgataaataaattcatagtatgataatatggtttgctaaaatcaacggcttttaatctctcaggcgtagcactcatagcagctgctataatatctattttaccagcttttagtgcagggattaaagagtcaaatgagatatttacaatctcaattttaaagccaactttttttgcaatttcagccattaaatccatatcaaatccagtaatttgattttgttcattgacaaattcaaatggcggataagcggcatttgtgcctactttgattgtttgagcatttgctgcgactattagcatagcgatgctaattagaagtttaaatagtagcttcattttgttcctttattagtgatttagtactttgtttaaaaactcacttagtcttggatgagtagtatcttcaaatattgccttagggcagccatctactgcaattatgcctttatccataaaaaatattctactagctacatttctagcaaatcccatctcatgagttactacaaccatagttagcccttcatttgcaacctctttcataatagataaaacctcgccaatcatctcagggtctaaggcgcttgtaggctcatcaaatagtataacttcaggttttaaagctaaacttctagcgattgcaattctttgtttttggccgccacttagtttgtgcggatatacatcggctttggattctaagccaactttttttaaaagttcaatagctctatcttttgcttcagattcactacataatttggcttgaattggagctaatgttaaattttgcattacagttttattggcaaatagattaaaatgctgaaataccatacttactttttgtctaattttattaatattaacttttttatctaagatattttgaccatctattattatctctccatctgtaggctcttctaatctatttaaacagcgtaaaaatgtacttttaccgccgccacttgggccaattacagctactacctcgcctctatttatctgcgtatttataccatttaaaacgcataaatcaccatagttttttgttaaatttattgtcttaatcatgtctatttagcctattttctaataattttgctataacggagaatagtttaacattagcataatacaccacaccagcaaataaaattggctcaggagtaaatagtgtagattgcaagcttttgctctgcattgttaaatcaaatattcctattaatcctactacagatgtctctttaaataagcttataaattcattagcaagagctggtagaatatttttaattgcttgtgggaatattattaagcgcattgatacactgtagcttaatcccatagcacgagctgcttccatctgaccacgatcgacactattgataccactgcgaactatctcagcgacatacgcagaactattaagtcctagggcaatcacagctgcatagaagttatcgctaagtgtagcaagaataacaaaagcaaatatcattaattgtaaaagtacaggcgtcccacgaataatatctatatattcatctataaaaaatgataaaattttaatatttaagaattttaaaaaagctaatataaagcccaaaacaataccgatactaatcccgccaaaagtaagcataatagtagtaaaatatgcatttgtgtaggctgatttttgtgctgatgtaagctcactaggaaatgtaagccaaacgccaataacaattatactaacagaaaagatgaatttaaaaaatttttcattgagtaatttagtcaaatttataaaccttattttgattttcaaagtaacttgcaattatacattaaaattaattttttatagcttaagatttttatatgattatcttttttattgttgatttatgatatttttaatattataaaacattaagatataatttaaaggatagtatatgagagtattaggattagatataggtgtaacatctataggatgggctatagttgagtttgatcaagatgcaaaaaatgagatagataaaaagagcaataataaaattatagatttaggagttaggctttttgatggggttgcagaagatagaagcggaaagcttttagcccaagattggcgtaatagcaaaagtagcaggcaaagatataaacgcaaaaaagagcgtttaaaagctatagaaaatgaatttaaatcaattggctttttggataatagctataataaagagcagttttttgctaaatttcattttgaaaataaagatatatttatcttgcgtgctaaagctttagaagaaaagctaagccctaaacagatatttgcttgtatatactatttagcaaagcatagaggatatagatctggcccagttccgcaaagttctaaaagtaaatccaataacaaagatagcgtaaaaacaatcaatgaaattcaaaagacaaagagtttgcttggttatgatatagataaaaatagctatcaaaaaacaatagcacaatatgtagtacaaaatattaacaatagcatttatcgcaatcgtgatggaaaagtagtctttatggctcaaaaagagatgatagagtatgaagcaagagagattttaagatatcaaagtaaattttataaagagataaatgatgaatttgtagataaaattatagatattatcaatttaaaagctccagctattgatgagaagagtataaatgagatgattggcgattgtgctattttaaaagatgaaagaagagcttttaaaaatagcattacagctactaaatctatgatttttcaaattataaataatacaataaaaaaatatcaactagatcctatagataatctatatatagatgctatgaatattatcattaaaaagggtaaattgacatttgagaatttaaattcaattttatcatctaacataacaaccaaagataaagaaaagcttatagataataaagctacaaatatgcttaaagatatttgtaagattttaaatatagataattataatgatatgaataataaagaagatgagttaaatgagttaatttacatctttgcaatctataaagactttatgcattgtgaagagaaatttgcccagcatttggctaaatatagctatacagataaccaaaaagatgagattttgaatttatgttttaataagatatctggaacttcaaatttaagtcttaaagctttaaagggtattgagccatatttaatgaatggatatgtttataccatagcatgtgatgagtatataaaacatctagatgataaatctaaaataaaagcaaatagtatcaaaagtaaatatctaaaagtattaattaaaaaagaaaatccaagagttagaaaaattgtaaatcaagctatcatcttaatcaatactttaattaaaaatggagccaaatttgatcagattaatatagaacttgcaagagatttaccgcttactactaaagaaaaaaagagatatagtgagtctcaaagacgaaatgaagaaaataaaaaaagcgccaaagcaatagttggccaaaatgctaaaaataaagatatattaaaagctagattgttaatagaacaagattatcaatgtccatattgtaatattaaattaaattcatctgatattgctgataataaagtagagatagatcatatcttgccactatctttaagctttgatgatagttatacaaataaagttttaactcataaagagtgtaaccagctaaaaggccaaagaattccaagaagtgggtttttagatgatgagtggtttgtaagtcatataaactcaataccgcaatcaatgagcaaaagaaaaagagataatcttttaataacgctagatgaatttgaaaaacatatagaaaatatagagaaatctagagctttaaatgagactagatatgctagtaggctcattaaaaactatatagaagagaatttaaaatttgaaggaaattgcagcgatatatcagatattaaaaatcataatataaaaagaaatagagttcaagtaagaaatggtagcctaactcatattttacgcaatctatggcatataggtgataaaaatatagatgagcaaagatatatcaaagatagagatattcatacacatcacgctcaagatgcagttataatagcatttagcactcaagggatggtaaaatcaatctgcgatatctctaaaagagcaaataatgagtatagagtattgccaaatagtggcgaagtaataaagcagagcaaaaactcatctataatagagttagcccagcttagtaaagatacaaatgatagaataaatagagcattgcatagtagtatgcctatggttaatatgaacgagactttaaatgagagattaaagtggattatcccatctaaaaaggtagatagattgcataacagtcgcagcgttcatgaagatacaatatgctcaattagattaaaagagaatggtaattatagaagattaaaagataaatctgaatttgaatatctaataaaaaataatgtagataatttatatgtaataaagagagtaagcgtaaaagatgctatctctaaaacagttaaggaaaataaggaagataaatttatttttgaatatttaatagataaagatagtagaaacaaagagttatactctatgcttaaaaataatgatgaagatggattaaatatgtatttccatggcaaaagccttgataaggctaaaataagtattctaagtaaatatgataatagaatgcgatatgtgcgtgggggagtagcaaatttagataggcaagatagatatctaatctataaaaaagatggaatatatcatgtaggcgtagtatatagtggagatgatatcaaagatgataaaagtgccgtaattgatattttaaaaagaggagaaaaacataccgatcatcaaaaaagtaataatggatttgagtatgtaatgactctatataaaaatgatctgattttatatattggaagagataaaaaagagcatataggatatatttcaatatttgatataagtacatctaattttaaattaaacaatcctttgattaatgataaagggtataatgtaggaccaactacttggaaatccatagagcgacttgatatagatatattgggcaatgtatatagaaatggtaaaaactttaccaaagaggcagtacagataattcaaaatgagataaataataaggataaataggtggcacaaaagctaaatatttatgtgagtagtgattctaaattaagtattaaaaattcaaatttattacttcaaaagagtgatgatattataaatatacctatagatattattagctctattgtggtggattcataccatagctacttttctcaaaatttattatcttgcctatcaaggcaaggtataaccttgataatatgcgatgaaacacatatgcctactactttattgttgccactttgtactcactctgtaggcaatttaaatttaagagctcagttaaaatgcaaaaatcaaacaaaagcaatattatggcaaaatatagtaaaagccaagctaaataatcaagcaaatcttttagatatatttggcctaaattcggtagatgtattaaaaaatttagccaataaagtattgctaaatgataaagataataaagaagcttatggagctaggatatattttttatctgcatttggcgatgagtttgcgcgtagagatggtgggtttattaattctatgttgaattttggctactctttagtgcgatctaagatagctaggacaatagcagccaagggcttaatgccacaaattggcatatatcatgactcctttttgaataattttaacttagctgatgatatgatagagccatatagaccatttgtagatgcttatgtgttttggtatttgcaaaatagtggagagattgatagcgaatttgactctactcacaagaaatttttgatatcaatatttgataaaactgtattaatagaaggtaaaagatttttgctagatattgcaattgaacaaagtattgaatctttgcttagagtatttaaagacaaagaaaataccagacttttaatgcctattttagataaggattttttaatttagatatgaatagcgagattttaatgcgtattatggttatgtttgatttgccagtagggagcaaaaaagagcgaaaagaggctgctaaatttagaagttctcttttaaaatgtggattttttatgttgcaattttctgtatatgctagaatagtgcgtggatatgataaggctgaggtcattactaacaagataaagtctaaattacctagcaaaggaaatgtgcgaatgattacaatcaccgaaaagcagtattcaaatatggtagtattaaaaggcgaaccaaaaaattctacagagaaactaagcttagaaaaaagcttatttgaattttgaatattttgccaggattaaacctggcaaatggttacgatctaaaaagatcttattataagaatgcccttagtttttatatgttataagatctgaattatacagtttattgatttaaaatttaattaagatattaaaatttagatcaaaataccataaaatcatatctataagaagtttctattataacatatagaaactaagggggttcttatagtaaaagccattgctatctttgctacgctttgattataacatatagaaactaagggggttcttatagtcccaaaaatagtcttaaataagttctgataattataacatatagaaactaagggggttcttatagtctattataggcaactcttgctaatcatttaattataacatatagaaactaagggagttcttatagttttcatttgtgctgatacagcctacagtaaattataacatatagaaactaagggggttcttatagtttaaattcaaaattggaacacaacttgcttaaggactagcaaattaacgcaggagcgattatgcaaaatggatattatcaagcaactggcgcaatggtgactcagtttaaccgcttagatatcattactaataacttagctaatgtaaatactagcggatataaaaaagatgatgtggtgatagctgattttgaaagaatatttaaagagacaaaggatgctttgccgctagaaaatcacactaaagattcagctaaatttctaaaccgcacattaaatagagtgccacatatcaatgaggtttatactgattttggcactggtgggctaaagcatactaataatccgctagatatatcacttggcaaaaatgatctatttttattagtagatagtccatcaggtataaggctgactaaaaatggctcactaaatttagatagcgaagggtatttagttacaaaagagggttatagagtactgcctagcaactatgctgctcaacaaggaccaaatagaggtattcaaatcccgcaagatactcaaatgacagtcgacaaagatggtaatatttacgcaggagatgagcctgtggggagattttatatcgctcagcctagagagcttagagatttacaaaaagagggtgataatctatataaaatagataatatggaagaagtagtagataacgctacaagcggctcaatagcacaaggctatgcacaaatctcaaatgtaaatccagttaaagagatggtaagtctaattgaaacacaaagaatggtagatatgtaccaaaaagttatgacaacgcatatgagcgaccttaaccaagatgcaataaataaactagcttctatgagagctaattaaaggataagataatgataagatcactatatacagcagctacaggtatgatagcacaacaaacacaaatagatacaacttcgcataacatctcaaatgtcaatactataggctttaagaaaaatagagccgaatttgctgatttaatgtatcaaactatgcaatacgcaggcacaccaacaagcactactacaatgagcccaacaggtatggaagtaggtcttggagtgcgtccgactgctattacaaagatgtttgggcaaggatattttaaagagacaggaaacgcacttgatatgacaattgccggtaatggatttttccaagtccagctcccagatggtactacagcatatacaagaaatggggcatttaagctagatggcgatggaaatatagtaaatagcgatggttatagactacttcctgagatgactatcccagctgatgctactgaaatttcaataggaactgatggaactatatcagtacttcaaccaggtaatgaagagatgacacagatcggtcaaatagagttagctaactttataaacccagccggacttcacgctatgggggataatctatttttagaaactgcagcgagcggagcaccaaatatcggtaatggcggtactgatggcttcggtcagatcaagcaacactttgtagagatgagtaatgtccaattagtagaagagatgactgatctcatcacaggccaaagagcttatgaagccaactcaaaagctatcacaacaagtgatgaaatgctccaaaccgtaaatcagctaaaacgataatttaaataattaaatttgatatagccctatttatgggctatatttactgctttatctcctctatctctatattttctaaagctttgataaatggctttatatcataggatttgatcttttgctccagtgttgctagatatttatctatattttgtggagttaggatatttgtttgattttttatagcgtcgagctggattgaattcaaatctttgttataatgtggcaagtctctataattagcaatatcatcagcataatctaattcatcaaatccatatactttgacatttttataactactactttgagtgataaagtatcttaaagatttctcccaagtataaaaaaacttggaattatcattatatattgtttctatattttgcatacgataaaataatcttgaatatgttgggatgatgatcgaaaatttagtatttggataatctctaaaaaatctaattagatatttgtgtaggtaatcttgttggggtgagatatcccttatatcttctttttcaatattttttatattgccatttttgatatctattagtgtttgcttgatcgtaccattatctttattttttatccagttatcaaatccaccaaatagttctttatattctttataccagttagtgatttgatagatatcatctattgtgcctacacatcctttatcatctgaaaatttaagagcacaaatcataaatttagaatttctatataattttatatcattatatgggttattatcgtataaaaaatcccaatccaaagtgctattgcttagtctatttaccatatttaccatataatatccatcaagagagtatataatatgttttggattttgattttgaaagatataatctaaaaccatagctctttggttaaaagtgctaccgctaagcgatatatttatccatctgccatcgctgttaagtttgctggtggcctctttagagtctgtgttttctagcattgaggtgcctattatatatgagtcaaatttataatgttttataatccccaaagcttgttttctcatatctgcaaagaatgtagcttctctaaagtatggcttatgaaatatctgaaatgggtcataaatatatatcaagctcaataaaatagtaccaagagctataggggtgatgatggtggctattataaattttttcgcatttttatctgacatgttaaaaccttaaaaattaaaatatataaactctacatatggagttatgctaagtgtgatgagtgctatatatagcaataatccagcgaaaattgcgttttttaaatttggcttaaatgaatttagcatctcaatgctatttttgcacattagagttatgattagtgcgatgataagatatattatagtatcatttctaccgccaatttgctctaaaataaaaggaaatctaagcctttgtggtagttctatccagacaaccccaaacattcctttaagtaaatttaaagccccatctaagttttgacttctgaaaaatatccaagtgatatttaaaaaattaaatgttataaaccagcaaaaaattttatagatttttgaatttgcgtatcttaatgagatatcaaaatatagataaattctatgaatcaccatagcaatgccatgaagcgcaccccaaatcacaaatccccatccagcaccatgccaaattccgcttaaaaacgccacaataaagagatttctaagggttaaaatcttgccaaatctatttccaccaagcggaatatatagataatcttttaagaatctacctaaggttatgtgccatctacgccaaaattcggttatgcttaatgatttatatggtgagttgaagtttataggcaagatgatgccaaacatcagcccaagcccgatagccatatcacaatacccactaaaatcaaaatagagttgaaaagtatatgaaagcgatgttacccatgactctataatatttaaaattccgccattttctacatagctaaatccagcattagcccacttcgcaaagctatctgcgataaatacctttttaaatagtccaatactaaagataaatagccctttggctatggattgatattgagtagggatagtctcattagctttaaattgtggcatcatctctttgtgatggactattggtccggcgattaattgcggaaagaagctgataaacaagcaataatctataaaatctatctttttaccatgctcccttaggtcattgatatctacatttttatagcaatcagttaaaaatgcgatctgctgaaaagtgaaaaatgatatagccaaaggcaaaactatatgtggcaaggggatattgaaatttaaatttaaaatttgattaaagagattaaaattttctaagaaaaaatctgtatatttaaaaaacccaagtaagccaagattaaggataattccaatgattaaaaggctcttacccccccccaatttggctaatttgatagataaaattctactagcgataagataatttatcaaaatcgacccaaccaaaataggtagatacaaaacattccaaaaagcatagaaaaatagacttccaaggactaaaaatatattggaagccctatgataattaaggtattttaatagataaaatccaactatcataacaggcaaaaagccaaatataaaagcataagagctaaaaaccataaatctccttttgtaaaaatagcccaaaataatagcaaaaaattgctaaatttaatctatagtttattggattttaaaattttttttgttattcttttgggatttaattaaaggtattttgatgtcaaatttaggtaagattagagcctttggagagtgggaagaccaagagcttttgatgcttagcattccgcatattaatagcgattgggctgagtatttagatgaaattttagatagctatgaagagttagtaagggttgttagtaattaccaaaaagtgctattgatcgccccaaattcaggtgattttgataggtttaaaaagtataaaaattgcgaatttttacaaatcgataccgatgatacttggattagagattatggtgctatcgatgtgaatttaggtgatgagattatcagctatgattttaaattcaacgcttggggcggtaagtttaaaagtagcaaagatgatatagtaaataagaagttatttgagcattttggaactaaattaaaagagattaatttgattttagaaggtggaagtatagattttaatggtgatggagtaatgcttacaaccactgagtgcttattaaatgataatagaaatagacttagtaaagatgagcttgagataaagctaaaagatctgtttgggttaaaaaagatagtttggttaaatcatggatttataaaaggcgatgataccgatagtcatatagacactctagctagatttatatccccaaataccatagcttacgcagcttgtgacgatgagagtgatgagcattttgtggagttaaatttgatgaaaaaagagctagaatctagtggatttgagcttatagcactcaatttacctaagccagtttattataatgatagacgccttggagctacatattgtaactttatctttataaatggtgctttgatagtgcctacatatggggataaaatcgccgatgaaagggctataaactctcttaaaaaggccctaccaaatagagatataataggtgtagatagtagagtctttatcagacaaaatgggagcctacactgctcaagccaaaatagatttaaaaggataaaatagtgaaagtagcattaatcgcacatagatattatggggacaaagatagtacaattaagcatactacacagatgattcaaaaagccgccaaagatggagcgcagctagtcgtgcttcaagagcttcatcaaggggcgtatttttgtcaagatgagagcgtgggtaaatttgatctagcaaatgattatgaaaaagataaaatttattggtctaatgtagctaaggataataaaatagtgctagtaacttcgttatttgagaagagagctgagggcttatatcacaatacttcagttgtctttgatagcgatggaaaagaggctggcaaatatagaaagatgcatatccctgatgatccaaatttttatgagaaattctattttacgccaggtgatttaggttttaggcctattgatacgagtttaggtaggcttggagtgcttgtttgttgggatcagtggtatccagaagcggctagattaatggctttaagcggggctaaaattttgatatatccaacggcaattggatggtttgatggagacgatgaagcgactaaatcggctcaattagaagcttgggtagcagtccaaagggggcatgctgtagccaataatctacctgttatcgctgttaatcgtgtaggatttgagagtgatgagtgcggtggtgggattagattttggggaaatagctttgtttttgatgctcaaggcgtggagctatttagagccaattccacagatgaaatcgtccaaatagtagatatagatatgaaaaaatgcgaagaagttaggcgatggtggccatttttaagagatagaagagttgagtcttacggcgatataacaaaaagatttatagattgagcctatctttgaaatcaggcattaaacttaggataaaatcataaaattgcttttggtggtgcggatagataaggtgagctaattcatgaagcaccacatattctataaatctcttatctctttggattagctgggtgctgaaatttaaatacccttttttactattacaactcccccaccttgtgttcatctttttgattcttatggcatttataggtctatttattttaggattatatatatttatatactggtttattagatcttttaatatgctatttgcgtagtttgtaaaagtttgaatatctggtgtaaatatttgattatcaataattttaaaatctggtgaaatttgaatttgatagcttttacctagaaattttatggagtttgggtctgtttttgggattttaagcagggttttttctatccatttagtatgagatgagataaagctttctatctgaaatttgcttgcattgagtggagctactagcttaatatcgccagttttagtaatctttaagcgtagatattttacccgttttttgctatattctattttaaaaccctcatactctatcaagctaattccttaagattaaatttcaagattttatctaaattattgctatatttatttaaaaaatattcaaaatttaaattttaaatttaaatattttttaaataaataatatttgatttaatattttattttattattaaactctattttagtaatgcttttgtataatactagatttaatttttaaataaggaataagatggctagatcatttagtagatcagacattagaattttggggctttcatctcttggtggaatgcttgagttttatgattttattatctttgtattttttgcttcttatatatcattgctattttttccggctgatttagatccattttgggctatttttaatacatatggcacctttgctgctggatatttagctaggccgattggtggggtgattatggcacattttggggataaaaatggccgtaaaaatatgtttatgctctctattttgcttatggttattcctacatttttattaggtattatgccaacatttgaaagtattggatatttagcaccaattattttagttattattagaattttactaaggtattgcaattggcggagagcttcctggagcgtgggtatttgttagtgagcatgcacctcgtggaaagctatatactagcataagcattctaacagcagcagttgtagctggtatcttgcttggtagttttgttactatgattgttaaagatatttggagtgataatgagattagagatgggatgtggagattgccatttattttaggtggtgtctttgggattatatctatatatcttagaagatatttaagtgaaactccggtatttaaagagatgcaagagagaaatgagcttgataaaattcctttaaaatctgtatttaaatttcataaaattgatagtatcgtatctatgcttatcacttgggttttaactggatgtattgttgttcttatacttttaatgccaaattttatgcctaaggcatttaacgctgatggagttgagttagggcgtcttacaactatatatatgcagatgggtgctatagttcttttatgttttggttgttttatttatggtagattaagtgataaatatggtattgctaaaactactttagtattggctttattattttcaattagtgtttatgcctattttgatgcgctttatagtggggcgagttttgagatggttctagggctttatttgcttagtggcttactggcttgtgttggtccatgtggagcgccatttttaatgattgcaatattccctaataaacttagatttagtgggatttcattt

SEQ ID NO: 961 - DNA, 22664 bp, synthetic construct
  misc_feature 1..22664: note = Synthetic
  source 1..22664: mol_type = other DNA
ctatattaagtggtggcaatatagatgtccaaactctaagtgtaattatcgaaaaagggcttttaaaaagctatagaaagatgataattaatgtcacattgatagataaaccaggtgccctgatggcgcttggagatgttttaagaatcgctggagcaaatatagttaagattgattatgatagattttcaaccaagctaagttatggcgatgctaagattacaataactttagagactaaaggcaaagaacatcaagatactatagaaaaagcattaaaagatgctggatatgagtttactcaggagttttaattaattttttgagctaaatttagattttaaatttagctctcattagttattttttgagctacgcttttgtttgttacttttttaatctcatcaaaacttgcatttttaatattttcaaagtttccaaaatagttaattaatttaattatagaaccttttgaaatgcctaaattggctaattgactactttgcatatcgtttttttgcctaattttttgatgaaagctaatggcaaatctatgtgcctcatcacgcaaacgctgaataaattgaagtttaatatcgtttgagtttagactaaatttgcctatatttgtgcaaattttatcatttgccttgcctttagcacgatgggctttagcatcaattttttctttagaaattgcgattatatctacatttgcaccgctacttttaataatatcattagctaaatttagtagcgcatcgcctccatctattacccataaatctggagctgatgatttatcaaagcttttggctctatgagttagtatctgttgcatttggtcataatcatttatattttgtagatgcatatggcggtattttgccttattaaactctccattttcccacacaaccatcgcacccacaggggctgcgccaaatagatgagagttatcaaaaatctcaatttttaatggtagattatttagctcaaatgtctcttgaatctctcgtgctagggtgtagtcatttgtttttatatgttttttgattaattcaatagcattttgataagctatatttactagctcttttttttcacctatttttggctggatgatttgaaatttcttattgtggcgagagtttaagatattttctaaaatcttagcatcttcaagcttcatatatgtataaattttagttgcaccaactggttggtctatgttaaaagtatctaaaatcattgtagaatatagagcctctagatctgattctaccatatctttagccggttttatagtatgagtagatgcgcacactctaccatctcgtacgctaaacctgaccccgcaaacaaagctactactaatatttacactaattacttcaaaatcttctaatttagctaaatcgatttgaattttaatagctgtatcgttgattgcttttatctgatctctaatcttagcagcctcttcaaaattttcattttgagctaagtttagcattgttttttctaaatttggtattaaaagctctggatttttaatcttttttatagcttcatctatgattttagcatactcttctttatttattaatccaaggcaaggtgcgtgacagcgtccaatttgataaaataaacagccctttttttctcttaaacaagatcttttttgtactagtttaaactccaaatacaaagcttctaaaatttcattagcacccctaaaaaatgggccaaaatatttgatattagagccttttaaaacctttctagtaatttcaaatctaggaaaatctacgcttaaatctacacaaatatatggatatgttttatcatctctaagtaaaatattatattttggatgaagttgtttgataaatgaattttctaatatcaatgcgtcttgttcgcttgaagttgtaatccactctatatgtatagcttcacttatcattttggctattctagggcttagtcttgggctaggtgaggcatcagcgttgaaatagctctttactcgattttttaaatttttagctttgccaacatataaaagttttgagtttttatcaaaatattgataaactccagggctattaggcagagattttagttcatcgattagcatttatagactctctaagcttttcaaaaagtgcatgaatttgctcatcttttgcactgtttttaaataatccatcacttctttctataaatataggcttttgttgcggtgatacttcttgaaaattttttagttttgtaataaagattactacactatttattggttgtaatgcactatttggattgttgctaatataggtgtttaataggttttttatttgaaatttgatactatcatgatttagctcaaatttggcgagtggatgtgtaacggctatgaataaaattccatctttttgatagctaaatttaataagcttactcttagctacacccaataaatttagtaaatttcttgcctctttagcagcttttaaatttttatatttaggatcgttgataatatgattaataatctcaaaacttcgcatttggctattatagctgctttttgcttaatttttttagtagggtgtggatataagtctgatccattttatacagattcgcagcaagtaaatgtggctaattgatttatcagccaaatttagatagacttgcacaaatttaattttaggatgagttatgaaaaatgcagatattttggtactagattttggctcgcaatatactcagctaattgctagaagacttagagaacaaggagtttatactgagcttgtaccttttaatgctagcatagatactataaaagccaaaaatccaaaaggtataattctaagtggtggcccagctagtgtttatgatgaaaatgcctatttttgcgatgatgggatttttgctcttgggcttcctattcttgggatatgctatggtatgcaattaatcgcttacaaaaatggcgcaaatgtcgcaccagctagccacaaagagtatggcaaggctaatatcgagattataaaagagtgtgaatttatgagtggcgtggtagataatagcattgtttggatgagccactctgataaggtaaatgagctaccaaaaggctttgaagtgatagctaagagccaaaatagcgaattttgtgtttttggtgattttgagcgtaaaatttatgctatgcagtttcatccagaggtcgctcatagcgagtttgggagtgtgatgcttaagaattttgccaagatttgtgggtgcgatagcgcttggaatatgggaagttttgctaagactcaaattcaagctattagagaaaaagtaggcaatgataaggtgctttgtgctgtaagtggtggtgtggatagctctgttgtcgcagcgcttttggctactgcggtgccagagaatttgatagttgtatttgtagataatggacttcttcgcactgatgaagctaagcaagttgaggagatgtttaagctaaagcttggggtgaatttgattagcattgatgcgagtgagttatttttaagtcgtttaaaaggtgtaagagacccagagaaaaaacgcaaaattatcggcgagacatttatagaagtttttgatgctgaagctaaaaagcacgctaatgtaaagtatctagctcaaggaactctatatactgatataattgagagtagcgtagctggtgcttctaaaaccattaagagccatcacaatgtaggcggacttcctgattggatgaaatttgagcttattgagcctttaagagagattttcaaagatgaggttagagcgcttggcttggagcttgggcttagtcgtgatgtggttttccgccatccatttcctggacctggtctagcaatacgcataatgggcgaagtaaatgagcctagtcttgagctacttagaaaagctgatgtaatacttcagcaagagctaaaaagcagtggttggtatgataagacttggcaagcattttgtgtacttttaaatgtaagctcagttggtgtgatgggtgataataggacttatgaaaatgctgtttgtatcagggtagtggatgctagcgatggtatgacggcgagtttttctagattgccttatgatctattagaaaattgtagccgtaggatcataaatgaagttagcgggatcaatcgtgtagtttatgatatcagctctaagccgccagcgacaatcgagtgggagtagagcggattttgctagattaaaatatgatatatttaatctctaatactccttttgatgatgagagcgtggagcaaatttcgctttgcgatattaaatttaataaatttaatatcgatttgagtgagtttgacgctcttatagttactagcaaaaatggtattaattcgcttaaatttaactctataatcttagctgatattttggtttttgctattggcaaggctacggcgctctcttgtagagaatttggctttactcaaatttacgaagcgcaaaattcgcacggaagtgagtttggggctgaaattttagagaaattatatggtaaaaaggttttatttatcaaggccaaagagacaatttcaaatttagatatatattttactcaaaatggtattgatataagcgtgattgatggttatgagaatttaatcttaaaaaaagatatatctagcaagccaaaatctaactcaattttgatattcacaagcccgattaatgtgagggcttttatccaaaatttgggttgggatgatagctacaaagcagttgctatcggcaaagccacagcccaagcattaaagccatatacagatcctataatctctaaatctcaaactattaaagattgcgtagagttagccaaatctttaaagtgatagcgacaaaaaggataatcctaaaattatacgataaaccccaaaactaatataactaaaatgcgccacaaaacgcaaaaatagcttaatcactattaaagctacgataaatgccacagcagcgccggttaaaaatatccaaatttggtctaaatttgtagcgaaaatctctctatttttatagctatcatatattgtagctgctagcatagtagggatagcgagcaaaaagctaaatctagcagccacttcacgactaagcccacaaagcaaaccggtgataatagtagagccacttctagaagtccctggtatcatagctaggcattggctaagaccaattataaaggcttgattatagctgacattgtgtaggtgaattgtgctaggagtgtagctagggcgtttatgaaatagctcaacaatgatgaaaataataccgccgattatcagcatataggctactgtatttggattaaatagctctttaatatatttgtaagccaaaaatccaataatcgcagtcggtataaatccgataattagcttaatccatagtgaaatatcacttgtcaaacgctctttaaacgcccaaactacagccaaaatactaccaagctggataacaacttcaaagcattttaatgtttgagtctgctctaagcataaaaagtgcgaagtaagtatcatatggccagttgagctaactggtaaaaactcagtaagcccctctacaatacctaagattatagccgagattatatccattttacccctttaatatcgtgtttaatttggctagattttgcgtgattgacccagatgtatatagtgctgaaataatggctatataatcaatttcaagatctttaacgatatttaaatttgagctatttatcccgcctattactgcgattttactagttaggttattttttgcttcttttattatatcaagtgagcaaatagacgcatttggcttagtaggactagcaaacaaagctccaaaagctacataatcagccccattttttactgcatctttagcacgctctaagtcattataacaacttactcctatatatgcattatagcctaaaatatctctagctttttgtaggctatcatcatctttgcctatatgaactccactagcatctaccattttagctagtcgtacatcatcgttaattataaatttagcaccgctatttttgcaaatttggcttatatcttttagtaaagcgatatcgtgattttggcttttgtttctatattggattatcttgaccccaccggctaaaagctcatttatttgagcttttagcgtatttagcggagtaaaatgttgatcggttaatgcgtaaatttgattcatttaaggtcatatttgattaagagtttatcataagtgccgttttctttaacctcttttaatcctgcattaaatttagccaagaattcgctatctttgcctttatcaaatgcaaatgcaaacccatcgctaccatctgattcttctaaaaagcttatgatatcgctatttttcttaagatatccaaatcctactgaactatcaacgataactacatctaccttgccagcttttaaattcataattgaaccagcaataccttcagttggtataactttagctccttttatagcgtgagctacaccttcttgaaccgtacctagcattacgccaatttttaatttactaagttgttctttattagttatgctattatttgtggctaatttaagatataaatttttagtaaaaaagtatggatcgctaaaatctactgatttttttcgttctggtgtagcactcatactagctgcgatagcgtctattttaccagcttttaaagcagggattagagcatcaaagccaatctttgtaaatttatactcaaatccagcaatttttgaaatttcatctattaaatcgatatcaaatccagcaattttaccattttcgtctatataatcaaacggaggatattcagcatcagagcctactataattgttttagcatttaagctaactgcagtcagtgcaattacaagaataaatttgaatatatttttcattatttaaccttattttagattatatttaactaaaagcttatcatatgtgccatcgttttttaattcatcaatagctgagttgatttttgcttgaagttctttgtgtttgcctttatcaaatgcaaagctaaagccttcgctaccatctggaagatgtaaaaattcaactaaatctggattttgttttaaatatccatagcctattgagctatctacgataagagcatcggcttttgcgtttttgactgccataaccgcaccaaatatctcatcaatagccataaccttagctgatttaatatctttagcggctagctcttggactgtgcctaattggacggatatctttttgccttcaagttgctcaaatttagttagctctttattatcagctcttttgataaataaattcatagtatgataatatggtttgctaaaatcaacggcttttaatctctcaggcgtagcactcattgcagctgcgattatgtctattttaccagcttttagtgcagggattaaagagtcaaatgagatatttacaatctcaattttaaagccaactttttttgcaatttcagccattaaatccatatcaaatccagtaatttgattttgttcattgacaaattcaaatggtggataagcggcatttgtgcctactttgattgtttgagcatttgctgcgactattagcatagcgatgctaattaaaagtttaaatagtagcttcattttgttcctttattagtgatttagtactttgtttaaaaactcacttagtcttggatgagtagtatcttcaaatattgctttaggacagccatctactgcaattatacctttatccataaaaaatattctactagctacatttctagcaaatcccatttcatgggttactacaatcattgttaaaccttcgtttgctacctctttcataatagataaaacctcgccaatcatctcagggtctaaggcgcttgtaggctcatcaaatagtataacttcaggttttaaagctaaacttctagcgattgcaattctttgtttttggccaccacttagtttgtgtggatatacatcggctttggattctaagccaactttttttaaaagttcaatagctctatcttttgcttcagattcactacataatttggcttgaattggagctaatgttaaattttgcattacagttttattggcaaatagattaaaatgctgaaataccatacttactttttgtctaattttattaatattaacttttttatctaagatattttggccatctattattatctctccatctgtaggctcttctaatctatttaaacagcgtaaaaatgtacttttaccgccgccacttgggccaattacggctactacctcgcctctatttatttgtgtatttataccatttaaaacgcataaatcaccatagttttttgttaaatttattgtcttaatcatgtctatttagcctattttctaataattttgctataacggagaatagtttaacattagcataatacaccacaccagcaaataaaattggctcaggagtaaatagtgtagattgcaagcttttgctctgcattgttaaatcaaatattcctattaatcctactacagatgtctctttaaataagcttataaattcattagcaagagctggtagaatatttttaattgcttgtgggaatattattagacgcattgaaacactgtagcttaatcccatagcacgagctgcttccatctgaccacgatcgacactattgataccactgcgaactatctcagcgacatacgcagaactattaagtcctagggcaatcacagctgcatagaaattatcgctaagtgtagcaagaataacaaaagcaaatatcattaattgtaaaagtacaggcgtcccacgaataatatctatatattcatctataaaaaatgataaaattttaatatttaagaattttaaaaaagctaatataaagcccaaaacaataccgatgctaatcccgccaaaagtaagcataatggtagtaaaatatgcatttgtgtaggctgatttttgtgctgatgtaagctcactaggaaatgtaagccacacgccaataacaattatactaacagaaaagatgaatttaaaaaatttttcattgagtaatttagtcaaatttataaaccttattttgatttttaaagtaatttgcaattatacattaaaattaattttttatagcttaagatttttatatgattatcttttttattgttgatttatgatatttttaatattataaaacattaagatataatttaaaggatagtatatgagagtattaggattagatataggtgtaacatctataggatgggctatagttgagtttgatcaagatgcaaaaaatgagatagataaaaagagcaataataaaattatagatttaggagttaggctttttgatggggttgcagaagatagaagcggaaagcttttagcccaagattggcgtaatagcaaaagtagcaggcaaagatataaacgcaaaaaagagcgtttaaaagctatagaaaatgaatttaaatcaattggctttttggataatagctataataaagagcagttttttgctaaatttcattttgaaaataaagatatatttatcttgcgtgctaaagctttagaagaaaagctaagccctaaacagatatttgcttgtatatactatttagcaaagcatagaggatatagatctggtccagttccgcaaagttctaaaagtaaatccaataacaaagatagcgtaaaaacaatcaatgaaattcaaaagacaaagagtttgcttggttatgatatagataaaaatagctatcaaaaaacaatagcacaatatgtagtacaaaatattaacaatagcatttatcgcaatcgtgatggaaaagtagtctttatggctcaaaaatagatgatagagtatgaagcaagagagattttaagatatcaaagtaaattttataaagagatagatgatgaatttgtagataaaattatagatattatcaatttaaaagctccagctattgatgagaagagtataaatgagatgattggcgattgtgctattttaaaagatgaaagaagagcttttaaaaatagcattacagctactaaatctatgatttttcaaattataaataatacaataaaaaaatatcaactagatcctatagataatctatatatagatgctatgaatattatcattaaaaagggcaaattgacatttgagaatttaaattcaattttatcatctaacataacaacaaaagataaagaaaagcttatagataataaagctacaaatatgcttaaagatatttgtaagattttaaatatagataattataatgatatgaataataaagaagatgagttaaatgagttaatttacatctttgcaatctataaagactttatgcattgtgaagagaaatttgcccagcatttggctaaatatagctatacagataaccaaaaagatgagattttgaatttatgttttaataagatatctggaacttcaaatttaagtcttaaagctttaaagggtattgagccatatttaatagatggatatgtttataccatagcatgtgatgagtatataaaacatctagatgataaatctaaaataaaagcaaatagtatcaaaagtaaatatctaaaagtattaattaaaaaagaaaatccaagagttagaaaaattgtaaatcaagctatcatcttaatcaatactttaattaaaaatggagctaaatttgatcagattaatatagaacttgcaagagatttaccgcttactactaaagaaaaaaagagatatagtgagtctcaaagacgaaatgaagaaaataaaaaaagcgccaaagcaatagttggccaaaatgctaaaaataaagatatattaaaagctagattgttaatagaacaagattatcaatgtccatattgtaatattaaattaaattcatctgatattgctgataataaagtagagatagatcatatcttgccactatctttaagctttgatgatagttatacaaataaagttttaactcataaagagtgcaaccagctaaaaggccaaagaattccaagaagtgggtttttagatgatgagtggtttgtaagtcatataaactcaatacctcaatcaatgagcaaaagaaaaagagataatcttttaataacgctagctgaatttgaaaaacatatagaaaatatagagaaatctagagctttaaatgagactagatatgctagtaggctcattaaaaactatatagaagagaatttaaaatttgaaggaaattgcagcgatatatcagatattaaaaatcataatataaaaagaaatagagttcaagtaagaaatggtagcctaactcatattttacgcaatctatggcatataggtgataaaaatatagatgagcaaagatatatcaaagatagagatattcatacgcatcatgctcaagatgcagttataatagcatttagcactcaagggatggtaaaatcaatctgcgatatctctaaaagagcaaataatgagtatagagtattgccaaatagtggcgaagtaataaagcagagcaaaaactcatctataatagagttggctcagcttagtaaagatacaaatgatagaataaatagagcattgcatagcagtatgcctatggttaatatgaacgagactttaaatgagagattaaagtggattatcccatctaaaaaggtagatagattgcataatagtcgcagcgttcatgaagatacaatatgctcaattagattaaaagagaatggtaattatagaagattaaaagataaatctgaatttgaatatctaataaaaaataatgtagataatttatatgtaataaagagagtaagcgtaaaagatgctatctctaaaacagttaaggaaaataaggaagataaatttatttttgaatatttaatagataaagatagtagaaacaaagagttatactctatgcttaaaaataatgatgaagatggattaaatatgtatttccatggcaaaagcctttataaagctaaaataagtattctaagtaaatatgataatagaatgcgatatgtgcgtgggggagtagcaaatttagataggcaagatagatatctaatctataaaaaagatggaatatatcatgtaggcgtagtatatagtggagatgatatcaaagatgataaaagtgccgtaattgatattttaaaaaaaggagaaaaacataccgatcatcaaaaaagtaataatggatttgagtatgtaatgactctatataaaaatgatctgattttatatactaaaggcaaaaaagagtatataagatatatagatggtattgatatatctaatgttgattttgatgtaagccatcctttaattaatgacaataaaaatagaaagatagcaccacatgtttgtaattctatagagcgactcgatatagatatattgggcaatgtatatagaaatggtaaaaactttactaaagaatcagctgctataatccaaaatgaactaaattaaaaaaggaaaaaagtggcacaaaagctaaatatttatgtgagtagtgattctaaattaagcattaaaaactcaaatttattacttcaaaaaagtgatgatattataaatatacctatagatattattagctctattgtggtggattcataccatagctacttttctcaaaatttattatcttgcctatcaaggcaaggtataaccttgataatatgcgatgagacacatatgcctactactttattgttgccactttgtactcactctgtaggcaatttaaatttaagagctcagttaaaatgcaaaaatcaaacaaaagcaatattatggcaaaatatagtaaaagccaagctaaataatcaagcaaatcttttagatatatttggcctaaattcggtagatatattaaaaaatttagccaataaagtattgctaaatgataaagataataaagaagcttatggagctaggatatattttttatctgcatttggcgatgagtttgtgcgtagagatggcggttttattaattctatgttgaattttggctactctttagtgcgttctaagatagctaggacaatagcagctaagggcttaatgccacaaattggcatatatcatgactcctttttgaataattttaacttagctgatgatatgatagagccatatagaccatttgtagatgcttatgtgttttggtatttgcaaaatagcggagagattgatagcgaatttgactctactcacaagaaatttttgatatcaatatttgataaaactgtattaatagaaggtaaaagatttttgctagatattgcaattgaacaaagtattgaatctttgcttagagtatttaaagacaaagaaaataccagacttttaatgcctattttagataaggattttttaatttagatatgaatagcgagattttaatgcgtattatggttatgtttgatttgccagtagggagcaaaaaagagcgaaaagaggctgctaaatttagaagttctcttttaaaatgtggattttttatgttacaattttctgtatatgctagaatagtgcgtggatatgataaggctgaggtcattactaacaagataaagtctaaattgcctagtaaaggaaatgtacgaatgattacaatcaccgaaaagcagtatgcaaatatggtagtattaaaaggcgaaccaaaaaactctacagagaaactaagcttagaaaaaagcttatttgaattttaatattttgccaggattaaacctggcaaatggttacgatctaaaaagatcttattataagaatgcccttagtttttatatgttataagatctgaattatacagtttattgatttaaaatttaattaagatattaaaatttagatcaaaataccataaaatcatatctataagaagtttctaattataacatatagaaactaagggggttcttatagcatataatcaagctttgaaaaacttagaaaaattataacatatagaaactaagggggttcttatagctaaaagcgtttagcgtgtttaaatgtgatattataacatatagaaactaagggggttcttatagcaagctaatgaagcaagaactaaggctaaaattataacatatagaaactaagggggttcttatagcacgcagaacgcttatctttttacaacctaaattataacatatagaaactaagggggttcttatagcttttgaaattggctatcatctaaaaatattattataacatatagaaactaagggggttcttatagcataataacttaatacatactaatattattaattataacatatagaaactaagggggttcttatagctagttgtctttgatagcaaaggttatcagaattataacatatagaaactaagggggttcttatagcaaagtcatataattatcattatttaaaaggattataacatatagaaactaagggggttcttatagcaaaaatataataatagatttaaagactaattataacatatagaaactaagggggttcttatagcgatagcaaaacagcctttttaatggcacttattataacatatagaaactaagggggttcttatagcagctaattttagatactatatccaagcgtcattataacatatagaaactaagggggttcttatagcaaaaggagcaatctatacaaaactcaaaaattataacatatagaaactaagggggttcttatagctttttgatggataatcaagatattctgatattataacatatagaaactaagggggttcttatagtttaaattcaaaattggaacacaacttgcttaaagactagcaaattaacgcaggagcgattatgcaaaatggatattatcaagcaactggcgcaatggtgactcagtttaaccgcttagatatcattactaataacttagctaatgtaaatactagcggatataaaaaagatgatgtggtgatagctgattttgaaagaatatttaaagagacaaaggatgctttgcctctagaaaatcacactaaagattcagctaaatttctaaaccgcacattaaatagagtgccacatatcaatgaggtttatactgattttggcactggtgggctaaagcatactaataatccgctagatatatcacttggcaaaaatgatctatttttactagtagatagtccatcaggtataaggctgactaaaaatggctcactaaatttagatagcgaagggtatttagttacaaaagagggttatagagtactgcctagcaactatgctgctcaacaaggaccaaatagaggtattcaaattccgcaagatactcaaatgacagtcgacaaaaatggtaatatttacgcaggagatgagcctgtggggagattttatatcgctcagcctagagagcttagagatttacaaaaagagggcgataatctctataaactagataatatcgatggcctaactgacaatattgaaagtggatcaatcgctcaaggctatgcacaaatctcaaatgtaaatccagttaaagagatggtaagtctaattgaaacacaaagaatggtagatatgtaccaaaaagttatgacaacgcatatgagcgaccttaaccaagatgcaataaataaactagcttctatgagagctaattaaaggataagataatgataagatcactatatacagcagctacaggtatgatagcacaacaaacacaaatagatacaacttcgcataacatctcaaatgtcaatactataggttttaagaaaaatagagccgaatttgctgatttaatgtatcaaacaatgcaatacgcaggcacaccgacaagtgctactacaatgagccctacaggtatggaagtaggtcttggcgtgcgtccaactgctattacaaagatgtttgggcaaggatatttcaaagagacaggaaatgcgcttgatatgacaattgctggtaatggatttttccaagtccagctcccagatggtactacagcatatacaagaaatggggcatttaagctagatggcgatggaaatatagtaaatagcgatggttatagactacttcctgagatgactatcccagctgatgctactgaaatttcaataggaactgatggaactatatcagtacttcaaccaggcaatgaagaaatgacacagatcggtcaaatagagttagctaactttataaacccagctggacttcacgctatgggggataatctatttttagaaactgcagcgagcggagcaccaaatatcggtaatggcggtactgatggcttcggtcagatcaagcaacactttgtagagatgagtaatgtccaattagtagaagagatgactgatctcatcacaggccaaagagcttatgaagctaactcaaaagctatcacaacaagtgatgaaatgctccaaaccgtaaatcagctaaaacgataatttaaataattaaatttggtatagccctgtttatgggctatatttactgctttatctcctctatctctacattttctaaagctttgataagtggctctatatcataggatttgatcttttgctctactttatcaaagtatgattttgcgttatcaagggttaaaatatgctttttgtctttaatagcactaagctctatgctattcatatcttgggcgtaatggactgtatctccggcgtaattagcgatctcatcaggataatccaaatcatcaaaagcgtaaattgtagcattatctaaatccttaatctgctcaagtagatataatatcacctttttacgctccataaaagcttctggaaaaactttaaaatgaaatctagaatatggtgggagtattaggtaaaatttggtttgtggattatctttgataaaaggtattgtgtatttggtgataaactgctcttgctttgttgtatcaaataatttttcatcaaatattacgggtttaagattgaaaagatcaaatttttttagctcatctggattgtattttatccaattagcaaatccgcctaatctttgttgttgtttttcttctctataccattgtaaaagagtttcaatatcaggcttaccaatgcatttctcatttttactaagtgttaaaatacagattagaaatctatcatttaagtatgcttctaaatcatttaattttgagtcatcataaaggagtttaaaatctatctttcctcgcatctcatcactaaatgtgtctaaagagtagattatatttttaggttttttatgcttaaataaaaaatttaatataatcgctctttctgctatgctgcttgctgctggagatatattgacaaaatttccaccaattttttgatttgcttcttttgcggaggtattttgtagcatagaggtaccaagaatatatgaatcataatcataatgctctataattcccttagctccgatacgcatctctccaaaaaatcgtggcttatcaaaaaagctcttatgaaatatttgaagtggatcatagatatatattaagctcaataaaatagtaccaagagctataggggtaatgatagtggctattataaattttttcgcatttttatctgacatgttaaaaccttaaaaattaaaatatataaactctacatatggagttatgctaagtgtgatgagtgctatatatagtaacaatccagcgaaaattgcgttttttaaatttggcttaaatgaatttagcatctcaatgctatttttgcgcattagagttatgattaatgcgatgataagatatatgatagtatcgtttctaccgccaatttgctctaaaataaaaggaaatctaagcttttgtggcaattctatccagacaaccccaaacattcctttaagtaaattcaaagccccatctaagttttgacttctgaaaaatatccaagtgatatttaaaaaattaaatgttataaaccagcaaaaaattttatagatttttgaatttgcgtatcttaatgagatatcaaaatatagataaattcgatgaatcaccatagcaacgccatgaagcgcaccccaaatcacaaatccccatccagcaccatgccaaattccgcttaaaaatgctacgataaagagatttctaagggttaaaaccttgccaaatctattgccaccaagtggaatatatagataatcttttaagaatctacctaaggttatgtgccatctacgccaaaattcggttatgcttaatgatttatatggcgagttgaagtttataggcaagatgataccaaatatcagcccaagcccaatagccatatcacaatacccactaaaatcaaaatatagctgaaaagtatatgaaagcgatgttacccatgactctatgatattcattaccccgccattttctacatagctaaatccagcattagcccacttcgcaaagctatctgcgataaatacctttttaaatagtccaatactaaagataaatagccctttggctatggattgatattgagtagggagattttcattagctttaaattgtggcatcatctctttgtgatggactattggtccggcgattaattgcggaaagaagctgataaacaagcaataatctataaaatctatctttttaccatgctcccttaggtcattgatatctacatttttatagcaatcagttaaaaatgcgatctgctgaaaagtgaaaaatgatatagccaaaggcaaaactatatgtggcaaggggatattgaaatttaaatttaaaatttgattaaagagattgaaattttctaagaaaaaatctgtatatttgaaaaacccaagtaagctaagattaaagataattccaatgattaaaaggctcttacctctcaccaatttggctaatttgatagataaaattttactagcgataaggtaatttatcaaaatcgacccaaccaaaataggcagatacaaaacattccaaaaagcatagaaaaatagacttcctaggactaaaaatatattagaagccctatgataattaaggtattttaatagataaaatccaactatcataataggcaaaaagccaaatataaaagcataagagctaaaaaccataaatctccttttgtaaaaatagcccaaaataatagcaaaaaattgctaaatttaatttatagtttattggattttaaaattttttttgttattcttttgggatttaattaaaggtattttgatggcaaatttagttaagattagagcctttggcgagtgggaagaccaagagcttttaatgcttagcattccgcatattaatagcgattgggctgagtatttagatgaaattttagatagctatgaagagttagtaagggtggttagtaattaccaaaaagtgctattgatcgccccaaattcaagtgattttgataggtttaagaagtataaaaattgcgaatttttacaaatcgataccgatgatacttggattagagattatggtgctattgatgtgaatttaggtgatgagattatcagctatgattttaaattcaacgcttggggcgggaagtttaaaagtagcaaagatgatatagtaaataagaaattatttgagcattttggaactaaattaaaagagattaatttgattttagaaggtggaagtatagattttaatggtgatggagtaatgcttacaaccactgagtgtctattaaatgataatagaaatagacttagtaaagatgagcttgagataaagctaaaagatctgtttggtttaaataagatagtttggttagatcacggctttataaaaggcgatgacaccgatagtcatatagatactctagctagatttatatccccaaataccatagcttacgcagcttgtgatgatgagagtgatgagcattttgtggagttaaatttgatgaaaaaagagctagaatctagtggatttgagcttatagcactcaatttacctaagccagtttattataatgatagacgccttggagctacatattgtaactttatctttataaatggtgctttgatagtgcctacatatggagataaaatcgccgatgaaagggctataaactctcttaaaaaggccttgccaaatagagatataataggtgtagatagtagagtgtttattagacaaaatggtagcctacactgctcaagccaaaatagatttaaaaggataaaatagtgaaagtagcattaatcgcacatagatattatggggacaaagatagcacaattagccatactacacagatgattcaaaaagccgccaaagatggagcgcagctagtcgtgcttcaagagcttcatcaaggggcgtatttttgtcaagatgagagcgtgggtaaatttgatctagcaaatgattatgaaaaagataaaaattattggtctaatgtagctaaggataataaggtagtgctagtaacttcgctatttgagaagagagctgagggcttatatcacaatacttcaattgtctttgatagcgatggaaaagaggctggcaaatatagaaagatgcatatccctgatgatccaaatttttatgagaaattctattttaccccaggtgatttgggttttaggcctattgatacgagtttaggtaggcttggggttttagtttgttgggatcagtggtatccagaagcggctagattgatggctttaagcggggctaaaattttgatatatccaacggcaattggatggtttgatggagacgatgaagcgactaaatcggctcaattagaagcttgggtagcagtccaaagagggcatgctgtagccaataatctacctgttgttgctgttaatcgtgtaggatttgagagcgatgagtgcggtggtgggattagattttgggggaatagttttgtttttgatgctcaaggcgtggagctatttaggtcaaattcaaccgatgagatcgtccaaatagtagatatagatatgaaaaaatgcgaagaagttaggcgatggtggccgtttttaagagatagaagagttgagtcttacggcgatatcacaaaaagatttatagattgagcctatctttgaaatcaggcattaaacttagaataaaatcataaaattgcttttggtggtgcggatagatgaggtgagctaactcatgaagcaccacatactctataaatctcttatctctttggattagctgggtgctgaaatttaaatacccttttttactattgcagctcccccatctagtggtcatatttttgattcttatggcatttataggtctatttattttaggattatatatatttatatactggtttattagatcttttaatatgctatttgcgtagtttgtaaaagtttgaatatctggtgtaaatatttgattatcaataattttaaaatctggtgaaatttgaatttgatagcttttacctagaaattttatagagtttgggtctgtttttgggatttttgatagggttttttctatccatttagtatgagatgagataaagctttctatctgaaatttgcttgcattgagtggagctactagcttaatatcgccagttttggtaatctttaagcgtagatattttacccgttttttgctatattctattttaaaaccctcatactctatcaagctaattccttaagattaaatttcaagattttatctaaattattgctatatttaaaatattcaaaatttaagttttaaatttaaatattttttaaataaatagtatttgatttaatatttgattttattattaaactctattttagtaatgcttttgtataatactagatttaatttttaaataaggaataagatggctagatcatttagtagatcagacattagaattttggggctttcatctcttggtggaatgcttgagttttatgattttattatctttgtattttttgcttcttatatatcattgctattttttccggctgatttagatcctttttgggctatttttaatacatatggtacctttgctgctggatatttagctaggccgattggtggggtgattatggcacattttggggataaaaatggccgtaaaaatatgtttatgctctctattttgcttatggttattcctacatttttattaggtattatgccaacatttgaaagtattggatatttagcaccaattattttagttattattagaattttacaaggtattgcaattggcggagagcttcctggagcgtgggtatttgttagtgagcatgcacctcgtggaaagctatatactagcataagcattctaacagcagcagttgtaggtggaattttgctaggtagctttgttacaatgatagtaaaagatatgtggagtgatgctgaaattcaagatggtatgtggagattgccatttattttaggtggtgtct

SEQ ID NO: 962 - DNA, 8513 bp, synthetic construct
  misc_feature 1..8513: note = Synthetic
  source 1..8513: mol_type = other DNA
gcctccggccagcggattgaccgccacgaagcgcacggtgaagatgttgcgcaccgaggggaacgccgccgcgacgacgcgcccggcgacgggggcgacggcgacggattcctcgcggcggtagccgtggccgttgggcccttggtcggagttgtggtcggcgaaggtctggacggcgccggcgatttgggggaagttgcggcggatgccgtcgcgccaagcggcgtcgggatcgtaatcgtcggggttccacgcgtaagcggccacgccgaagaggccgatcttcgaggcctcgggcttgtccatggggttggagacgaagccggcgtagcgcgggccgttggtggggtcgttgccgtagcacttgcccaaaaggaggtggctcttgcaatagtcgctcacgggccagttccaccaaatgtaaggcttgcggccgaccttggcggcgaaccactcggcggtgtccttggtgatgtcggagcagacggagttccccgtccacatcaccatgatgtcggggtcgaggcccttgccgagggtctcgaggtacgggccgccggaccaggccctgttgtattgcgtggggcagaggaggaggggcgtgacgtcgcccttcgcgcggacgaagttgcggttcacgtagttgagcagctccacctgcttctcggcgcgggcgccctcgccgccgatgtcgtcgaagaagacggcgaaggagcggacgcccaaggcgtacatcatctcgaacttcgccacgcaggccttcatgtcgctgtcatccttccaatggatgtcgcgccccggatggacggcccagacaaagttcaccttgttggcgtgggccacccgcaccagctcggcgatctgccgcgcctcggcctcggggtaagggtcgcgccaacggttgctgaagccgtggaaggggtcgtccttcgggccgtagacataagtgttcatcttggtctcgccatagaaggcgaactggcgcttgcgcgcctcaaagctccacggcagcccgtaaaacccctcgaccgtgccgcggaaggccacgtccggccaatccttgagggcgacgcccgtgtagcggtcggccgccaaaagctggcgcagggtctggacgccatagaagaggcccgaggcgtcggccgccgccaaatcggcgcccgtctcgcggagcacgagggtgtagccctccttcggcaaccccttctccaacttccacgaaagggtgaaaggcgccttctcggccaccttgaaggacttggcgagcgccgcgcgcgcgtccgcgtcgaacccctccgccggcgcgagggcgatttccgccggcgaggcgaaatccccgcccgtgagggagacctcctgcggcgtcggataaacccgcatggaaggcggcaacgtgtccgcgcggagcgtcagggcgcctgccgccgccgcggcgcacaggagggtcttcaaggtcaggccggtctcattcatgtctggctcctttgtcgttggcggtattgtaacacaaacatccgcgcgcggcgtgcggggacacacggcgtgtcccggggcgcgacacggcgtctctcgggtcgaggtacgccgtgttccgggaaacgaggcccgcaatctcgtcacccgccccccaaaaaaaccacccacgcaatccccccgcggaaagaacatcagcccaagccttgacaacccctggaggtttcaagcataatataaaaagaaaagggcaaccgcttggtcacccttttgtcgtaacgcttcgtaacctttgtatccgcctggcggatagagaacaggtctgcgttagcttactttgtcacagttcggaaacaatgtagcagaaagggcattctgatgtcaaacgggaaaatcgacgtgtcgttggatttgggctatggctcaatcggttggtgcgtggcggaagagaatgggcgcgagccgttggtacgcgggtgcggcacggtggtctttgagccgaatcgctgcctggcctcggcccggcgggggtatcgtcgccagcggcgacacatccgtgccacgcggacgcgtatccggcggatgcgggactacctgacggaacaaggcgtgctgacgccggcggtggcgggactggcgcatcccaacccggagccatggcgcttggcggcacaggcgttgcgcggggaacggacattggatgccgcagagctttgggccgtgttgctgtggtacgcgcacaaccgcggttacgacgggaaccgcctttggagttcacgctccagggggacttcggaagagacggaactcaatgaagactccaaaaaagtcgccgccgccaaggccgcgatggcggagcatggcaggaaaaccatggcggagaccgtcttggacatcgtggcggagggaaaccctctggggcctgcgcgcggcgattacaaggtgctgaaccttgccttcgaccgaggcggcgtgatggcggaggtcgagacgatcctgcgtctgcacgtggggaaaatccccgggctctcggagacggtcatccgagtcctgatggccgacccgctacgggatccggacgcgctccgcgattggccccacatccccaaatcctatcttggcgggcttttggccggacaggtgaagccgcgcttcgacaaccgcttggcgacgcgttgccctatcgacggcgtcaaaaccccgctcaaaagcagcgaggcgttcctggccttccgctgggccgagcttctgagccacgtgcgcgtgggattcgccgggcaacctctgagtccccttacaccggaaacgctggccgcgctcgatgccggaattcgccggacggggcgttacacaatcgacggtttcaagcgggcggttcgcaggcttgcccccggcgacaccgacaatctcgacgcactgctctccatgccggacgccgccgaacggcttgtccgttatcccggcttggcgaaattgaacaccctcttcggcgtcgagaacttcagacaggatgcggagagccagcgtgtcctccgccacatgagccatgcccttgccaaaggcaaatccctgagcctcgccgatctcctgcccttgctccaagaagggaaggcgcccaagacgcgaaagaacggcaaatccccggcagaggcattcgacgtgaaactgcccgccggacgcgcgccctattccgaacgggtgatgcggcaagccgtggcggagatcttcgccggcaaagacccgcgcggcgagggcggcgtgctctatcgcgacgccacccaagaggatccgctccctgaggcggagatcgatcgcgccacaaacaatcatcttgtgcgccatcgcatcaaaatcatgctccgcctcttgggggacatcgtccacgactacgccgagaacaaccccgcccggatcggacgccttttcgtcgaagtcgcccgtgacatccgcgacttctcaggcaaaaagaaagaggagattgaccaggaaatacgcgcgcttcggcaggccgccctgcgggccacccggaaggccgccgaggcgttgggatgcgacgaggccgccgtcaccgccggccttgcccggaagatgcgcatcgccgcggacctcaacttcacctgcccctataccgggcggcgcttcgacgtcctggacatccggaacaaagtcgtggatctcgaccacatccttccgcgcagtcggcgtgcgacggattccttggacgcgcttgtcctcaccttttccgcggtcaacaaacggaaaggcgcccgaaccgcccttcagttcatccgggattgcggcggacagacgatttcggatccgggcccggacggcatcgggaggacgttccagatcaagaccgaggaggcctacctccgcgatctgaaggcgctcaaacaacctccatccgccaaagagcgcaaaatcttccgtcggcgccttgaacgcctcaaaatgttcgccgtcgaagaggacgccggcatgaccgacggaatgctcacccaaacctccgccatcgccaaacttgcccaccgcgccatcatgggatggttccgggagcgcggctgcaagcccatccgtcccacgctgattcccggccgcgtgaccaaggaagtccgcgtgcgccacaatctcttggggatgtcggcgcaattcgacgtccgcctcttgcgcacctatacggatcttgacggcgtcacgaaaaccgatgtcatccccaaaggcgagatgcgcggactcacccatatgcatcacgcggtcgacgccgtcgccatccttttggccggcacactcatcacccccgcccaccgcgtttgggatttgatggtcaagcgacaccaaacggaagaagagcgtgcctttctgctaggcaacggccccttccattgggatggacacggaaaacttgggcttcagccactcccagcccatgtcgaacgctcggtacgtgccgcaatcggcgaacttcggacagtccgttacgcctccaaacgcctcggccgtactgtgatcgaggaaacgcagtggcgcgtcgaacgcgtcgagaacggtcgcgtcttcatccggcaaggccatggagcagcgaccaagcgagatgaactcgccatcagcgccgcctatgggctcaatcctccttccggagacgggaaactcaaacggaacaaggccatttacgtaggtaaggccaactatgccatcgcgttacttgacctccccgtaaccattcgtgaacgtttcgtttggcgcgagctccagcaaataaaggcacaacacaacggaatggtccctcatcttttacgagcaggagactacataatcattcaacaaggtgagcggaaaggtgtttggtgtgttgaaagtctcaaatcatcaaaaacggggacgaaagtagatcttgcctttccttacaacgccgccaagatagacgactgtcggtgtcgctggcgtgaagtcctcatttcacgcctttacaaagaacacgccaccttcccccgctatcgcctaacagggatccctgcatgtcctatcacctcgtcgagatcgcaggctacgagaaagcggagctcttctgccaagacggacagctcttctgccgaataggcgatgcgctccgaaaagtgccgctggaggatgtcgcgggaatcctcgtgacgtccccgcggtgcgtttttcatagccatctgttggcggaatgcggtgtgcgacgtatcccgctggtcgtttgccaagacttccgcccctctggcatcttcctgcctgtctgccgcgccaccgacacgcttctcacccgcgcacaaatccaagcccctgctcgccttcgcaaaaccctttggcaaaaaacggtcgacgcgaaatgcgagaatcagcggcaactcgccgagacgctcacgcaaggtcggcacccaaacttggagaaactgcgagttctttgcgcccacccttcccccgcgaaagaaggcccttgtgcccacctttattgggatctctgtgcggaaagcatgcaaatcgaggcattcgcccgaacgccctccgaaaacgacgggcttaacgccttgttcaattacgcctacgcgctccttctcacccaaacactccagacgcttcttctgttagggatcgatccgcaatatggcatcgggcacgccgtccgcgaacgtgccacgccactcgcctacgacatcatggaacccttccgtccccttgtggacgcctgggttctcaaatggttcgaatacgcacggcgacacgagaaggcgctctccgtcaccccctcctacaaaaccttcttgcggcagtgcatcgccggggacaagacccccacccccccgcttcgcgaccttctcacgaacaccgccaaaggcctccgagaggcatttctccgaacctccgcccaattctatcagccatggcaacagaaaactacaaaatgggttggctatttgtctgctttgatctccccgtgacagaggaaaaccagcgcaaacgcgccacctctttccggaaattccttttggacgacggttttgacatgctccaatactccgtctacgtccgcccctgcgtcaccttcgcccgacagaccacccatatccaacgcatccaagccgtcattccccctgaaggcgaggttcgcatcttttttatcacccgtgcccaatgggcgcgtagccatgtctttcatgggaaacctgccaaaaagaagcctcccgaatccttccccgaacaacttcttctttgggattgacatccctacccgaattatttgttatataatgatgcttgatgttgtactccatcgtttactccgttctttgaaaatgtgcctttttaacgacaaaacacactccacagacttgcccctcttgacatatccacctataatatcgtatatttcgtagtgtctgctttgccacagttcacattccggcgtcagcaagacggcaggtcgaagcaaaaccgctcctccgtcgctttgccacagttcacattccggcgtcagcaagacggtgcgcaacgccctgcgcatgcgccccgagctttgccacagttcacattccggcgtcagcaagacgagttgcttcgcaaaccggacacggtcaccgctttgccacagttcacattccggcgtcagcaagacacccgcgccaagcgagcccgccgatggacggctttgccacagttcacattccggcgtcagcaagacaaccgccgcgcaagcagtccgcccttgcctgctttgccacagttcacattccggcgtcagcaagacctgtggagcgtctatgaggcggtcgctaggctttgccacagttcacattccggcgtcagcaagacagatacgacgaagcgtttcgatgtgctctgctttgccacagttcacattccggcgtcagcaagacgaaaggctccgcaaaacgtcgctctctgacgctttgccacagttcacattccggcgtcagcaagacatatcaagagatcgccggcacgaagacgatgctttgccacagttcacattccggcgtcagcaagacaacgcgcggctcttacgccgcgctgtatttgctttgccacagttcacattccggcgtcagcaagaccgtttgatatattgaatatgcatcattaatgctttgccacagttcacattccggcgtcagcaagacctgcgtcttctgcgtcttcttcgtcagtcgctttgccacagttcacattccggcgtcagcaagacatccgccgccgccaaggccatccgtgacggctttgccacagttcacattccggcgtcagcaagacggaagcgttaccatgctactgcgactaatgctttgccacagttcacattccggcgtcagcaagaccgccctccgcgagcaagccgccgcccagtcgctttgccacagttcacattccggcgtcagcaagaccccattgtcccacacccgcctcccttgtttgctttgccacagttcacattccggcgtcatcaattcgcccacgttcccgaacttccgaaggaacagcaacgtcagcgcatcccggtgctggcgctcggtcagcgtctcatccttcgcgaggtcttcgacgtccttcccctccgcgattttctccagttccgcatcaagccgcgacacctccctgtccagcgcgtcgcgcttcttcgcaccgcgcacgccgatgtcctgcgccgtcgccacgtccgcaagcacccgcgacaagtccttgacaatccgccgcgcctgcttcaggaaccggttacgcgccgagctcgcctccccctgcaacgcacggttcgcgtccgccaccgccgcgcgcatacgcttcgtcgccgccttcgcaacgcccccgtgcacgcccgcccggagcaactggatgctccgcataatcttcccctcgagcaccgaccccgccgtgtcgcgccccatgcgcccgaggccgtccgccgccgtcagcatactctcgcggaaacgcccgtacgccaacttccgcgccagccccttcaggatgtgctgggccgtcatcgcgtacgcgcgctccccctgcttcgtcagccgaagcggaaccgcctctcccgtgtacgtcccccactcccaaagttccttgcgcccctgttgggtctccttgtcaaagcccgcgtcaatctcacgcacgatacgctcggccagagtccccacgtcctcttccgaaagcgccgccttctcgacgcgcgccatcaggtcgaacccaagcacgccctgcaactccgcgaacgacatcccccgttcgcgctccaacgcacgcttgcgcgcgtccttcagcgcctgctgctcccgcgtctcacgcattctgtcgcgaagcgtccgcaccctcatctccatcaggtgcttcatcttcgcctcgtagtaacgcgacagcaggcgctcctccgccaactgccatgccacgttggccgacgtctcccgctcccgctccagcgcacgctccgccgcgtccgcacggttgcgctccgccgtcgccgccttcttcgcctcgcgcgtctgcgccttcgcctcgcccaccgcctc

SEQ ID NO: 963 - DNA, 14847 bp, synthetic construct
  misc_feature 1..14847: note = Synthetic
  source 1..14847: mol_type = other DNA
cacggtccagactcctacgggaggcagcagtgaggaatattgggcaatggagggaactctgacccagccatgccgcgtgagtgagaaggttttcgaattgtaaagctctttcgggtgtgaagatgatgacggtagcaccagaagaagccccggcaaacttcgtgccagcagccgcggtaatacgaagggggcgagcgttgttcggaattactgggcgtaaagggtgtgtaggcggttaggtaagatagtggtgaaatgccagagctcaactttggaattgccattataactatttgactagaatgatgtagaggatagcggaatacccagtgtagaggtgaaattcgtagatattgggtagaacaccggaggcgaaggcggctatctgggcataaattgacgctgaggcacgaaagcatggggatcaaacaggattagataccctggtagtccatgctgtaaacgatgaatgctagttgttggcgtaagtcagtgacggagtaaacacgataagcattccgcctggggagtacggtcgcaagattaaaactcaaaggaattgacggggacccgcacaagcggtggagcatgtggtttaattcgatgcaacgcgaagaaccttaccaactcttgacatccttatcggggagatgagagattatttccttcagttaggctggataagtgacagatgctgcatggctgtcgtcagctcgtgtcgtgagatgttgggttaagtcccgcaacgagcgcaacccctgctttcagttgccagcatgtagagatgggcactctggaaggactgccggtgacaagccggaggaaggtggggatgacgtcaagtcatcatggctcttacgagttgggctacacacgtgctacaatggtatctacagagagaagcgagattgtgagattgagcgaatcttataaaaggtatctcagttcggattgttctctgcaactcgagaacatgaagttggaatcgctagtaatcgcggatcagcatgccgcggtgaatacgttcccgggtcttgtacacaccgcccgtcacgccatgggagtttgttctgcctgacggcgttgaggtaacctcgcgagaggagcctggcgaccacggtagggtaagcgactggggcgaagtcgtaacaaggtagccgtaggggaacctgcggctggatcacctcctttcaaagaagatagagaatatactgtccacatatcctttaggagcgaggggtttgtagctcaggtggttagagcgcacgcctgataagcgtgaggtcggaagttcaagtcttcccagacccaccaagttgggggtatagctcagctgggagagcacctgctttgcaagcagggggtcaggagttcgaacctccttacctccaccagaaaacttctgggggatgttatagaagagagtaaataagagaaagaagaaattagataataaaaatctaatggagtataagaaaagtataatatacacctttttagactatgaagaagtagtttagaaagcgggtaaattttactgagtaaatacggcgtatagatgatgtaagattatttatacgataaagaatcaagcgataggtaagggcatttggtgaatgccttggcaatcagaggcgaagaaggacgtgatacactgcgaaaagctgcggggagttgtgaataagcattgatccgcggatgtccgaatgggggaacccacagagcaatctgtattctagactgaatatataggtttagaaagcgaacgtagggaactgaaacatctaagtacctacaggaaaggaaatcaaccgagactccgagagtagtggcgagcgaaatcggaccagccaatttgctcaatcgaaggaattagaatcatctgggaaggtgagccatagagggtgagagccccgtataagtagtaaaagattgagtaagagagtagggcggagcacgagaaattctgtctgaagataggtcgaccacgatctaaggctaagtactactgattgaccgatagtgaacaagtaccgtgagggaaaggtgaaaagcaccccgataaggggagtgaaaaagaacctgcaaccggatgcctacaagcagtcggagggacaaaggtcctgacggcgtaccttttgtataatgggtcagcgagttagtctatctagcaagcctaagccgataggtggaggcggagcgaaagcgagtgttaatagcgcgttaagttagatggattagacccgaaaccgagtgatctagccatgatcagattgaaggttgggtaacaccaactggaggatcgaacccacatctgttgaaaaagatggggatgaattgtggctaggggtgaaaggccaatcaaactcggaaatagctggttctccgcgaaaactatttaggtagtgcggtaggcggacaccttgaggggtagagcactgaaagagctaagggggagcgatccttactaaactttatcaaactccgaatactcaagagtgatacttaccagacagacagtaggtgctaaggtctattgtcgagagggaaagagcccagaccgtcgattaaggtccctaaattatggctaagtggtaaaggaagtggaatatccaaaacagtcaggaggttggcttagaagcagccatcctttaaagaaagcgtaatagctcactgatctagttaagacgttctgcgccgaagatgtaacggggctaaagccatataccgaaatcacggaattatgctgaaagatgcataattggtagcggagcgttctgtaagccggggaaggtgtgctgtaaagcatgctggaggtatcagaagtgagaatgctgacatgagtagcgaaaagaagagtgagagactcttccgctgaaagtccaaggtttcctgcgtaaagctaatctgcgcagggttagtcggcccctaaggcgaggcagagatgcgtagtcgatgggaatcaggttaatattcctgaaccggaagggaagtgacagatatagtagttagtgagttcttaatggattgagcttgctggtgatatgtctcgggaaatagccccttcgaagaccgtaccagaaaccgacacaggtggacaggtagagtataccaaagcgcttgagagaactatgttgaaggaactaggcaaaatacttgcgtaacttcgggataagcaagccccaagatcgggcaaccggtagtggggggcacatactagggagtagcgactgtttaacaaaaacacaggactctgcgaaattgaaagatgaagtatagggtctgacgcctgcccggtgctggaaggttaaggagagatgtgcgagcattgaactgaagccccagtaaacggcggccgtaactataacggtcctaaggtagcgaaattccttgtcgggtaagttccgacctgcacgaatggcgtaacgacttctccgctgtctccaacataggctcagcgaaattgaattctgagttaagatgctcagtacccgcggttagacggaaagaccccgtgaacctttactatagctttgcagtggtattaggtaagacatgtgtaggataggtgggatgctatgaaggtaagacgctagttttactggagcagacgttgaaataccacccttgtgttatttgatatctaacctgcttccgtaaaccggaagagggaccctgcatggtgggtagtttgactggggcggtcgcctcccaaagagtaacggaggcgcgcaaaggttggctcagattggtcagaaatcaatcgttgagtgcaatggcataagccagcctgactgcgagagcgacggttcgagcagagtcgaaagacggtcatagtgatccggtggtcccgagtggaagggccatcgctcaacggataaaaggtactccggggataacaggctgattccgcccaagagttcacatcgacggcggagtttggcacctcgatgtcggctcatcacatcctggggctggagaaggtcccaagggtttggctgttcgccaattaaagtggtacgcgagctgggttcagaacgtcgtgagacagttcggtccctatctgccgtgggtgtaggatacttgaaaggatttgtctttagtacgagaggaccgagatgaacatacctctggtgtaccagttgtaacgccagttgcaacgctgggtggctaagtatggaagggataaccgctgaatgcatctaagcgggaaacccaccttgaaacaaggtatccccattagaaccgtgatagacgatcacgttaataggcagggtgtgtaagcacagcaatgtgttcagctaacctgtactaatagttcgattggcttgattttttagcgtataaataatcttatagattttatcaataatttctttgcagaggtgtttagatgatctggttgtaatagcggaggtgtcccacacgatcccattccgaactcgactgttaaaccctttagcgccgatggtactttgtcttaagacacgggagagtaggtcgcagccagatcttctaaacatctctgttctcttttatttatgacctcaagttttatgcttgaggttttttttattttaaacggtgttgtttgcggattagcaaaagtttgtccctgaaaacatatatttagcggtcattataatttcccctgaaaacttttaacctcctgctgactgctcatatatccaaatgccttaaactattatctatccttaatccatagcattatataatcctttcttatcccctaaaacgctttcctgatgcttgtcgttgctaaaatattgaagaagagcagcgaagacgcgaattgcaggaagagcgtattgatattatggccggcgagggtatgaacgaggatgaagcccgttttagagtgatgaccggtaaagaacccgatgaactcgaccggaaataatgcaggggcttaaccttcaatcggcaaggttcgggcgcttgtcgaaattcggttgcactgcggaaaataaactattcgtgctgagggaacaaggctgttcgagcgtgaacagctggaaagcaaaggcttgatgataggcagcgctgtcgactgggcaaataacaaaaaaattaggggatgactacgctgattactcagtttcatcgaaccccactcgaaagaagaaatcttcgattgttataatgcttcctttccaaatcagacattaaatcaaaaattccttatattaaaaataaaagttgataagcttaatgtcaagaaataattttgtggagctaataagtatgaaaaagcgcgttctgggactggatataggtattgcttctcttggttgggctgttgtggatatagatgaagaattaatgaccaccaaaaataaaaatgaatcgaaatataaaattaatagtggtgagattgcaggtagcggggttcgagtttggaaagaatctgtggatcgtcagggaaagagtttggcagccatcagaggagaaagtcgtcggatcagaagtactattgaacgaaaagcagaacgtcttagacatctcataaaattggcaaaacaatatgacatcattgcagatgattttaatttaagtatgcttaatgctcctgcaaaagttttcttgaaagattgggatatttggagattgcgtgcgagagcaataaaagaaaaattgtctccgtttgaactatttagaatattatatcatattgccaatcatcgaggtttttatttttcatctaaagctgaagaaaaaagtattgaagcaagtaatgctaaaagcaaccttgaaggcaatgataacgatgacgatttaaaggctaaagaagataaaaaagttaaaacaggtataaaagaaatcagagagaagtttaaccaaagtggttgtagaaccattggtgagtttatttatttaaaagaaggaaaaaagcgtaactcaaaagataattatagtgtatccctttatcgaacggaattattagatgaagtaaaaaaagttttggcttttcagagagaacaaggtaatattttgttctctaaagattttgaagaaaaatatattaatgaagttttgatgtacacacatcctcttgatgatgaaaagataaaagcgatgattggtgagtgcgagcttataaaaggtcaacttcgttttcctaagcatggttatgaagcggagctatttgctttttataatagacttaataaattgcagatcaaaaatagaaaagagatcgataaagaagagcgagagaaaattttacaagaagttaaaaatacaaaagattgtaagttatcttttagtgatttacgtaggagtttggagcttgaaaattatgagcaaaaatttaatctttgctcttacagagaatttaatcctgaatatgagaaatctctaagtatttctcaaaataaaattgaacagtttaaggctgaaaatctcgattgttattataaagatactggagagttgtgtgaagaaaatctttggtcaactctaaaatctcaaataaatgaaatttttgaaaagtatcctaatagaaaagctcttaaattctattattcggatatacgaaaacaattaaagttgcctgataatataagatttgtaaaattaaaaaaggattactgcttatcaattgaagagataggaaaagaaaaatattatgcccaatttgaaaaagaaacatttgttgaattttcaggatataatatactcaaaaaaggtctaaaagaatgttttgttgataatgaaaatacactaaataccattgcagagactttagtatattatcaatcagatgaagcaagaaagcaatatttgcaagaacatggaatagaagatgaaaagttaattaataaagtgctagagcttaatatgaaggatgtttctcctttttctcttactgctttgaaagatttaaactctataatgtcaaaagaaaaagtactgtttaatgaagctaaagaaatacttagtaaaaaagatggttataaattaaaaaaaacagaaaaaacttcagaaattgctccgtatcacggcaattttgaaaaaaacgcgacagttgccagaattattagtgagtttcgtaaaacaattaacgcaattaacaaagaatatggtgttattgatgaaattcatattgaaatggcaacagatgtcgcaaattcaaaagataaaattgctcgtattcgtaatggacaattaaaatacaaagagcaaagagatagtgcaagagccagatgtcttgaaaatggtgtcgatcctgatgtcggtgataatcttttgcgttttagacttgcagaagagcaagattttaagtgtatttataccggtaagcaaatttatctcggttctaaaacacctgcaaatgccatcaatattgtggattgtgatattgatcatatcattccgattagtcgttcgtttaatgatagtcttgcaaacaaggtgatttgttcaaatttagccaatagagaaaaaacaaatcggttaccttatgagtggtttcatgatccggaaaaccaaaaaactgaagaagattgggaaaaatttaaggtaagagttctcagtggtaacagaatgaacggaaccaaaaagcgcaatctgttgcgggaaagttttacagaaaaggatatggaagactttatttccagagacctaaataatacacgctatgcaacacgccatattgcagaatatcttagaaaatattttagttttgaaacttctaagcacagtatgccggatgctaaccgtattagagtttttggaggaggaattacagctaaattgcgtcatatgtggggtttagataaagacagagatgaaagcaatttacatcacgctcaagatgcgatagtgattgcctgtacctcatttagtaatatttattatatttgtagtgtactaaaagagttagagcagaaaggaacgcatccgaaaaaacagcaattagttccttggacaagttttagagatgatgtaaaacagtctttagataaaattacagtttcgcaaatgttgcgttgttcagctacaggacaggctcataaacaacctgttaaatatgatacaggaactgaaattacccgtaaaggtgcacaaaataccataaatgtctcgttggataccatgtttagatatgatatctatcatagtggtaatggctactattgtgttccgatttacgccatagatctatccaagaaaaatgataaatttaagcatattattcaaccatctcctaaaaaaggcgaagaatgcgaagctgtggctgaagagtttgtgtttagtctttacaaaggggcttatattaaaatagttactgaagatgatgaagtacttgaaggatacatatcacaatacaatgcagtatctggacagttttatattgaaagtgtaaatggagatagagtttatgaaattaataccagtactttagaaattggtgattatataaagttaaaattggaaaataattttaccagaatggttttggttgtttcttacgataccgacaataaaaaattagctctcatttctgcagaaggtgatgagttttttgttgaggcagaagaaaagttggataagaagggaaaaggttctggaaaatatgcaacaactcatccttatacaaaagttgataaagagaaaaaaattagtctttctgttataaaggatttacaaaaatataccatagaccgtcttggcaatttaactcgggtaaaaaaagaaaaagaacgtttttctaataaactaaaatccaatgcgcagcgataccgagaaaaacaagccaaaaaagcaaaacaacaattgcaagggagttaaaaaatgggctggcggatattgcaaattacaaaaccttgtaaattatcggttaaaaaccgtcagcttgtttatgaatgtctggaaccggatactttaaaactgccgttagaagacatttcggtaattattttggaaaataagcaaatttgttttaacaatacattattttcagaattggcagaatataatattgttttgttttcgtgcgacagcagtcatttaccatcgggagcattttttccttatcataatcatagccgctattcggaaatagcatggcagcaggtggaaagcagcgaaccgcttaaaaagcggatttggcaggaaatagtaaaagcaaaaataaaaaatcaggcagctgtactgaaatgtttggaaaaggatggatataaaaaattgattgaaatttctaaacaggttcaatccggagatgctaaaaatgcagaagcttatgctgctaatttgtattggaaatatctttggtcgaattttaatcgtaatgacgagagtgatattcgtaattcagccttaaattatggctatgcaatcatcagaggagctatggccagagcggtggtaggggtgggaatgctgccttgttttgggatacaccatgccaataaattaaactcgtttaatttggttgatgatttgatggaaccatttcgcccttttattgataataaggtcgcgatgatgaatttagataatatcaaagaactaaataccgatattaaacaacaattggtagctgttttaacgcaaaacagcataattaacggtgaagaaataagccttttgtatggttgtgaaatagaggcggcatcggttgcaaagtgtataaaaaataaagctgtcggcgatctgaaaattccggttttaaataatttgccgctttttgtgtgaggttgtggataaatggctgtcggaggtgaaagatttatgcgaattataatattttttgacctgccgacactgacaaaaacagatcgacgtaatgcgagtcgctttaggaatttcctagtaaaagacgggtatataatgttgcagttatctgtctattcacgaatttgcaaaggacaagatgatgtggataagcatgcaaaacggcttaagtcattgattcctaaggaaggaagtgttagaatgttaattgtaaccgagaaacaatatggctcaatggaaatactggttggaactctgaaaaaagaggaagaaataggtgaaaagcagcttttattactctgaaatttttgttttaaatcaaaataacctgttggaaatcaacaggttattttgaatctattatagcatatctgatttggaaaggaagctataaccctgttttggtttttgcgctgtttccagctattatagcatatctgatttggaaaggaagctataacagctcttctcggtaaccctcgtttttgattaattatagcatatctgatttggaaaggaagctataaccgattttgggcttgagccgtgatttgatggattatagcatatctgatttggaaaggaagctataacaatccgctttgggaaatgagcgataaagacattatagcatatctgatttggaaaggaagctataactgttaaaattgccattattccgccctttctattatagcatatctgatttggaaaggaagctataaccaaaacagctaagtgggcagagtttaacggattatagcatatctgatttggaaaggaagctataacgctattactttatatgtattaaggcaattaattatagcatatctgatttggaaaggaagctataacttttataagagatttaccgacaatcggcgaattatagcatatctgatttggaaaggaagctataacctaaaaaattctattagccagtacccgaagattatagcatatctgatttggaaaggaagctataacaagaaagagaaagtcaaggcattcaaggcaattatagcatatctgatttggaaaggaagctataacggcggatatgatattctttacactaacttaattatagcatatctgatttggaaaggaagctataacctcggttggcttttaatcgcacttcaagaaattatagcatatctgatttggaaaggaagctataacgtataatatcgccgatgtttccggtcgtttattatagcatatctgatttggaaaggaagctataacgggtttttggtgcggcattctaactagtctattatagcatatctgatttggaaaggaagctataacaaatttcttgaacaatttaacactggatgcattatagcatatctgatttggaaaggaagctataacttaaaaaagattgaagacgaaaagagaaccattatagcatatctgatttggaaaggaagctataaccggagtcgaaaaagcaacaatccgcggcgaattatagcatatctgatttggaaaggaagctataaccgtttttgttcgcaaatcttgcaagttctgattatagcatatctgatttggaaaggaagctataactcgccaccgctccagaataattcgttggtcattatagcatatctgatttggaaaggaagctataactcgccaccgctccagaataattcgttggtcattatagcatatctgatttggaaaggaagctataactcgccaccgctccagaataattcgttggtcattatagcatatctgatttggaaaggaagctataacacgtgttgcccaatctcccgccttatctaaattatagcatatctgatttggaaaggaagctataaccttgttaattttagcaagcaagataaaagaattatagcatatctgatttggaaaggaagctataacgccgtttcaaacatgatgaaagctgaggccattatagcatatctaatttggaaaggaagctataacttgacactaggggtggtgtcagagttgacaattatagcatatctgatttggaaaggaaactataacctattagtgttacaaataacatttcagcatacgcaactaaatatattctccaaataatttctgaaaatataaaattgctgaaatcaggttaatgttaaggtgttttatttcagtttttcccgcaaatattttgccgtataactgctttttgatttagctacttcttcaggtgttccttgagcaataatctttccgcctccgtcaccgccttcaggtcctaaatcaacaatataatcggcaactttaataacatcgagattgtgctcaattacaacaacggtatttccttgttcaacaaaagtctgaagcactttcagcaaacgatttatgtcttcaaaatgcagaccggtcgttggttcgtctaaaatgtacaaagtttttccggttgctcgtttggaaagttcttttgacagttttatacgttgtgcttctccaccagataaagttgttgcggcttgtcctaagtggatatatcctaaaccgactttttgtaaaagttctaaacggtttttaattgccggaatggctgcaaaaaattcatgcgcttcatcaacggtcatatctaaaacatcggcgattgatttacctttgtattttacttcaagtgtttctctattaaaacgcttgcctttgcaaacatcacaggcaacataaacatcaggtaaaaagtgcatttctattttggttacaccatctccctgacaagcttcacatcgtcctccggcaacattaaacgaaaaacgtcctgccgtatagccgcgtgcctttgcttcgggcagtccggcaaaccattcgcgaatataagtaaacaaacctgtgtaagtagccggatttgagcgtggtgtgcgtccgattggcgattgatcgatatcaataactttatctatgttttcaatgccggtcaattcatcatattttcctgccggttcacggctgttgtttaattctttatttatggctttaaataaggtttccagaataagagaagatttaccgcctccggaaacaccggtaatgcaggtaaatgtgccaagaggaatatttaaatttacatttttcagattatgggtcttagcgcctttaaggctgataaaaagtccatttcccttacgtcgtttagccggtacggaaatttctttttgcccgtttaaatattgtgcggtcaaactgttcggatttttcaaaacctcggcaacagtaccttcagccataacgtttccgccaagctctccggctccggggcccatatcaaccaaataatctgcggcgcgtatggcatcttcgtcatgttcgacaacaatgaccgtgttgcctatgtcgcgtaatctgtttaaagtggccaacagtcggtcgttgtctctttggtgtagtccgattgacggttcatccaacacatacataacaccggttaatccagaacctatttgcgatgccagacggatacgttgagattctccgccggacaaggttcctgattgtcttgataaagttaaataatccagcccgacattatttaaaaaattcaagcgctcaataatttcttttaaaattttatgagctatttcagcttttttaggggataattgtttttctacttctgaaaaccattttaaggcttgtttaatagacatttcagaaacatccataatatcaagaccgcagactttaacagccagagcttcgggtttcagccttttcccgccgcaaaattcacaggtggcagcagattggtattttgaaaattcttcccttatccaacttgaatctgtttctaaaaaacggcgctccatattgggaataacgccttcaaacggtttatcggttgaaaatcgcgaatagtacatcggaacacatacatttcccgagccataaagaataatgttttttgcatgttcaggcaaatctttccatggtgttttagcatcaatttgcaaaaaatcacataaagatgttattgtttggctgtaaaaagacgatttactgttatcccaaggggcaatagcgccctgtgacaaagaaagatttatatttggaacgattaaatccggatccatataaagttttgcgccgatgccgtcacagtggggacatgccccgaaaggattattaaaagaaaaaagccgcggctcaatttcttcaatggtaaaacctgaaaccggacacgcaaatttagaagaaaaagtttgacgttcgccggaggaaagattttcgacataaagaagtccgtcgctgagtttcaaagcggtttcaattgattgggcaatgcgggcttccaacccttctttgataaccaatctgtcaaccacaacttcaatatcatgtttttgatttttgttaagttgcggtgtttcgtccaaactgtataattcaccatcgatttttatgcgttgaaaaccttgttgctgcaagctttcgaattcttttttaaattcaccttttttaccgcgtgcaatcggcgccgacagaataattttgctgccggaaggcaaagctgttacggcgtcggtcatttgcgaaaccgtttgcgattcaatgggcaatcctgttgccggagaataaggagttccggctcttgcccacaaaagccgcatatagtcgtagatttcggtaattgttccgacagtggagcgtggattgtgcgaagttgttttttgttcaattgaaattgccggtgaaagtccttcaattgaatctacttccggttttttcatcaaatccaaaaattgccgcgcgtaagcagataaactttcaacataacgccgctgtccttccgcatatatcgtgtcaaaagccaatgaagattttccggatcccgaaagtccggttataaccgtaagtttgtttttagggattttaatatcaacatttttcagattatgttctcgggcacctttaatatctatatattccatggcttttctcctgagcgaaaatatagacacgacagaacaatttagcaaccaaaaaagtcagaaacagtttaaaaaccgtttctgactttaactttttttcaggcatttcatcaatcttcagaaagcagcg

SEQ ID NO: 964 - DNA, 16116 bp, synthetic construct
  misc_feature 1..16116: note = Synthetic
  source 1..16116: mol_type = other DNA
aaatatctacagaactatttgaacgaattctgttataaacttaatcgcagatactttggtaacagagtctttgataggcttacacttgccgtagccaaatcttactggtaattaatggggggatcagttaagctaattagaattgtcctgcattaaattattctagcattaattgttcctaatttggcaataaggggttccatcctttttctctcaatttttaccttgctttatttgtttcagtcttatatgtttggctgagaattgtaaccaatttaagtgtctaaattatatccacaaaaaccaaaatgaaacccctctttattttattgattctcttcattttttctgctttagatggatatactgcggacatggcgagcaaagccttacacagctcatctaaaaaagaaattgtgccacctggaactgttaaatttaatgaaggactttatgttgatatgactgagttatctaattttaactggcttgaatatatgagctggatgaaaattaactatggcaaaacgtccaaacaatatgctgcagcattgccagatacacttatctggaggaaaacaaatattgtattcgaagaatggtatttacgccatccttcctatcataatcaccccgtagttggcgtctcctatgagcaagctattgcctattgtgcatggcgatcggatcgggtaaatgaaatgcttttcgcaaaaaataatacgattgaatatcacttttataaagaagacgctaccttttgcaaaatccccaaaatttgtacttatcgactaccaacagaaaaagaatgggaaagttttgctatagctcccttttctaaaaaagtcttgcgtaagcagaaagatgaccgcatctataacaccgtttttaaaccaactgaaattgagcataatgatgacgactccgaaataatcgcacccgtcatttcgtactggccaaatagttttggaatgtacaacctcataggaaacgttgctgaaatgacggcagaaaaagggaaatctaagggtggcagttggtctcatacattggaatcctcctcagtagatagttcggttgcctataccacaccaactaactggttagggtttcgttgcgtttgtgaagtaaagctaccttaatttaaaatcacgtatttatacccttgtattacttaatgatttgtgcaaattttgattcagcaagacgtaatgtcatgtacaatactaagatccatttgttctttctataatccaatcagccagttaaatctccatttgggagttaaaacatcaggttttagccataatcgttggtcgttaatccaaaagattataatttgtcaaagggattgctttgcttttgattttaaacaattttaaacaaaaaaatcccaccgaagcgggactaaagattttcatctacggcatatagccttattgtgataagattaaagaataatttcttattgggtcaaatgtataaaaaaaattgactacgacaaaatatattttaaaatgagcaaaacattaggattagatttagggacaaatagtattggttgggcggttgttgatgaccaatcagatacaccaattgtcgagaaaggtgtaattgtttttcctgaaggagtgaaaattgaaaaaggaacggaaaaatcaagagctgcggaaagaactggttttcgagggacgcggaaattaaaattcagacggaagttaaggaaatacgaaacacttaaagtgttgtctaaatttaatctttgtccattaacgcttgttgaagttgaagattggcggaagtcgaattttaaggaatacccaaataagcctgcttttattgagtggttgaaaacagatgacaaaacaaataaagttccttactttttcagaaataaattttcgcgcgaagtttccgcttggggaaatgatgaaacacttcgccaccaactcggcagagccttttaccacttggcacaacgacgtggatttaagagtaaccgacttgagcaatcagatgaaaaccttatttctgacgtaaaggaattcatacaagacgctttagctgattcacaaaatggagttgaattattgattcaactcgcaactatatttgaagaatataattttgacacgcgcaaggcagatgaattagatagcaccgaacaaaaactaaaatcaatacgcaagtatatctttggtgttttagaaaataaaattaagaacaaagattattcaagctatcaaactgcaaaaaaagagatagacagatacattaacagaccagaaaatttgggtgctgttaaaggagggataaaagaacttagtaaaaaaatagctgagaaagattgtcaatctttagggcaatatttttggttgctttatcaaaaagacagaaaggtcgaaaatcataaaattcgttctaattacacttcacgagaggagcattacgaaacagagtttaatcttatttgcaaaacacaaaacatctctgacaaacttaaaaagatgctatatcaagccatcttttttcaacgtcctttgaggtcacaaaaaggattagtaggcaaatgcaccttagaaaacaataaggcaagatgtcccgtttctagaacggagtttgaagcattcagaatgtggtcctttcttaattcgatcaaaataaaaactaaaactgatactagtctacgcgaacttaccatggttgaaaaggaattattaattcctaaattttatcggcgcaaatcaactttcaagtttgacgatcttgctcaaactttatcaaaacattatggtgataagtttgttcattttaaagatacggtgccaaatggtaataccaacctaatcaacttcaaattaaatacaaccgtaaacggctgcccagtttcggctatgtttaattatttttttggtgccaattgggaaacaaaaaaatttatttatgaaacattagatattgatggattaaagcaggtacatgaaattgattataaagatatttggcatgtattgtccacatttgacgacgacaaaaagctttatagttatgcaatagaaaaattacgcttggaagaaaaggaagctaaaaaattctcaaaactatccttccaacaaggctacgcgaatttaagtttgtcagctataaataagattttagcttggttaaaacaaggtttaaaatatccgcatgctgtttttttagcgaatatggaaaaagttgtaaggcctgaaatatggtctgacaaaacggataaaaaaatgcttattgatgctgttggaacaattttaaatgagcattcttttgagaaaaaaaggaataggaccatcaatgctttaattgctcaatacaatgcagaagttaatcaggttcaaatgtcagaagaatcaagcccaataattaaaaatgaattgaaagtattattatccaaaacatttggacaatccctatcagacccaatattggatgatgcttttaacttgctaaaaaaacaacttgaaaaggatagtttctccattgcttttattccagacaaacgcttggacgaaatgttgcacgagtttttagaatcaaataatctcattaaagatacgaataagttaaaaaagctttatcacccttcagatttggaaagctttcagccaataaatgcaaaaaacagagctggtgaatatatactggttgataatgaacctttaaaaatattaaacagcccaaaaactggcgcaattaaaaatccggttttaatgcgaaccatgcatcagcttaggaatttgattaatgaattgttgctacaagaaaaaataaatgcaaaaacacgtattcatattgaattagctcgagaagttaatgattctaataaaagggctgcatacaaaacttggcaagatcaaaaacaagcggaaaatgaagaaatagccagtataattagagaattatttaaagaatctggaaaaaaggaagtaacaattggatctgaagatatcaaaaaggtaaaagcatggacagaacagttaaaggatgaaaacgaaaaacctgtggatgtttttgaattaggaaagactaaaaaggaaatggttcaaaaatacaagttatggaaagagcaaaaaggctattgcatttataccggtaaaactattaacctgacacaattatttgaaggcacagcttttgatattgaacacacgattccgcggagtgtttcttgggataattcaatggaaaacaaaacaatttctgacgctacatacaatcgagaaaccaaacgcaataaaattccttcagaacttgatgcacatccagaaatcctggggcgtattagacactggaaaacacattggaaaaaattagacgaccaaattaaaaggattaatacagctactattattgataaagaagcgaaagaccgaatgattcgtaaaaaacatcttttaagatttgaatacgactattggtatcaaaaatacgaccgctttataatgcgtgatgtaccgtcaggttttaagaatagccaattagtagacactggacttataacacgttacgctaaatcatatttaggtagtttattccaaaacaaaaatggcaatagcaatgtaagtgttgtaaaaggaagtgttgtttatgaatttagaaaagcgtggggtgtccaaaaattacaagaaaaaaaatcgcgttcaaatcacattcatcattgtatagatgcagtgacaattgcctgtatgacaagatcaaaatataacacatttgttcaagcatggaaagagaatgaggaaggtagcaaacttctgacaagagataccacccctattaaaaaaccttgggtaacatttacggaggatttattaaaaattgaaactgaggtggcaattgtacgagcattccgagacaacaaatctaatcaaacaaaaaagaaggttcgaaaaagaggaaagatcgaatacaaaatagaattcgaaaaggataatgatgccgtttatttacgcgcagatgacggtaacaagattcctgtcttagatcagagcggtaatcctaaaaaaatagtagatagagacggcaaggctattcctagatatgaaacgggtgatacagctaaaggctctttacatcaagacactttttatggcgctataaaaacagccaaacgggacaaaaataatatcccacttagagatgaaaatggaaattttgtgtttgaagcggataaaaaagggaatccgctcattaattatgtgataagaaaacctttagatagtttaacagacgctgacttgaaaaaaattgttgaccctacaactcgggaaattgtcataaaagccagagcagaagaaaaaacattaaaaaaagaactagattctttgaaaaaggaactgaaaaaagagcttattgagattgaggtaaaagaactgtccgaacgaatagaaagattagaacaaaaaattaaaaatgatttatatgttattcctcccaaaaaaggaaagcgaataattacgcccattagaaaagtacgcatcaatgcaaaaatgacagaaccgttacctgactttaagaagcacaaggatatttctaagcacccacacaaacgggagtattatgttcaaaatgatgaaaactattgtctggctttatttgaaaataaagctaataagaaacggaaagcagaaattattaatttaatgaatgccgttaattatttcaaaaaaagcaattcgaaagagaatcacgttttaattccggaatccaaaaaaggatttgaattatgtgggattttaaaacctaatacaatggttttattttatgaggagttacccgaggaagtttgggatttagataaaaccgagcagctgaaaaggctttattatgttagaaagatgtctaaagacggcagagcgacatttcaatttcatcaagaagcgcgtattgatgagcaactcaaacaagattatttaaagcaaaataacgtagaagcccctaagtctttgactaatggtgaatcgaaaatagatttttcaaacctgcccacacccaaatttcttctgagccctaacaatatgcagtttctaattgaaaatgttgattttaaagtttcggtgactggggagatcatcaaactctaatcaagaatatttcatttaaccccaaaataaaatgctaaaacgaacccttctattcagcaacccttaccacctgagtacgcggaatttgcaattgcaaatagcggaaaaggattcgggtgaaataaaaacggttcctatagaggatgttggctatatcgtttttgagcacccacatattacgtttacacaaagtgtgatgcagctattggcggagaataatacagccgtaattttttgcgatcaaaaatttcacccctcctctatgctcttgcatttagatacgcataacatacaatctgaacgatttaaacaccaagtaaatgccagcgaacctttaaaaaaacaattgtggcaacaaactgttaaacaaaaaattattaatcaggcagatttgctaagcatgcaagaaaaagatgctgaggccctttattataaagccaaacaagttaaaagtggcgacaccacaaacgaagaagcaaaagctgcacgcgcttattggaacagattatttggcaaagattttaggcgagaacgaaatgggcaagccccgaatcctgcattaaattatggctatgccattttacgtgctgcaactgcgcgtgcattggccggaagcggtttgttggcaactttaggaattcaccaccgcaataaatacaactcgttttgtttggcagatgatattatggaaccctatcgcccgttggttgacgaaacagtatatgaaatgtatcacggtggattggattgtgaaaacttgggcaaggttgaaaaagcagaactacttaaaatattgacaaaagatgtcatcatgaatgagcaagttagtccattaatgattgctttaaacaaaacatcctcctcactagcccaatgttttgagggcaaaaaacgaacaatctattatccaacctttcggctatgagtcaaggtcgtttaaatgcatatagaattatgtggttatttgtgttttttgatttgcctaccaatacgaagaaagaaaggcgtaccgctcaacaatttcggaaaaagttgctaaaggatggatttacaatgatgcaattttcagtttacaccagacattgtgctagttttgaaagtgccaccgttcatataaatcgaattaacagttttattccaaatgctggacaagttagcatcatgcaaattaccgataaacaatacggcaatattcaaaattattggggtatttcgcacgccccgttgccaggaacaccacagcaactggagttattttaacatatagaaataaaaaaaagtggaatctaggcaatttatttcctgaaaaccacttttttaaaaacgacattcctttgtaaaaacgtcattactagcaatatatgtcgcgcggtaatgtcgtaatactctttctttaatcaaaccacaactagattcgttagttataatgaacttacacgaatgtcgtaatactctttctttaatcaaaccacaactctgaaccaataacccaactgttactacccaatgtcgtaatactctttctttaatcaaaccacaacagcttcagataagaatacaaattctagcttaatgtcgtaatactctttctttaatcaaaccacaactcgtattgctttacggcttcatccatttttaatgtcgtaatactctttctttaatcaaaccacaactgtaactttactgttcctttaaaagttagtaatgtcgtaatactctttctttaatcaaaccacaactgtatgaatctaatgataacaattaaagctaatgtcgtaatactctttctttaatcaaaccacaacccaagatagtcactgaatgctttcgcgtcaaatgtcgtaatactctttctttaatcaaaccacaactccaatagtcgtaaaactctcttaacattgaatgtcgtaatactctttctttaatcaaaccacaacccgtgaattgaaaaatataatctgaaatataatgtcgtaatactctttctttaatcaaaccacaacttatcattttaggatctagattcatttttgaatgtcgtaatactctttctttaatcaaaccacaactgatgtccttgatggagctttcaaaatctaaatgtcgtaatactctttctttaatcaaaccacaactgaatgtctgcaatcttctcgtcatactctaatgtcgtaatactctttctttaatcaaaccacaactgacctccagcattagccttttgatttttgaatgtcgtaatactctttctttaatcaaaccacaactcaacacccaaattggaatgtaaggttgcaaatgtcgtaatactctttctttaatcaaaccacaacccgcgtaaagctggactccgattttgcattaatgtcgtaatactctttctttaatcaaaccacaacttgttggtcgatttgataatgaacatttttaatgtcgtaatactctttctttaatcaaaccacaactttagctaacttctttagttgctctaattgaatgtcgtaatactctttctttaatcaaaccacaacctgtgtcacctgttttcgaatttcgcgcacaatgtcgtaatactctttctttaatcaaaccacaacccagcaataacaatatttaaaggaggattcaatgtcgtaatactctttctttaatcaaaccacaactagatctattcattttatgccgttgctattaatgtcgtaatactctttctttaatcaaaccacaacttaagtgctgtaacctaatcattgaaggcaaatgtcgtaatactctttctttaatcaaaccacaacattaaatcgtttttggtgttccatttgtataatgtcgtaatactctttctttaatcaaaccacaaccagctgggatactaaatcagatcatgtgctaatgtcgtaatactctttctttaatcaaaccacaacttacctcattgaatctatcctcaaaggtttaatgtcgtaatactctttctttaatcaaaccacaacaaggtcataccaataacgcgagtcgggtttaatgtcgtaatactctttctttaatcaaaccacaacatagcattaaaaattgtctcggtcattgaaaatgtcgtaatactctttctttaatcaaaccacaactccatctagcggtggatgagggattgataaaatgtcgtaatactctttctttaatcaaaccacaactatatttggggttatggcgcgttgtaacgaatgtcgtaatactctttctttaatcaaaccacaacaaacatcttgaaagtgatcgctccatattcaatgtcgtaatactctttctttaatcaaaccacaactacggcttagactgttcacgacctgtaacaaatgtcgtaatactctttctttaatcaaaccacaactttaattatcttatcaattgcgtttaatacaatgtcgtaatactctttctttaatcaaaccacaactgttaaagtgcgcaccgtctatttgtttacaatgtcgtaatactctttctttaatcaaaccacaactagacgaaatgacttgggacgctgcaactaaatgtcgtaatactctttctttaatcaaaccacaacttatgctagtgacctaagttatgagggaataatgtcgtaatactctttctttaatcaaaccacaaccggatggggtcattttgttaaggttgcacaaatgtcgtaatactctttctttaatcaaaccacaactgataaggttgcgaaatttgcaggtacttaaatgtcgtaatactctgtctttaatcaaaccacaacttcctaatgtgatggctaatgattgcatgtaatgtcgtaatactctttctttaatcaaaccacaactgtaatgtgaagttactttgaactgcaataaatgtcgtaatactctttctttaatcaaacgaatgataattattttcaatacgccatctgcgttttctgtttaacagtaattccgtctatgtcaaagaacaatccacactaatttacgattaattccgatatgatcaaaaaaccattaatttaaaatcaggtatttatacccttgttttggggattcattttcccgatttttgataatgcgttacccatctatggttgttgcccaaaacacatttccttgagaaaagtagagatagcaaatatgacttggtttatttttggcggtttaattatcgccttagaatatattatcgccagtatttttctcttatttacggtcgttggtgtttcatttgccaaagaaacgcttaaaataggctcgctaaattcaggcccctttggaaaacgtgtttaccaaagacgcaactttggtcaaccttccatcttcttaaatatcatttggattttattcggaggaatatggattgccttgtctcatttgattttaggaactgcatttgccattaccatcattggtttcccttttgcacaaaaacattatagaatggctgccattgcgttaaaaccctatggtgtagaaataatggacgattagcaaaaccctctcccctacaaagggtcaactttacagaaaaatataacggaaaaagtattattgcacctacttgcaacaaatggcaaagtagacatgcatttattgtgtaacatatattcacccactacatttgctattattttaaaaatagcgagattgactgtgcccgttcaaaaaactacaaaaccatttcttataccattcaaatattgaataaaatgaagcatcaatcacacattcccctaaattgtgcttagctttgtttgcgagggattgaaccaatatttgtgttgaactgttttaagaaagcagtgccacaagttaaggcatttcaattatcagaataataaagaatggaagtattaaaaaatatcaaacgcccaattataatttcaggcccttgtagtgctgaaactgaggatcaaatgatgcaaaccgcccgtgatttaaaggctacggggaagattaatattttacgtgcaggaatttggaaaccgcgcacgcgccccaattcttttgaaggggttggtgagattggtttagaatggctgataaatgcaggtatagaaacaggactacctgttattactgaagttgcaaatgccaagcacgttgatgcggctttaaaggctggatttaaaatgttatggattggcgctcgaacaacagttaatccatttgctgttcaagaaattgcggatgctttaaaaggcacagggattgaaatgcttgtaaaaaaccctatcaatcctgatcttaatttgtggattggtggaattgaacggatgaaaaatgctggcttagaagaagtacatgcgattcaccgtggcttttcgtcagttaaaagtaaaacttaccggaacgaacccatgtgggaaatccccttggctttaaaacaagagtttcccaacataaatttaatttgcgatcccagtcatattactggaagacgagctttattacaatccgtttctcaaaaagccatggatttgatctatgatggattgatgattgaatcgcacattgatccagacaacgcttggagtgatgcaaaacaacaaattacgccagcggttttaaacgaactacttggaaatttgattctgcgtacagtaaacacagataatcttgaagtcaatcaaaatttgaccgaattgcgaaattcgattgacggaatagacgccgaactcaacgaattaattgccaaacgaatggccgttgctacagaaatagggaattataaaaaggaacataacatcactattttgcaaccaaaacgttgggaagaaattcaaaaaagacaattaaaactaggattagaacatggtctttcttccaaatttattgcaaagtatttagaagcaattcaccaggaatcaatccgtcatcaaacagcggtaatgaataaataatggaagtatttatcgacgcaaatcagattataactgaggttaatattccaccttcaaaaagttatgcgcaacgcgctatcttggctgcggctttatcctataacacaagtcttttacaaaacgttggttcaagtgcagatgttttagccatgattgaggtggctaagaaattgggagctaaggttgaaattcaagatccaaacataagcataacgggatcaatcaatccgatagagcggaatttaaatgttggcgaatccggtttaggaatgcgattagtaacggcgattgctgcggttcttgatggcgatttcgtattagcaggagaaggcagtttgatggatcggccaatggacgagtttgcacgcatattacctcaattgggcgtggcgtatgagcaagttaaggatgcaggacattttcaaatttttggaaacgcacatccttcaaaaatagaaatggacggtgcattaagttctcaatacctttcaggattattaatggcattgcctttactagaaggtgattctcacatttttgtgcataagttaaaaagtaaaccctatatcaatattacgctagatgtgatggaagcttttagcgtacatgtggaacataaacaattttctcattttagtatttcggggaatcaaaactatcagcttgagcaaaccttcaaaattgaaggtgattatagtggcgcatcaatttggatggtccacggcgcattaaataatggtattttaattaaaggattaaacccgcaatctgttcaaggagataagcaaatgttgcaggcgcttactgtagcagatgtcaactataattggacgaatgatggtctaaaaataattaagtcaaccataaacccgtttcattttgacgctaccgaatgtcccgacctttttccttcattagttgtgttagccgctgcggccaatggtattagtaaagtcactggcacacacagattgattcataaagaaagcaatcgtgcactggtattgcaaaaagaatttagggaattgggtttagatattgaactcaaggccgactcaatgataattcatggaactggaacattaaaggatggaaatatacattcgaataatgaccacagaattgctatggctggtgcaattgctgcctgcttaacaaaaaatggaatcacagttgtgaatagcgaaagtgttgcgaagagttatcctgaattttggcaaaattttgaactttaacaggttgaattaattcgccacaactaacttctacattccaaatcaaactgaattacaagcataagttgataatttaatctaaatttgcgcaaccaataaatccaaaaaagtatcgctaaatcgaataactatcaactagaattagacgcctcacttgatcaggcgcgatacaatctatctaaaaacctaaccttattatcaactggtttattacttataattggcgttatctatttctttgagaatgacttatcggcatacttaattattgctggcggaataatttctttgatttcctatattgcaacagtgcgtactaaaaaataccgcactcccgtcatggttagtttaattctattgaccatgctcaatgtttttaacctatcgttgacatccaatttttatcatattggtgattatttttgggtaatttgtattgtaacatcagggtttttcattttaggcaaaaattggggaattctcctcatcattgttaacctttcagttatatacgtcattttctatatgattcgaattgagatggtagaacaaataccaaagccgttcacagattttagccaaatgaactttttcattaatttatgcatgggtggtgtcctattttcatttttaattattcagtttttaaaggagaataaggaaatggcgcagaaatacctcctcgcaaatagtgaattgcaattaatgaatgaagaaaaaacggtgatgcttaaagaaattcaccaccgcgttaaaaacaatttacaaatagtaacaagtttgttacgcttacaaacgagtgacgttgatgaccccaaagttctcaatgaattttccgaagccatagatcgtatttctgctattgctaaaattcacgaaaaaatgtacaataataagtcactcaatcaaattgatttatccgaatatttagaagatttaattactgacttgctcacttcttatacagacaaaaacacgattcaagctgaaatcaactcgaacattaattttattccgcccaaagaccttgtgccaattgctttaatttttaatgaattagtgaccaactcggtaaagcacgcatttaaaaatcaagaacacagcaaaataataatagacgcatttattacagatgaaaatcgcgtaaaactctcctattcggacaatggaagttgggctgagccaaaaaaagtatcccaaagcattggactagatttaattgaaagttttgttgagcaattagatggcacttatgagattgataagaccaacggcactaaatatgtgattcattttgtaattaaagaataggtgttagtcatttgtcaaaaaaaataaaattactcattgataattgcttttaatcttttaagtctgtgaaaatctcctcagcatgttcgaagataatcaaatggccttcttcaggaaacaacttcaatgttgcatttggaatttcatttctcatcaattcagcccatttatgaggtacattattatctttttctccttgccaaaatgcaattggtacctgaattttattcaagttgaattcccaatctctcactaataaccgcgaaatttcataggccacaccttcgcttccatttctaaaagcttctgtaaacatctgttcaataatacccatgactgcgtcattttgcaagatttcctgatctggttcactcatgatttttaaaaaccctttaagtgccttttttggatttttcgagagttgtttcgcttgaattctgagcattaacctcaataaaaaaggaaaacgtctagcaaggttaagcatgattttcacttcttttgaaaggtgctttttactctggtcatcataaggagcaaaaccactgattattgcggttttgcggacgtttcttggaaataaataggcgattccaagcgcaaaaggagaccctgcagacattcctgcagctgaaaaagattcaatttttaaatgttccgttaattgctttacgtcctttgcaaaatcaagaatggtgccgtctggattaaaatccgaaattccatgacctgggcgatcaattgttattattcttaaatcgttctcaatagcaaatgacatatcataatgcatttctaatctggaactttgagaaccgtgacaatagacaatcggataacccttaagatttccgtactccgcaaatcctaatttcctgccatcttttaaaatgatttgttggttaataatactcatagttgctatattcaatatcttatcagcgttaaataaatataagcatttagcttgttttcgctatgcgccgatatttattttgcgctaggcatagttattcgctagtatagttttaaaagatatatgtctccgtttacaattggctccagtctgttgacacaataattacaatttgtaagattgtaagtgccaaaacgctccatgccataattcgacctgattttgatttgggtatcttaatccagaataatacaacaaaacaatacatgaacatgaaatttgagttcgatatattctcaattcctttcacattttccttttgccacattcctgtataattcgggcgcatttttataggctttgaaggatgcagtgcgttataggttttccagtttaaaatgaccttaataagatgaataattaggatgaaaataaaattttacattaatccattgataattgcacattcaatttctaaatccccaaatgcttggcatggacagaagtcttcctcgggttccaaggatcttgataggactttttaaagaacaattcttgaatgtaggcaacggttctaacaacccttaaataaatcccgaaatagaataccatgcaaggcaa

SEQ ID NO: 965 - DNA, 11309 bp, synthetic construct
  misc_feature 1..11309: note = Synthetic
  source 1..11309: mol_type = other DNA
caactccaggttgcaggaaaaaaacgaatgacagcctccgacttccttaacggcacggacatccacggatggagccttgcctgaaagacgctactgccgtaataacctccctacacagcaggcttgtactgacgcgcatactggcgcagagcctcgattacttgtggtttaactgaaggtaggttcttgggtagtggtaatgccataggctataggattaaatacaacaataaaacgatatcccacggcataatattgtgcagaatattgggaatttgcataattttttgcaataaaatttgccaaattcttggatttctcagccaaagcacatatatttgcatccgacttcgcttttctgcttagtcacacagcaatttgaaacaaccctaaaaacgacaagcctatagattagacattactccagaaaacaaactatactgttagtatgagtaatctcaatgctatgtccgaccaccagctggtggaactctacatgagcgggacagatcaggctttcgacgaattgctggctcgtcaccaggaacaccttttcgcatacatcatgcgtctggcccacaacgaggatcaggccaacgacatcttccaggagaccttcataaaagccatcaccagcctgcgctccggacagtaccgcaccacaggcaagttctgcgcatggctcatgcgcatcgcgcacaatataacaattgatcgtgcacgcgcaaagcgcaactgtcccgacctcagcgaggactgccagcacgacatgatctacaacaacatcaacctcagcgaggaaggctttgaaaaggacctgttgcgtatgtgcgacaaccagacgttgtacgcccttgtctccaccctgcccaaggcacagcaggaaatcgtacacctgcgcttctgggaaggactcagcttcaaggagattgcagccatcacaggcatcagcatcaacacagcccttggcaggatgcgctatgcccttatcaacctgcgccgtactgtcaacgaacgcgagctcaccatcgcagtctgatacaggcaatacccactttcacaataccggattatttgcccatggggatgtgccgaacaggtacatccccatttcttttttcaccatcgtaaagcatcgcatcaacgggttagacaaaaccgtccccagaaaaccatcacctgctctgtccatggtaacgcctacgcactccaagcacgtaatactttcaaaaccagcacattaaccaggcaaaagatacgacactgacataaccagctgaaaaacaggcatataaaaggtatatcaaagaaccatcaactattgaagaccgattggacaacaaataaacaacaacataatacatgtgtgtctcgcgtatcgttctaatcacttagctccccgttttgtgctgtttaacaataattaaccaaaatggaggagaaatttaaaagaatctgaatatctttggtctgacgaacgctactactttattataaacagacctaaccccacaacactatgagaaacattcttttcacggtagtatcactactaatctgtacagtattacagacgaaagcacagaccaatgtcgaagaacccgaatacgaacttgaggcatatcttatggcaacagactctacactgggccagcccctccccctcgaaaatgcatacatcaaggccaaggcagcagccagcatgttcattgtgggtatcggtaaagccaaatcctactattatgtcaacggcacagccagcccgctgaaagtcaagcagtccgactatatcgtaataaacaccggcggcaagtcacccctgcagacacttaccatcaaccgttttgaaatccttaaatccaagagacgcttccagaacggacagataggcaccttcaccggagcacagtttggtacagaaggaggcgagagtttcaagtacaagaaatacggaaaggacagcgtcaagattccactgaaagacctgcagccaggcgaatacagccttatggtcacaaacaagatgacagacaacaagtccgcaaagatatacaccttctgcgtagaataagacaagccgtcaaaatcatcatatacaatccccggcccattttggaccggggattgtcgtttgtccggacggccccctccaatcccgacagtttgtcgctgtttctgccagacaatgtttaaggaagtttaaattgagaaagcaaggtttaacgcgatttaaatccgctgacataatgtccagccggttgtatccgggtacattgattgcgatatgatgggtgtaaggcgcaagacttacaacgagattgaaaaaatagaagttaaactaataattggaggacaaaattatgttaccatcagtttattcagcaaacaagaaccacagtttcttcccatcattgttcaatgatttctttaacgatagtttcctgatgcctcagttccacagcacatcacctgccataaacgtttccgaggacgagaagagctatcaggtcgagattgcagctccaggcatgagcaagcaagacttcaacatctcgctgtccggtgacgagattgtcatctcgatggagaagaaggttgacaacaaggacgagaacaaggacaagaacaaggacaagaagtatatccgacgcgagttcagctacagcaagttcgagcagcgtctggccctgcccgacaatgtagagcgcagcaagatctctgccagcatgaccgacggagtgctgaacatcaacatcccgaagatgactccggatgagaaggcacaggtatgccagaatatcgaaatcaagtaagcaagaacacgacaaccagccacgttgtctacatacccatgagcggccgcacacactacatcagtgtcgtgcggctttttcgtttgaaagacgtcttagtaaaaaatattttatatatttgccgaggaatctttataaatacccaataaaccactgcctgccatgaagaccagactgatgttcctgccatgtattggagcatgtgccagcgcgctggcacagaccacagaccgacccaacgtcatactgctcgttgccgacgaccttggttacggagacttgtcctgctacggtgccaccatggtcgagacccccaatgtagacaacctggcagccaacggcgtccgcttcacggactgccatgccgtcgcatcgaccagcaccccgtcgcgctattcgctgctgacgggagaatactgcttccgccgtcccggaacagacatagctgccggcaatgcaggtatgattatacggccgcatcagtatacgatggcggacatgttccacagcgcaggctacaagactgccgccataggcaagtggcatctgggacttgggcttgagaccggccagcaggactggaacggagagttggacgccacccccaaagaccttggctttgactatcattacctgatggctgccacgtcggatcgcgtgccatgtgtgtttatagagaacggcaggattgccaactatgaccccgatgctcccgtgtatgtgtcgtaccagaagaactttgacggcgagcctacgggagcaagcaatcccgagctgctcactaagctgaagccgagccacggtcacaaccagagcatagtgaacggcataagccgcatcggatacatgaagggcggcggcaaggctctgtggaaggacgagaatcttgcggactcaattatcgcacactcggttaaattcatcgaggagaacaaggacaacccgtttttcatgtatctgtgtacaaacgatgtgcatgtgccacgctatccacacgaccgtttcaggaacaagaatgccatgggactgcgcggtgacgcaatcgtgcagtttgactataccgtaggccagatataccagacactggaaaaactgggacttgcagagaacacgctgcttgtcattacgagcgacaacggacccgttctggacgacggatacatcgaccaggccaaggagaaagtcggcacccacaaacccggcgggccatggcgtggcggcaagtacagcgccttcgaggccggtacggcagttccgtttatcgtacactggccggcacgaatcaagtccggcaagacctccggtgcactgatctcccacattgacaacctggctacgtttgccgagattgcaggtgtccagattccggcaggtgcggcatacgacagccagagccatgtaggaacatggaccggcgaggacgaaaacgacagggaatatgtcgttgagatgtcccaggcacgcagccttggcctacgcaccaggagatggaaatatatagagccgtccaacggtaatgccacacagggccagacaggtattgagaccggatacaagagtactccgcagctatatgacatttctgccagccggtacgagaccaccgacgtctatacgacacagtccgaaacagcagcgcgactgtctgccctgctggccgagaagcgcatgccgctgaccagtgctgacacctgtttctactatcatctatacacacccgagaggaacaaccgctatgccacagctacagggaaaagcaccggaataaacggaacggagagtcccgacggccaggcgtcgcaatggatgtttgtcctgcgtcccgacggagactatgacatcgtaaaccgtgcctacaaatcatatttgcagccaggagtggtccaaaagcctgcactgcaggtaaagacaggcacaaaatctccttccactggatggaaactgaccacaagcggccagatgagctgtctgtttgtcgtagtgaacggcaattcacagataaaccaggccctggcatcccgcaactggatggtcgtgaactggggcgacggcacaaacactacggatgccggatgccgctatgccgtggtcatggccgatgccgaagtaagcgaaaatattcccgacggcatcgagaccgtggaaataaaggccgacaatctcgtagtccgtgacggcaagtttatcctgtccgactcgggcaggcccgtagatgtcttcaccatagacggaaagcgcgtgccggccatcagccgcagccgcatgcatggcatctacctgatccgtgacggccggcatacagcaaaattgatattgtagtaaatcaggcataaagaagggcgagttcccccgccctgaatgtcttcacaacggaataatccttattgtgaattgccttaaaaactgggacaaagataaggagttaatctgaaaccgcaaaaaataacaagaaaataatatatgaaaaagattctcggtcttgacctgggaacgacgtcgattggatgggctctcgtaaacgaagctgaatctgcagaagaaaagtcttccataatacgtatgggagtacggttggtaccactggacaattttaagaacagcgaaggtaaagatatcaagcaaaagaaagaggatgccttctgtgccggcataagcatgagcacacgtgcagcacgcaggaatgcaaggtcggcaaggattaacaacgaaagatacaagcagcgccgcgaggaactgaagaaaatattccgctcggcaggctggattgagaatgacaccccactatgtgaggatggcaagggaagcacatacgaactgctgcgactacgtgcaaaggcagtttctgaggaggtgtcgttggcagaactgtcacgcatcctgcttgccataaacaaaaaacgaggctacaagagcaacaggaagctgaaggcagccgatgaaggcgaggccattgacggaatgacgctggcccgagaactgtacgacaaaggtcttacaccagggcaatatgtgtacaggcaatttcttgacggcaagaaatatgtgccgcagttttacccgtcagacctgaagtcagaactggaaaagatatggaatacacatgttcctgcctttccgcaactgactgttgacatctgggataacctgctgggtaaaaacggcaaggcaacatgggcgattctcgacgaggctctacaattggaaggtatcaagaaaccagacaggcagaaattgtacgaatggcgtgcatcggccgtgacgacacccttggacaaagaacagttcgccactgtcgtacagatgataaacactgagatttccaataccagcggctatctgggagaaataagcgaccgcagcaaactactgtatttcaagcatcagacaatcggccaacacctatggtccataatacaggacaatccgcacacatcgttgaagtgcaaagtattctaccgtgaggactacatggacgaattcgagcatatctgggagacacagtgtaaatttcacccggaattgaccgaggagctgaagagaaagatacgagattgctgcattttctaccaacgtcctctgaaaagccaaaaaggaacgcttgacttctgcacgtttgaacgccacgagaagaagaagaccatacacggcaaggaggttactgtggtggaaggtctgaaggtgtgcccgaaatcatcacctatatatcaggagttcaggatatggcaggtactgaacaacctggaactgatagacaagagagcctacactgtgcgtccgctgacacaggacgagaaggaaatcatatttgcgcagctgaacatgtcagacaagatgaccaagaacgaagtcttgaaactgattgtaagtacaccacgcaaatatgaccttaactacgaagtactgccaggcaacaccacacgcgccagaatgtacgaggccttcgtaaaaatgctgccagtaatcggtcacgacgagatagacctcaaaaaggcaagagcaaaggatgtcgaagcagtcgtacgtggtgtatttaaaacagtgggcttcaatactgcgatacttgatttcgatgcgacccttgaaggtgaggaattccaacagcagccatcgtatcgtctgtggcatctgctgtattcgtccgaaggaaagaacttgaaagagaacatcagtgacctgtgcggcatgggcgaatatgacgagtgtgcaaaaatactgtcgaagatttcctttgtcaacgactacggcagcctgtccacaaaggcaatacgcaaaatactgccacacatgaaggcaggcatgaaatatgacgaggcatgcgagaaagcaggttacagacacagcccacgctcgctgacacgcgaggaacgggacagacgtgtcatgccggacctattgccccagtataggaatggttccttgcgcaatcctgtcgtcgacaaggtcctggcgcagatgacaaatgtggtaaatgccatcatacgggaatatggcaagccggatgaagtgcgcgtggaaatggcacgcgagatgaagaaaaatgccagtgagcgtagaaagatgagcgatgcgatacaggagaacacgaaggaagcaaaacgtatcagtaagctgctgaaagacgagttcggcatacaaaatgccacgcgcaaccagatactacgctggcgtctgtatgaagaactggcattcaacggataccacacactgtattccaaccaacccatcccacaggaaaaagtcctcactaaagaaatagagatagaacatataataccgcaggcacggtactttgacgactcgtttgcaaacaagactctggaatatgcatctgtcaatctggaaaaaggtgccaatacggcatacgactatatctgtggcaaatatgaccaggaaaaggtagaagaatacgagaaacgcataaacgatgcattcgtcgacaaaaagatctccaagcgcaaacgtgactacctgctgatgaaacaggaaaatataccagacgacttcgtccagcgagacctgcgcgaaacgcaatatattacgcgcaaggctctggagatgcttgagagtgtcataccttctgtcgttgcgacctgtggcagcattaccgactatctgcgcaaggaatggcaattgattggcgtactgaaggaactgaatgccgacaaaatcaaaatatctggacttcaggacacatggacgaaacgtgcagacaaccgccatcatgccatggatgccctgaccgtggcgtatacaaaacgcggtttcgtgcagtacctgaacacgctgaatgcacactacaacgaaggcaagccacgcaagataacgccgccgatgcctgtaggcgaactgcgacatagtgccctgctgcatctgggcaacatcctgatttctgcacgtataagcaaaaaggtcgctactgcccactacaacaaaaagacgggacagatgtgcatgacgccacgaggtccgctgcatgctgaaacatattatggacgtgttgtaatagatggagaacctgtgtataccacacgaaaggttgtagatgacaaactggatgtctcgctcgtagtgaatgagcgcgtacgcaaggttttggaacacaggcttgccgaatacggtggcgatgccaagaaagcctttgcagccctggatagcaatcctatatggctggatcgcgagaacggcatttgcgtcaagaaagtgacgatacgtgccacccgtgtgaaagagcctatccccatacacacaaaacataatcatcacggactgccggtgatggacaaagagtcaaaccgcataccttgtgactttgtagctccggacgccaaccatcatattgcattctacaaggatgcaaagggcaaactgcatgaaaataccgtaacattctttgaggcattcgagcgcaagcgtcaaggtgctgacgtcatagacacgaactacaggaaggaggatggatggcaattcctgttctcgctgcaaagaggggaatatgtcatcctgcctgacaaagacaacggctttgcccccaaagactacaatctgactgacccggataatctggctataataagccgacatctgtttatcgtgcagaaattatcaaaaaaagattattggttccgacatcatctggaccccacttcagatgaaatagcggaattgcgtggaataaactgggagagaatacaaagtatttcaaatctggatggtattgtaaaagtccgcatagactcgttaggccaaatcaaggagacaacattgctggaagtatgataaaacgcacgctttgcttcacaaatcctgcatacctgaccctgcgcaacagccaattggtaatccagttgcctgaagtccagagtaatgatacgctaactgatacgttcaagaaagatgcggaacgcaccatacccatagaggacataggagtggtgatattggacaacaagcgtataactatcaccaccggggctatggaggcgctgcttgccaacaacagcgccctgataacctgcgataaccgtagcatgcccgtcggactgatgctgccactatccggcaacacattgcaaagcgagcgttttgccgaccagatctctgcgtcactaccgctaaagaaacaattgtggcagcaaactatccgccagaagatattaggacaggctgcaatgctgaacagatatactgccgccgagacaaagtgcatgacaaaatgggcaaacgatgtacgcagtggcgatcctgacaacattgaggcacgcgctgcggcttattattggaagaatatattcacacagcatcccggttttgtacgtaacagggacggtgagccgcctaacaacctgcttaactacggctatgccatcttgcgcgctgttattgcccgttcgctgacaggcagcggattgttgcctacattgggaatccatcaccacaacagatacaatgcctactgtctggcagatgacatcatggagccatacaggccctttgtggacgaggttgtgataaagattatgcagaccgtgtctgactatagtgagattacaaaggaaataaagcagcaactactgattgttcctgtagtggatgtagtaatagacgggaagcggagtccgctgatgattgcggcacaacagacaacagcctcgctgtacaagtgttttgacggagaactgagaaaaatcgcatatccggatttctgacgaatatcaggaaatactcccataccggtccttaaatgaaaatatacaaaattgtaactttcttcccccaaatagttgcaagataagacaacttttcatacctttgaatccgtggaacgtaatataaaaacatatggcggctatttcgagacctttcgacaagggaattaaaataaaggaggcatactatgcagacaaacaatcacaaaatctctgacttcgaccagatactggataccaagttcggtaagccaggcacttcgcaacgggcacaggcagaagaagctgcatacaacttttattccggacagatactttctgacgcccgacgtcaagcacatgtcactcagcaggaaatagccagacgtactaataccacaaaatcctatatttccaaggtagagaatggtatcatcacacccagcgtcggctttttctatcgtttcatcaatgccataggcatgagggtagaagtcgtcaaaccaattttatgaccgcaaaaacgagacttaaataatatcaaaaacaactgtattcatcacactgaacgtatgtataaggttgtgaattgctttaaaaacaagacttaaataatatcaaaaacaacaacaccagcggcgcgaacaaccgcacgaaggttgtgaattgctttaaaaacaagacttaaataatatcaaaaacaacatcgttgcgatatgcaaccgcagcattttgttgtgaattgctttaaaaacaagacttaaataatatcaaaaacaacaggtgcaggctgcgcaacgggggaagcgtggttgtgaattgctttaaaaacaagacttaaataatatcaaaaacaacattcagcagcataaccacgaagtgatgatagttgtgaattgctttaaaaacaagacttaaataatatcaaaaacaactcaatagccatatatggctgtaaaacaatgggttgtagatattattagaaaagaaaaaagtatgatttggtattattgtatcccaccggttgcggtgggatttttttgttttggttgtttttcgggaattattgtgtacctttgtggtgtgatgatgaagagaatcaggtatgatattctggacggcctgcgtggggtggctgcgatgatggtgctgctgtatcatgtctttaacgacgcaaagtgtttttacgttgcgcctgtatatgaattatttcatggtttcctgggggtggatttctttttcatcctgtctggcttcgtcatgggatatgcctatgacggaaggttgcgggacgggatgaccttcggcagtt

SEQ ID NO: 966 - DNA, 23237 bp, synthetic construct
  misc_feature 1..23237: note = Synthetic
  source 1..23237: mol_type = other DNA
gctttactagtaatgttgaattgttttcttaatgtttttgtactcttaccaacatatggtgcaactttatctttaataagttcttctaaagattttccttttatttcaataggatctttaatgattgctttattatttttatttccaataacgtagtttctgagtatcgtagtcatgaaactagctttaaaagaaaaagctctttgcttagccctttttttagagtagggctggtctcttaatgaattgtgatttttacctttagtacacgcagctaagtaattagtcaagccttcacttaattcttctgctttgccttgttttacatattttttaattgtttcccaatcattttttatgacttcataatctactggagatttttccatttgatacatgattacatatttaaaaaaccaattatctttagaagtttcattgatatattcatagaatgcgatttctaagttattatttttattcataaaatggctgtgttcaaagtcttcattaactagatcaaaataatttataatatttaaaactaaccgttccttagcactatattgagccttgccatttttagttgtttttaattttttaaagggtgtagcttttaattcggctacacctaagtctggttgactagctgaatctttttctttaccgaaccatttttcaaatacatcgcccatagcatttttgttacctttgatatgcatgttcaattcttctactaattctttttgaggcttattcaatatctggatagccttgttatgtacttcttctttatttttaaatttcacttgcaacacctcatgttatataaaaagtttgatcttttttcgtacatattatataatagtacataagatttcactaggaatggacggtgcaaaatgactaaatcactaaaagtattagaattattcgctggagttggcggatttagagttggttttgataaggcagacgctgatttctttaaaactaaatgggctaatcagtttgaaccctctcgtaaaagtcaagacgcttttgaagtatataactaccattataaagattccgataatataggcattgatatcaatgatattacggatgataaatttaagtctatggacgccgatatgatagtagggggattcccatgtcaagactattcagtcgctaggtcaaagagagatgaattagggattcaaggtaaaaaaggggtcttattttggcaaattataagagctgcccaagacattaatcctaaatatatgttatttgaaaatgttgataggcttttaaaagcaccatctaaacaacgtggtagagatttttcaatcatgttatcagctttgaacaaacttaattattctttagaatggcgagttattaatgctgctgattatggaggagctcaacgtagaaggagagtttatttatttgtttttcgcaatgatttatcttacgctaagcatttagatgatgagtacgaaagcttttttatgaataacgatgacacttatgacgaatacctatttaaaacaggcctattcgctaaaaactttcctgttaaatcagtaccttacaaggatagaaaagccttctatgagttaccagaagacatagttgaagtttcagacgaattttcaggtaaagtttttaatactggcatcatgcgacacggtaaatattatactatcgacactcaggctttaggcgatgaaaaacctaagccattaaaggatattattcaacctgaaagtgacgttgacgataaatattatgtggctgatgaaaataaaattaacaaatttgaatatctaagaggttctaaaaaaatagaacgaactagtgcgaacggacataaatacatctacagtgaaggtggtatgtcaccgtatgaagatttaaacttgcctggtcgtactatgttaacttctgaaggtaccgtgaatagatctacacattggctaaaaataaataacagataccgtacgttgacaccgattgaagcagaacgtatgcagtcatttccagatgattggactaaatataaattagttgacggtaaagttgaagaagtttcagatagaatgagaatgttttttatgggtaacgcattagtaactgatgtggttaaacgtattggtttgggaattaaagatattgtaaataaatatgatgagtaataaataaagacagctaataatatagctgtctttatttattataggtaataggtatttatttttctactttacataacgtgtattatgcgaagttgtcatataattattttaatgaccacttgtaactttaattccaataattccaacaactagcatgacaataaatacccaagtaattggtgaaatctggtctttaaataaaacaactcctacaatgattgatccgactgcgccaataccagtccaaattggatatgaaatgcttagtggtaagtgtttaatagctaaagctaagaatccaaaacttaaaaccatgccaacaaccgtactaattgaaaataccaagttggtaaatccattacttaatttcatggtcgttgaccaacatacttctaataacccagcaataattaaatatatccaagtcatagtaataattcctcctaaaaataaaaaactcaagcaagctcttctatgacctaatgagcttgtttgagtataagttacccggtggcaactgatttattacgagtattataataaattagccaacagttatcaatataatttgattagtttaatgttttcgaaacatttgtcatattaatagcttagtgctaatatttattttcaaaggagataatcaaatgaaaattaacgtaccattaatggacaacggttatctagatgataaatatactaaacataccactgcagaaaatattgtaaatggacttcctgctgtatcatttcctattgatattgcggatgtgtctaacaatgctaaaacattagctattacactaactgacttggatgctattccggtctgtggatttgaatggattcactggattgcagctaacgtgcccgctgattgcactcatgttcctgaaaatgcaggcaaagaaaatccattaggctggaatcgtggttataatagtttggctggtcgtttattagaccgcaaagatgatccacttagtttaggatttgttggccctgcaccacctagagatattcatgattatactttgactgtctatgcactagacgaaaaattacccctagccgatggtttctggtacaacgaattgttacacaccatcaagggccatgtgctagataaagctactttagaactaccagttaaatcataaaatttacgaaatgaactactttcaattaattttgaaagtagtttttcattttgtttgacttcgagtttactcgaagtattattatcgtaatatcaattgataaaggaaagattttcatggaaaaatacacaatcggcgaattcgctaaaaaagtgggattaactacctacaccctgcgttattatgaacagcaacaattaatcatgcctagacgtgatgaccatcaaagacgttattataccgatgaagatgttaaatggctgggctttttaatatgcctaaaaaatactggtatgacaatgtctgaaattggtgaatatgtacagttacgtagtcaaggtgataagacgatggaagctcgaaagaacttgttagcagtcgttaaaaaacgtagtgatgaccaaatcaaggacatgcaggctaatttaaaagtagttaagcataagattgattggtacaacggtaaaatggactgttcaattgaccaagatgaagattttgagtcctacttagcacgatttaataattaaggagataattaatatgcaaaatgaaaatgaagttcacaacactacttttcctatgggcgataaaaataccgcttatgctaaattttttacaggacaaagctacctaaatggtttggttgcacccgctaaagatgtgaacgtgggcgttgggaatgtaacttttgaaccgggttgtcgaaataattggcacattcaccatgatgggtaccaaatactattggtaaccgccggacaaggaatttaccaagaatggaataagccggctcgcttattgaagcctggtgacgtagtggtaacgcatgatggagttaagcattggcatggggcaatacaagatagttggtttgcacatgttgcaataactgctggtaatccagaatggttatcccctgtttcaaatgatgaatacgttaaagcaaatgccgaagtaaaggagtgattaatatgaaaaaacaagatgccggtcgtaaaatgttaggtgatttagcccctaaatttgctgaattaaatgatgacgtattatttggccaagtctggtcacgaacggataaattatcagcacatgatcgtagtatgattacaatttcagccttaatctctggtggcaatctagcccagctacccgcccacctaaaaattggtaaatcaaatggcattactaagactgaaatagtagaaatgattacacatttatcattttacgtgggttggcctaaagcatggtcagcttttgggatggtcaaagaaatatatgcttaaaacattgacacttcacttgatatttataatttaagtattagaatacaatcaattataagtacgtatggaggtttttaatatgtcagaaaaaaagctaaatattctattcattatattcttattagctagtctaggctttggggccctttttaagtatcaaaataacaatttcctcttagccttgtcggtagcatttgccgtagcgtcatttgttattttggttatctgggttattcgtttagttaaactaattctaaaagctcataattagttagcgagtcacaaaaatagttcaaattcaatcttgaatttgaatccagatgtttgtatattttacaggaacttaataatttaaagattggagaactataatgaaacaattaagaatatacactttaaaagaccaagctgctgcccatgaatatctagaaaatcattggactaaacacttagttagtctacctaaattcggcattcacgttgaaaaagtgtttggtgaaaataatcctagcggaaattgtcgagtattcgccctagtatcatctagtcaagataacttgcatgagctcaacgctaaatatatgcaaagtgatgctttcaaagatgatatgcaaggctttgatatgactaaaatcgtcagcgttgaagatgttgacttattccctggtgaaaatataagtaatttattctaacgtgagtagcttaaacgtcagtaaacatgtcgttaggtttaccgtgacattgcgttaagtattcatttgaattctcttcaaaaaatgtggtcaaagcgcgcatgatgtatgcatttacattgtgtgcttttttattagcattaataataatggatttaatcttggtagttaattgttgattaatggatgcattcatttcaaatcggagcgctccatagccattctcacaccttttagcctcttgatagacaaagtttttagctttgaaaatgagtccagcatattcgtataacttctgtcgactaccaaatgcatacacttttaaaatattgactaatttgggtgaaaggccccctttttcaatcagactatcccccagaacatctaattcatcagcggcttgatatttttcaggcgatggtttggtgtcatctgtgtcatttgtaaattgattagtatgattaagttcagtctgattataatcgcattttgaacttttaggctcttcatgatggcgttcgtgcgttttaggtaaaataaaatgtggcaaaaagacacggttcggagcattaaattgttgtttcaaaacaatccagcctagcttgactaagtgtttacaaattcgcgtgattgtcgacatgctcaaattaatacgttgagccatttcttctctagtataaattacgaaatatccattatattttttgtcataaaaattattattttgaatacttaaatgcatgcgatcataaagatgcgttaaaattgacacttcattaggctttaaaccggcttcttcaaagacgtggtactgtttataaaattgtgtattagtcatatttctatcccctatatagatagaaaaaggtgcacaagaatagacttgtacaccttatattatgtaatatattgaaataacaccgtaaatgtcatataataatcaagcattagcagaattatctgttgtgcatttagggcgttaaacggtgagcaagtagttcaggtacttgttagctgatagataattactaccaataattatttatcaacgctctttttctatgtgattttttgttgcgcaagcagtgaaattactttttgcgtatatagatactttatagaaatagttgttgaatgtcaatgtttttatgtgatttattttaaataaaatattattggtaaaatataaaaattcttataaagtaaaatttgctgttttacgtatattatagaaattgtgatctaagattttgatgcattaatacatttcaaatacatagatgttataatcacagctttcggtttagtaaacgccattgtgttattaatacattacaaatacatagatgttataattctatctttgtgttcgctcattttttatcgttattaatacattacaaatacataggtgttataattttctcattactatctgccggaatgaccgtgttattaatacattacaaatacataggtgttataatagcaaaacccaactgttgtcttgtttctgcgttattaatacattacaaatacatagatgttataatatttaaaaatattgtctagctgcttatccgttattaatacattacaaatacatagatgttataatattcgagtagaacaacccatagttcgagttgttattaatacattacaaatacatagatgttataatccacttgatgtggtagttatagtgagttttgttattaatacattacaaatacatagatgttataatttgttcagcaagcttgatgatgtcctcgacgttattaatacattacaaatacatagatgttataattttgcagttgtacttgtggtagtggttgaggttattaatacattacaaatacatagatgttataatatacggactgggcttaaagtttgaatttttgttattaatacattacaaatacatagatgttataatatagcactgcttatagtcatttttatagcagttattaatacattacaaatacatagatgttataataacgttattttctgaccaatcagaactgtagttattaatacattacaaatacatagatgttataattttgcgataaaactatcactaacccaagctgttattaatacattacaaatacatagatgttataataacttacagtatgccgagcgtacagccgaggttattaatacattacaaatacatagatgttataattgagtttgtaacatgattatcaaccagtcagttattaatacattacaaatacatagatgttataattgtcgtttatgtttacgtgttaaatctctggttattaatacattacaaatacatagatgttataatgcctaaaaaccacgttattggtatggtttcgttattaatacattacaaatacatagatgttataatactatcttttaaaaattcttatgtatcaacgtttaattgctttaggatatgaaaatatttttatatagttgtgtatattttgttaattttggttttcgtgtttaaaataaacacagtaatgtattaataataaagaattatccatatgataatttctgcaaagcaacagccgcatccactgtttaagatagtggcgactgcctttcttacatattgtttaaggatttagttttatctttttgttattgatacattttcatatttgcattaacaattcttagtgttataatttacttgtaatgtattaataataaagaattatctatgtgataatttctgcaaagcaacagccgcatccactgtttaagatagtggcgactgcctttcttacatattttaaaatttaatcttatctttttgttattgatacatttaagtatttcatttgtgtattaataataaagaattattttaataataatttctgtaaagcaacagccgtatccactatataatgatggcggctgtcttttttctttttgaactgattgatttacatatataaaaccttattgatatgagttattaatacattacaaatacataggtgttataattagagttgttttagacgtggaaagtccatcgttattaatacattacaaatacatagatgttataatgatactcctgttctaatgtacttgttatgtgttattaatacattacaaatacatagatgttataattaatgatttgagagctaaacaagggctaccgttattaatacattacaaatacatagatgttataatattgtggttaaaatcgcctgacaccagtacgttattaatacattacaaatacatagatgttataattttagaaacgccaatatgaacgtgcgcaccgttattaatacattacaaatacatagatgttataattgctcaagggactactgaaacgaccactttgttattaatacattacaaatacatagatgttataatatggtttcgatcaagacgctttaaagcaaggttattaatacattacaaatacatagatgttataatttaaagttattactatctccagcagaattagttattaatacattacaaatacatagatgttataattgtaatagcgttcaaaaggttctgcttatcgttattaatacattacaaatacatagatgttataatggtggtgtaattttataagcaattgaaccggttattaatacattacaaatacatagatgttataatgggttggcttttgtcgtcaatgcccaaagcgttattaatacattacaaatacatagatgttataatttcaacttcaataaagtatcggcgagcttggttattaatacattacaaatacatagatgttataatactaagctagttgctgtactaggctggcttgttattaatacattacaaatacatagatgttataatattggcggaattatcatgtctggcattgctgttattaatacattacaaatacatagatgttataatcttgccaaacttttttagtggtggacttatgttattaatacattacaaatacatagatgttataatcgaccagagttgaaccatgagccactgccggttattaatacattacaaatacatagatgttataatttcattttcattaacctttcaataagttcagttattaatacattacaaatacatagatgttataatccactataatcgtatatatcgaccataaagttattaatacattacaaatacatagatgttataatcaacgtttctatatgctttatgtgtagtttgttattaatacattacaaatacatagatgttataattgacagcctacgctatgtagtgatgtatgtgttattaatacattacaaatacatagatgttataatactaacttttaaaaatacttatatatcaatgtgtaagcgtctttaaatataaaaatatttttaatatagttgcgtatattgtgttatttcatattttgtgtttaaaataaacacagtaatgtattaataataaagaattatcttaatgttaatttctggagagcaactgccgaatctgttgacacgaatcaatagcgacagtctctaattataaagatcagacaagttctggtctttttttattgcaatattaaataaaaatgctagagttgaaagtattagctaataattagttaattaataaataattgtggaggttacataatgcataaacattataaatatgcgttaggtttagatgttggagttggttcagttggttatgctctacttaaactagatgaagctgatcaaccttgtggattgcttaaggctaattcagtgacttttccaatgtcccaagaccgcacaggcaatactttggcatccattgctcgtaattatcgaagtggtcgacgtttaaaccgtcgtcgtaaattaagaaaacagttagttagtaatttattcactaaaaatggattaataaatcgtaatgatgtatatagtccttatactaagcatcccaattttgatttatatcggatttggcatgatagttttaatcagcaaatatccaatcaagatttatatcgcctactatattattttgccggtcatcgtgctttcaagtctaatcgaatccatcaactaaaaagttctggtgataaagatacgactaagctacttagttctattgacaccaataaagaatattttaacaatagtcaatataaccatttaggtgaaatgttttactgtgaccctaaatttgctcaacgtaaacacaataagggctatgatgatggatatttattcaatattgatcgtggtacgttgttaagtgaaattaaagagatattaaatgctcaatcaaaatttggaaatcctgctatcaatgatgatttcaaagctcgatacttaaaaattttgagtcaacaacgtaattttgatgttggccctagtaatccatctagatttgctttagttgacagttcaggaaatattaaattaaggaacaaaaaagataaattaaatttatcattcaaaactagtgctaaagccagttatacttttcaaaaatttcagattttacaaaagttagctaacacccgttataagttaaattcacaatccaaatatcaatctctcaatgctgaaaccattgataagatttttaataaagctataacgaaagctaactataaatatagtcaacttaaaaaagatttgaaattaccagattcagctcgctttaatatggttatgtatgaaactagcgatgataaatctgctaaacaagctgagactaaaacgtttattataaaagataatacctactacatattatccaagatattgtcagataaattgcagcatgattatacggtaattgatcaaatagcagaaatacttactaggtataccagtgatgaacctaaagcaaaggctttaaagagacaattaggtgaaaaactatctgatgaaaaaatagaatctttattggctctaaactttactcaatatggtagctattcaatcgataccatgcagtgcttaattccctatttagccaaaggatacgatgtaacaactgcgattgatgcatttaatgaagaccaagcatcattagaaaatggccatagcccattgattgatgccagtatgaactaccatgaaataattagtagtatcaagaaccctgctttattacagtcatttaccaagacagttaaggtggtcaaagcacttattcgtcgatacgggaatccatataccattcacatcgaaatggctcgtgagttgagtttaggtaacaagggcaaagctgaattaattaagaaacaaaacgaaaatcgtaaacgcaatgataaagttattaccgaaatgaaagaaaattttcccaatgtttcgattaatggtgaaaatattattaggttaaagctttatcatgaacaaaatggaattgatatttatgacggtcgaatgattgattaccaacatgtcttagataataattacgaagttgaccatatcttgccttacagcattagttttaataatagttttaataataaggtattaacctctagtcgtaataatcaactcaaacgaaatcgtaccccttatgaatggttacacaacgataaagttcgttgggatacattcacgtcgattgctgaaaatgtaagaaattatcctaaaaagaataacttattaaaaatgcactacgatgaaagtgacatgaagaaatggaaaacacggagtttaaacgatacccgttatgccacccgattgctatataactactttaaacataatgagcaatattttgatgcaaagccttcagtcatgacaatgaatggtagcatgacggcccaattacgttattattggggaattgttaagcaacgtgccgctagtgataaacatcatgcggtagatgcttgtgtgattgccacttgttctaattcaatggttaatctaattagcaagtatcatactgctcgtgaaaaagaacagttatcctctaagttccctatgccttggccagatttccgcaatgacgtgatgaatgctaagcaacagatgaacgttaaaagaatctttagccacagtattgctggtaaggtgaacgaggatggactaaaaggtgccagatacatcaacaccgataaagtagttgttatacatgaaaaactagctaatttaaagctcaaaaaagttggcgatgattatatcattgttggacacggtaattctcgctatttgcgtccagacgatttaaccagtatttcaaatcgtaatagtaaaaatgacttgaattcggtcatttatgaccatatttataatgctttatctaaggataaaaaagcttttgaaaagcaaccttatttggaatttgagcataagggacataagtatactgttagaagagtaaaagtgattagcgactataagggtggtgtcattttaaatcgcgatgcggatggtaaccctatttcagtggcaaaccgtggtaagatggtgcgcaacgatatatttaaatgtctcgataagaaggaaagagtcgtataccgttttgtccccatttatgagcatcaaattttagatacacacttacctaatcaatatgctccatttgctaaaaatatttttgtgaatgataaagaccaatttatttgttctttgagtaagggggatgcggttgaagtgaaacttagcactcctaagaaagtagaaaattgtgatgagccatatgtatgtgatcattttattggttattttgatggatcagatatcagtagtaatcgaataaaaattaatgcattagataattcttgttcaattcgcgcctctatgagtaaattgattagcattcaaaaatgtgatgttaccatttttggtagtattcataaggtgcatgagaaagtgcgtcaacctttcaacttgaagcataaataatggcattccgacatgtttacattgagcatcccgtttatataagtattaagttaaagcaattgaacatttattcagaacatgatcaatacacttttaccattccattagaagacattgagagtattatattggacaactataagtcagttattactgcttatgcccttatggaaataacaaggtataaaattacgatggttatttgtggaagtaatcatctaccgcaaggtatttgcttaccacaacaccaatattataaaaagtttacaatgttaaatgaacaatttaagatgtctaaacaagtgattggtagattgtggcgtaacatagttaaacaaaaactaaagaatgaatctactaccctatctattttgaatcgaccttatacttcaaatattgagaaattaattaagctagtaaagcctaatgatgttaacaatgttgaagctcaagcagcaagaatatatttcatagccctatttggccaagattttcaaagaagagatgaaaatcctttaaatgacgttttgaattatggatatgccattatcaggagtatgattagtcgagatttatgcgcttacgggttagagccttgtctaggattacatcaccacaactatttaaattcttttaacttatctgatgatttaatagaaccatttagaagctatgtagacttatatgttttttataatatgcaaacttttaacaagggtctgagtagttctaataagaaattattggtcaatatgataaatggttatgtctatattgataatcaatatgaaactgttactaatgctattcacggaatggtttcagcttataataactgttgtataaacaagtcgtctagaattgtgttaccagagataagagatgaaaaataattagatttatgagactaattgttatgttcgatttaccagttactaaagctcaagaacgcaaagctgctagtaaatttcgtaaatatattatagaaaatggattctatatgttgcaatattcggtttatactagaattgttaataattttatttctattgaaaaatatactaaaagactaaagagtcatttaccaaatcgcggctccatatatttattgacggttactgacaatcaatattctaatatgaatatattagttggtaagccacctactaatgacgaaagagttaattcaaattcaatatcattattttaaattaaaaataatactaaaagagcctgcactttttgcagtcttttttagattgaattactttgtcgtacattatgaattcatcataaaatttatttttattgatatataattaatatgtaatcgaaaaatagaaataatagataggagtaattttatgcattatataaagaaattgatttattcaatactattgttaacctcatttataggtttaattagcgtttctagtgttacatctaaagctaacagcgactattcaattaaagctactactaaggttccgcttaattatcaaattttagagttggctaaggataatattcattacagattagctagtagtagttacgctaagtttttaaaatcggacgggatgactccagataaaaagatttccgctggtacacgtattaaaatttataatcaaccagcgcttaaacatggtggttataaatattatcctgttacttttctaactaaaaaatatgctcatctatataaatttgaaaaaggtgttttccctaccattgcaataaagaattttcatcaattaaagcatgtaaataaggttaattaaaaaagagtctgcaaacaatatgtttgtaggctcttttagttaatatgtaatctaattattttgatattcaatggaaccttttaattttattatcaaaatcaaaatttattacttgccttagagttcactccagggtttatgattgtattcagtaagtgaggtgatgataatgaatattgaaaaagttagtcaagaattcaatttatcaaaggatactttgcgatattgggaacgaattgaactattgccgcccgttcagcgtaattctagcggttatcgtgattatactgaacaagatttaaactggattttctatgtcaattctttacgaaatgcggggatgtcaattgaaagactgcttgattttgtgaagtcatatcgattacaaagcagtagtaacgaatatcgcaagcaacttttaattgaacaacgtcagattttaaaacaggaagttgaaaatcgccaaaagactattaattacttatcttacaaaattgaacattttgctgaccacaccttaacttatgaaaatgaaaagttagcatacgataaagacaacgaagaggagaaataattatgaataaaagaacccttaacaatcaaaccaccatccctactctaggttttggagtgtttcaaattgatgaaaatggtactaccaaagcggcagtgttagatgctatcaaagctggttatcgtctaattgatacagcagcaagctattgtaacgagcgcgaagttggtgctgccattaaaacggcaattgatgaaggcttagttacacgtgaagaattatttgtaacatcaaaattatgggtagaagatgtgacggctgaaagagcacctaaggctattcaagcatccctagaccgtctacaactagattatttagatttattgttaattcaccaaccatataatgatatcttcggggcatggcgtgctatggaagcggcatatcgtgatggcaaattaaaagcaattggagtttcaaattttgatgaatcacaaattactaatttagctgaattcagtgatattaagcctatggttgaccaaattgaagttaatccatttgagcaaaacatcgaaaaggttaaatatttacaagcttacggtgtacaagttgaagcatgggcaccatttgcggaaggtaaaaatgacctatttaaaaatgatcttttacaatcgattggtgacaaatatggtaaatcaattgctcaagttattctacgttggctataccaaagaaatattattccattagctaaatcagttaagccagctcggatggcacaaaatctagacgttttagattttgaattatcagcagatgatatgcaacaaattagtaccttggatactaataagagccaattcttcagccatcgagatccagatatgattaaatggatggctagtcgtcatattgaatattaatgttaaaaagagcttgcaaattaatgcaagctcttttttagtataattactttatattatatcccagcactgtcacgttaccatcgctatcaaagtgtaacttagtcaagctaccattttctgggcgtttttctaaatcatatttaccctgaccatagcggtcaattaagcttaaaatagctggcccatgactaactaataagactttactgccgtcttggacatttttatcattttgaattttttcaaatcctttgtgccagcgttgccaatattcatcattgttctcggcttgatgaaatggatcggattcatggaaaaagtctttaattttaacttgtccatatttattaactaaatcatggtaattactttcgccatgagtggcgcttacgatgtgattagcttcatcgatattagtaccttcataatatccataaaagacaccgcgtaaaagtggcgttgcaatagccctattaattttagaagcttggttgtgctttaaaatgacttcagctgtatattcagccctggtcatatcactggtatatgcagcatcaaattcaatgttagctaattttttagcgatgttttctgcatctttttggccttggttagtcaagggtgagttgctccagccctgcatttttcgataaatattataataagtttgaccatgtcgaacgatatataagtcaaatgttttcatgattttcacctcgtagaattattaactaatcctaacatatttaaatctttgttacacgtcattatctttttagtaaagtattataaattttttataaatgaattcctgacacctctaatttaagtattgtaaatttaatatagttatttaaacgatgctaaaattttaaaaaattaaattttattaaagatattaatagtggtattatatatgttataaatgttttttctataggaacattataataatatacttttgtatatttactattttatgatttaaggatgaacatacatgaaaatctacgttaaaagttatttttgtctagttttagggttacttttatcacttagctccattgttcatataattaaaatgattcaaggcgacaaagatttaaatatagttgttgttttaattttattttctattagtaatttcattcttggcataggtattaaaaagtaagcttgtctatcgttgaaaaactattaaacaaagttaaagattagtgtaaaattgatataatattaattctaattagggtggtatattttggggataactattaaagaaatcgcattagaacttggcattactaagcaagcagtgcaaagtcgaatgaatgacattgataattttagacaaaaatacacaactaaatctggaaataaattaattgttaacgatgaaggttataaattattgtctagtggcaataataaaaagatatctaacttgagtattggtttaaatgctctggttgcggaacaaatcaaggatcaaaaagctcagataaataaacaaaataatcaaataaatgaattacacaaaatgttgaatgatgcacataaaatacatttaaaattattgaatgaaaataataatttaaaagaacgtgtaaaagtttatgaaaaacaaacggacgttgatgaagataatgagaatatagataaaaaaaataagcctatttttagtcgtttattccataaataataaataaagggaatgcaatctaatgcattccctttattctataacaattgaaaacatgactatggctaatagtgctattttaaaaataatattaaagagtgaattaacgatttgaggcttgtgcttggctataaaaacattcgcaattgtttcaattaaaaataaacaaaatgctatggtaataattataccctcgtatttatatgtattatgtaatagtagcgaagtcatagaaaataatgcaaggccaacaattcctaaatacatagttaggtgcaagaattgttttttcaatctaaaaaaactaaagacaaaggtaaataaagagtagctagcggttagggacaatatcattatatattcatacctccttaaatttttacttatcatagcctcattctaacactttaatgagaaaatgatttctcatgtgtctgaaattatataaataattaataatttaataaaaatgccatattgataatatcaatatggcattttttgtataaagttatgcttggttttgttgttcaaatagttttgcagttttcattaattgttcaggggcatctttcatacccatgttggcttgtataacgactaatttatcaggttcttgactagccttgtgcatagcgtcaattagttctttttcagttgaaacgtttatgaaatcatattcattagcgttagcaccgaaagcttctggaactaagtcgtatcttaacttaggaacgtcgttgtatgattcattcattccatgaataactctttcaactgtataaccactattttcaattatgaaaataactggtttgatttgttcacggaaagctaaaccaaattcttgaatcgttaattgtaaagaaccttcaccagttgataaaacagtacggcggtttttattagcaatttgactacctaatgcagcaggaaaagcatatccaattgatccccatagaggttgaccaatgaagttagctcccttagctaagcgttgactagctaaaccaaagaatgatgtaccttgttcagcaaccaacgtgttatcacgcttaataaattgttgcatagcttggtcgtaaaatgcttgagttaaggcattatcactagcagtaagtttgtcacttatttcaggaactttaacttgtggtaatgaattgttcaatttagtatcagctaattggtttaagacactaacaaaatcagtttcaccatcaatattttcaccgtaaatgctactaccatcaatacttatcgcaacagtttggctaggattaaattgttgagtgaaaccaccggttacggaatcggttaacttagctcccattaagataacactatcagcagatttcacaaattcattaatattatcatcagaaatagaaccgttgtaagtaccaacaaaattagcaaatgtttcatcgatggcacccttaccaagtcctaaatcaacaacaggaatattattgttcgaagcaaatgtttcaacttgtttaccgagattgaaacgactaatttcatgaccaactacgataactggttttttagctttttcaatagcttgaattagttgttttacagctttatcaatattaaatttacgttcaacaaacaatttatcaatgtttgatttgattgctgggttaactggaatgtttaccaagtcactaggtaaaatcatgtatgctggttttttagtataatgaatgtattgaagtgtttcattgatttggttaatagcttgttctttatttaaacgagttactttaatacctaatttttcatgagctgcttcaaaacgcttgaattcgtggtcacctagagtgtggtgaaccaaagcaccttcgttttgtactttgttagtaggtgcccctacgatttctagcacgggaacatgttctgcgatgcttccggaaagtccattaataccacttaattcccctactccgaaggtagttacaaatgttgccaatcctttttcacgagcgtaaccatcagctacgtaagaggcatttaattcgttggcattaccaatccatttcatatcatcacgatgtgtaatatgatctaggaattgaaggttataatcaccaggaactccaaaaatttcatcttcacctaaatgtttaattacatctaataaataatctgatacagtatattcagacatgtttacacattcccctcatttctaaattaggtaaactttattgacctatgtttaatagtatatactgtaaaaataaacaggtcaactaaattgacgtaaaaaggagaaaatattttggataatgataaaagactatcaaccattttctttgcatatcaacagtttgcatctatgattgatttaaaaaaatataatttaaataagaatcaacatcgaatgttgtatattatctatgctttggatgatgttagcatcaaagacatcttaaagttattaaatatttcaaaacaagcggctaacgttagtattcgtgacttgatggagcgcgatttagttactgaaagtaaatcaaaagtagacaagcgggttaaaattttaaatttaaccgatgctggattagctttaaacaaaaccattaatcaagaacaaatagagcttctaaaccattactttgatgcagcaaatgatgattggaagcaagtcatggaaaaactagctgatagttatattcatagtttaaggtgaaaaaggcaaccacgaaggttgtcttttattattattattctacctctacaaaactattgttagtagttataaactcaccatttccaatgtcatatctggttatatcttggtttaaatgcacaatgttatatactcttaaaattgtaccaaatttaattaacctggcacgattattttcattaaagtgaatatttctatacgaataaatcccctttttaaaaataattttaatttttttaacattattttgttgatatacgcgtttatagtatttttcacttaaaatctgtccattatctaacataaagtctacagaattaggtgcatatgaaacattgtagtatttaaataattcatcatacttaggatattttttcatcactttaaaattaatattgtttggggtaattatatctgtatttgaattttcatctgtgttacttgattttactactgttactaaagcatttttactaattacatttccggcttcatcggtgtaattatataccaagttgtactgaccaattttatgagtatctacatttccgtctaatgtaatattataattattagtttttttaccgtacatatcatatacgtctattatgttatcgtttttattaaaagttgaaccctgagtaatgatagtgtttttaagatttaaattagccttactcatcaaaaccttaacatttattgtcttttgaacgttttcaccagcggcatttatataattgtaagagatgttgtaaacacctggtttattatcaacattgccattaatactaatctttgataaatctacagggtctccgtacatattagttgcgttaatgaaattatcagcagcattccaattcatttttggaccataaataatctccgaatctttagcatttatatttgtattgtctttttgccatacgtacgtacctggctgcataaacttactatttgtaagactactagaactataaatggggccgcttggtaaattgttttggatatattgccattttccactatatttattagaagcattgttaacatctttaggaatgatttcagctaatgatacttcaggatataatgttgtttttgagcctagcattaaagtctggataccaggagcataaaataaatttcctttttcatctgatactaaaactcccaaagtataacttagcatgtcgttcatattctgtacagaactggtgtcgaaagaacttaaatttagtttatttagactaatattataactaaacatattttgcatatttgtaactttattagtgttaaaattgctaacgtccacttcttgtaaattgtagtctccgttaaacatatgatccatgtttactacggatgaagtatttaaatcttctaagccagatatcttatacatagatattaatccattaaacatatagctcatatcattaacattaccagtgtttttcccaaactttccacctacgtttaaattagataagctattgcaagaaaaaaacatataactggtattatttaaatttttagaattccatgatgaaacatcaatgttatctaacttttttgaatctgaaaacatacttcccatatttttaacgtttgatgtgtctatattattcatattttgaatagattctaagtttggcaggttatagaacataccactggaatcttctggtaacaaaactttattattaaatttaattgttttaacattgttatttatttcattgttatttttccaaggcgcattgttaatattatctatattaccgccatcaatgtttacagtattgtctgcattattatagttccaagctgctgttccccaatttccattaatagttgccttatcttttgcagtatcatcaggttttaagctaccggtatctgtttcaggtgatgttgaaacaatctgacttctaccatgtctagaaagatcttctaatggtgttttagagctttctattttactttcatatattggattctttgaatctgtactatcatctaattctttattagtttgatttttgattgttatattgttgtttagattactttcacgtgattgagtattttcgttatttctttgaagagtgacattgttttttatgctagaatcgctatcactattgttagaatttgtttgattattttttgtatttaagacatttgtattttttgaattattatttcgattaacattatcgttgctagaattcatagaatctgcaaaagcagtgtaacttttactattattaataaacattcctagtgataaagaacagaatacaattcctcccattataagacgccttgcatttgtatccttttgcatttttagattattat

SEQ ID NO: 967 - DNA, 17386 bp, synthetic construct
  source 1..17386: mol_type = other DNA
  misc_feature 1..17386: note = Synthetic
agatttttcaatcatgttatcagctttgaacaaacttaattattctttagaatggcgagttattaatgctgctgattatggaggagctcaacgtagaaggagagtttatttatttgtttttcgcaatgatttatcttacgctaagcatttagatgatgagtacgaaagcttttttatgaataacgatgacacttatgacgaatacctatttaaaacaggcctattcgctaaaaactttcctgttaaatcagtaccttacaaggatagaaaagccttctatgagttaccagaagacatagttgaagtttcagacgaattttcaggtaaagtttttaatactggcatcatgcgacacggtaaatattatactatcgacactcaggctttaggcgatgaaaaacctaagccattaaaggatattattcaacctgaaagtgacgttgacgataaatattatgtggctgatgaaaataaaattaacaaatttgaatatctaagaggttctaaaaaaatagaacgaactagtgcgaacggacataaatacatctacagtgaaggtggtatgtcaccgtatgaagatttaaacttgcctggtcgtactatgttaacttctgaaggtaccgtgaatagatctacacattggctaaaaataaataacagataccgtacgttgacaccgattgaagcagaacgtatgcagtcatttccagatgattggactaaatataaattagttgacggtaaagttgaagaagtttcagatagaatgagaatgttttttatgggtaacgcattagtaactgatgtggttaaacgtattggtttgggaattaaagatattgtaaataaatatgatgagtaataaataaagacagctaataatatagctgtctttatttattataggtaataggtatttatttttctactttacataacgtgtattatgcgaagttgtcatataattattttaatgaccacttgtaactttaattccaataattccaacaactagcatgacaataaatacccaagtaattggtgaaatctggtctttaaataaaacaactcctacaatgattgatccgactgcgccaataccagtccaaattggatatgaaatgcttagtggtaagtgtttaatagctaaagctaagaatccaaaacttaaaaccatgccaacaaccgtactaattgaaaataccaagttggtaaatccattacttaatttcatggtcgttgaccaacatacttctaataacccagcaataattaaatatatccaagtcatagtaataattcctcctaaaaataaaaactcaagcaagctcttctatgacctaatgagcttgtttgagtataagttacccggtggcaactgatttattacgagtattataataaattagccaacagttatcaatataatttgattagtttaatgttttcgaaacatttgtcatattaatagcttagtgctaatatttattttcaaaggagataatcaaatgaaaattaacgtaccattaatggacaacggttatctagatgataaatatactaaacataccactgcagaaaatattgtaaatggacttcctgctgtatcatttcctattgatattgcggatgtgtctaacaatgctaaaacattagctattacactaactgacttggatgctattccggtctgtggatttgaatggattcactggattgcagctaacgtgcccgctgattgcactcatgttcctgaaaatgcaggcaaagaaaatccattaggctggaatcgtggttataatagtttggctggtcgtttattagaccgcaaagatgatccacttagtttaggatttgttggccctgcaccacctagagatattcatgattatactttgactgtctatgcactagacgaaaaattacccctagccgatggtttctggtacaacgaattgttacacaccatcaagggccatgtgctagataaagctactttagaactaccagttaaatcataaaatttacgaaatgaactactttcaattaattttgaaagtagtttttcattttgtttgacttcgagtttactcgaagtattattatcgtaatatcaattgataaaggaaagattttcatggaaaaatacacaatcggcgaattcgctaaaaaaagtgggattaactacctacaccctgcgttattatgaacagcaacaattaatcatgcctagacgtgatgaccatcaaagacgttattataccgatgaagatgttaaatggctgggctttttaatatgcctaaaaaatactggtatgacaatgtctgaaattggtgaatatgtacagttacgtagtcaaggtgataagacgatggaagctcgaaagaacttgttagcagtcgttaaaaaaacgtagtgatgaccaaatcaaggacatgcaggctaatttaaaagtagttaagcataagattgattggtacaacggtaaaatggactgttcaattgaccaagatgaagattttgagtcctacttagcacgatttaataattaaggagataattaatatgcaaaatgaaaatgaagttcacaacactacttttcctatgggcgataaaaataccgcttatgctaaatttttttacaggacaaagctacctaaatggtttggttgcacccgctaaagatgtgaacgtgggcgttgggaatgtaacttttgaaccgggttgtcgaaataattggcacattcaccatgatgggtaccaaatactattggtaaccgccggacaaggaatttaccaagaatggaataagccggctcgcttattgaagcctggtgacgtagtggtaacgcatgatggagttaagcattggcatggggcaatacaagatagttggtttgcacatgttgcaataactgctggtaatccagaatggttatcccctgtttcaaatgatgaatacgttaaagcaaatgccgaagtaaaggagtgattaatatgaaaaaacaagatgccggtcgtaaaatgttaggtgatttagcccctaaatttgctgaattaaatgatgacgtattatttggccaagtctggtcacgaacggataaattatcagcacatgatcgtagtatgattacaatttcagccttaatctctggtggcaatctagcccagctacccgcccacctaaaaattggtaaatcaaatggcattactaagactgaaatagtagaaatgattacacatttatcattttacgtgggttggcctaaagcatggtcagcttttgggatggtcaaagaaatatatgcttaaaacattgacacttcacttgatatttataatttaagtattagaatacaatcaattataagtacgtatggaggtttttaatatgtcagaaaaaaagctaaatattctattcattatattcttattagctagtctagctttggggccctttttaagtatcaaaataacaatttcctcttagccttgtcggtagcatttgccgtagcgtcatttgttattttggttatctgggttattcgtttagttaaactaattctaaaagctcataattagttagcgagtcacaaaaatagttcaaattcaatcttgaatttgaatccagatgtttgtatattttacaggaacttaataatttaaagattggagaactataatgaaacaattaagaatatacactttaaaagaccaagctgctgcccatgaatatctagaaaatcattggactaaacacttagttagtctacctaaattcggcattcacgttgaaaaagtgtttggtgaaaataatcctagcggaaattgtcgagtattcgccctagtatcatctagtcaagataacttgcatgagctcaacgctaaatatatgcaaagtgatgctttcaaagatgatatgcaaggctttgatatgactaaaatcgtcagcgttgaagatgttgacttattccctggtgaaaatataagtaatttattctaacgtgagtagcttaaacgtcagtaaacatgtcgttaggtttaccgtgacattgcgttaagtattcatttgaattctcttcaaaaaaaatgtggtcaaagcgcgcatgatgtatgcatttacattgtgtgcttttttattagcattaataataatggatttaatcttggtagttaattgttgattaatggatgcattcatttcaaatcggagcgctccatagccattctcacaccttttagcctcttgatagacaaagtttttagctttgaaaatgagtccagcatattcgtataacttctgtcgactaccaaatgcatacacttttaaaatattgactaatttgggtgaaaggccccctttttcaatcagactatcccccagaacatctaattcatcagcggcttgatatttttcaggcgatggtttggtgtcatctgtgtcatttgtaaattgattagtatgattaagttcagtctgattataatcgcattttgaacttttaggctcttcatgatggcgttcgtgcgttttaggtaaaataaaatgtggcaaaaagacacggttcggagcattaaattgttgtttcaaaacaatccagcctagcttgactaagtgtttacaaattcgcgtgattgtcgacatgctcaaattaatacgttgagccatttcttctctagtataaattacgaaatatccattatatttttttgtcataaaaattattattttgaatacttaaatgcatgcgatcataaagatgcgttaaaattgacacttcattaggctttaaaccggcttcttcaaagacgtggtactgtttataaaattgtgtattagtcatatttctatcccctatatagatagaaaaaggtgcacaagaatagacttgtacaccttatattatgtaatatattgaaataacaccgtaaatgtcatataataatcaagcattagcagaattatctgttgtgcatttagggcgttaaacggtgagcaagtagttcaggtacttgttagctgatagataattactaccaataattatttatcaacgctctttttctatgtgatttttttgttgcgcaagcagtgaaattacttttgcgtatatagatactttatagaaatagttgttgaatgtcaatgtttttatgtgatttattttaaataaaatattattggtaaaatataaaaattcttataaagtaaaatttgctgttttacgtatattatagaaattgtgatctaagattttgatgcattaatacatttcaaatacatagatgttataatcacagctttcggtttagtaaacgccattgtgttattaatacattacaaatacatagatgttataattctatctttgtgttcgctcatttttttatcgttattaatacattacaaatacataggtgttataattttctcattactatctgccggaatgaccgtgttattaatacattacaaatacataggtgttataatagcaaaacccaactgttgtcttgtttctgcgttattaatacattacaaatacatagatgttataatatttaaaaatattgtctagctgcttatccgttattaatacattacaaatacatagatgttataatattcgagtagaacaacccatagttcgagttgttattaatacattacaaatacatagatgttataatccacttgatgtggtagttatagtgagttttgttattaatacattacaaatacatagatgttataatttgttcagcaagcttgatgatgtcctcgacgttattaatacattacaaatacatagatgttataattttgcagttgtacttgtggtagtggttgaggttattaatacattacaaatacatagatgttataatatacggactgggcttaaagtttgaatttttgttattaatacattacaaatacatagatgttataatatagcactgcttatagtcatttttatagcagttattaatacattacaaatacatagatgttataataacgttattttctgaccaatcagaactgtagttattaatacattacaaatacatagatgttataattttgcgataaaactatcactaacccaagctgttattaatacattacaaatacatagatgttataataacttacagtatgccgagcgtacagccgaggttattaatacattacaaatacatagatgttataattgagtttgtaacatgattatcaaccagtcagttattaatacattacaaatacatagatgttataattgtcgtttatgtttacgtgttaaatctctggttattaatacattacaaatacatagatgttataatgcctaaaaaccacgttattggtatggtttcgttattaatacattacaaatacatagatgttataatactatcttttaaaaattcttatgtatcaacgtttaattgctttaggatatgaaaatatttttatatagttgtgtatattttgttaattttggttttcgtgtttaaaataaacacagtaatgtattaataataaagaattatccatatgataatttctgcaaagcaacagccgcatccactgtttaagatagtggcgactgcctttcttacatattgtttaaggatttagttttatctttttgttattgatacattttcatatttgcattaacaattcttagtgttataatttacttgtaatgtattaataataaagaattatctatgtgataatttctgcaaagcaacagccgcatccactgtttaagatagtggcgactgcctttcttacatattttaaaatttaatcttatctttttgttattgatacatttaagtatttcatttgtgtattaataataaagaattattttaataataatttctgtaaagcaacagccgtatccactatataatgatggcggctgtcttttttctttttgaactgattgatttacatatataaaaccttattgatatgagttattaatacattacaaatacataggtgttataattagagttgttttagacgtggaaagtccatcgttattaatacattacaaatacatagatgttataatgatactcctgttctaatgtacttgttatgtgttattaatacattacaaatacatagatgttataattaatgatttgagagctaaacaagggctaccgttattaatacattacaaatacatagatgttataatattgtggttaaaatcgcctgacaccagtacgttattaatacattacaaatacatagatgttataattttagaaacgccaatatgaacgtgcgcaccgttattaatacattacaaatacatagatgttataattgctcaagggactactgaaacgaccactttgttattaatacattacaaatacatagatgttataatatggtttcgatcaagacgctttaaagcaaggttattaatacattacaaatacatagatgttataatttaaagttattactatctccagcagaattagttattaatacattacaaatacatagatgttataattgtaatagcgttcaaaaggttctgcttatcgttattaatacattacaaatacatagatgttataatggtggtgtaattttataagcaattgaaccggttattaatacattacaaatacatagatgttataatgggttggcttttgtcgtcaatgcccaaagcgttattaatacattacaaatacatagatgttataatttcaacttcaataaagtatcggcgagcttggttattaatacattacaaatacatagatgttataatactaagctagttgctgtactaggctggcttgttattaatacattacaaatacatagatgttataatattggcggaattatcatgtctggcattgctgttattaatacattacaaatacatagatgttataatcttgccaaactttttttagtggtggacttatgttattaatacattacaaatacatagatgttataatcgaccagagttgaaccatgagcactgccggttattaatacattacaaatacatagatgttataatttcattttcattaacctttcaataagttcagttattaatacattacaaatacatagatgttataatccactataatcgtatatatcgaccataaagttattaatacattacaaatacatagatgttataatcaacgtttctatatgctttatgtgtagtttgttattaatacattacaaatacatagatgttataattgacagcctacgctatgtagtgatgtatgtgttattaatacattacaaatacatagatgttataatactaacttttaaaaatacttatatatcaatgtgtaagcgtctttaaatataaaaatatttttaatatagttgcgtatattgtgttatttcatattttgtgtttaaaataaacacagtaatgtattaataataaagaattatcttaatgttaatttctggagagcaactgccgaatctgttgacacgaatcaatagcgacagtctctaattataaagatcagacaagttctggtcttttttattgcaatattaaataaaaatgctagagttgaaagtattagctaataattagttaattaataaataattgtggaggttacataatgcataaacattataaatatgcgttaggtttagatgttggagttggttcagttggttatgctctacttaaactagatgaagctgatcaaccttgtggattgcttaaggctaattcagtgacttttccaatgtcccaagaccgcacaggcaatactttggcatccattgctcgtaattatcgaagtggtcgacgtttaaaccgtcgtcgtaaattaagaaaacagttagttagtaatttattcactaaaaatggattaataaatcgtaatgatgtatatagtccttatactaagcatcccaattttgatttatatcggatttggcatgatagttttaatcagcaaatatccaatcaagatttatatcgcctactatattattttgccggtcatcgtgctttcaagtctaatcgaatccatcaactaaaaagtctggtgataaagatacgactaagctacttagttctattgacaccaataaagaatattttaacaatagtcaatataaccatttaggtgaaatgttttactgtgaccctaaatttgctcaacgtaaacacaataagggctatgatgatggatatttattcaatattgatcgtggtacgttgttaagtgaaattaaagagatattaaatgctcaatcaaaatttggaaatcctgctatcaatgatgatttcaaagctcgatacttaaaaattttgagtcaacaacgtaattttgatgttggccctagtaatccatctagatttgctttagttgacagttcaggaaatattaaattaaggaacaaaaaagataaattaaatttatcattcaaaactagtgctaaagccagttatacttttcaaaaatttcagattttacaaaagttagctaacacccgttataagttaaattcacaatccaaatatcaatctctcaatgctgaaaccattgataagatttttaataaagctataacgaaagctaactataaatatagtcaacttaaaaaaaagatttgaaattaccagattcagctcgctttaatatggttatgtatgaaactagcgatgataaatctgctaaacaagctgagactaaaacgtttattataaaagataatacctactacatattatccaagatattgtcagataaattgcagcatgattatacggtaattgatcaaatagcagaaatacttactaggtataccagtgatgaacctaaagcaaaggctttaaagagacaattaggtgaaaaactatctgatgaaaaaaaatagaatctttattggctctaaactttactcaatatggtagctattcaatcgataccatgcagtgcttaattccctatttagccaaaggatacgatgtaacaactgcgattgatgcatttaatgaagaccaagcatcattagaaaatggccatagcccattgattgatgccagtatgaactaccatgaaataattagtagtatcaagaaccctgctttattacagtcatttaccaagacagttaaggtggtcaaagcacttattcgtcgatacgggaatccatataccattcacatcgaaatggctcgtgagttgagtttaggtaacaagggcaaagctgaattaattaagaaacaaaacgaaaatcgtaaacgcaatgataaagttattaccgaaatgaaagaaaattttcccaatgtttcgattaatggtgaaaatattattaggttaaagctttatcatgaacaaaatggaattgatatttatgacggtcgaatgattgattaccaacatgtcttagataataattacgaagttgaccatatcttgccttacagcattagttttaataatagttttaataataaggtattaacctctagtcgtaataatcaactcaaacgaaatcgtaccccttatgaatggttacacaacgataaagttcgttgggatacattcacgtcgattgctgaaaatgtaagaaattatcctaaaaagaataacttattaaaaatgcactacgatgaaagtgacatgaagaaatggaaaacacggagtttaaacgatacccgttatgccacccgattgctatataactactttaaacataatgagcaatattttgatgcaaagccttcagtcatgacaatgaatggtagcatgacggcccaattacgttattattggggaattgttaagcaacgtgccgctagtgataaacatcatgcggtagatgcttgtgtgattgccacttgttctaattcaatggttaatctaattagcaagtatcatactgctcgtgaaaaagaacagttatcctctaagttccctatgccttggccagatttccgcaatgacgtgatgaatgctaagcaacagatgaacgttaaaagaatctttagccacagtattgctggtaaggtgaacgaggatggactaaaaggtgccagatacatcaacaccgataaagtagttgttatacatgaaaaactagctaatttaaagctcaaaaaagttggcgatgattatatcattgttggacacggtaattctcgctatttgcgtccagacgatttaaccagtatttcaaatcgtaatagtaaaaatgacttgaattcggtcatttatgaccatatttataatgctttatctaaggataaaaaagcttttgaaaagcaaccttatttggaatttgagcataagggacataagtatactgttagaagagtaaaagtgattagcgactataagggtggtgtcattttaaatcgcgatgcggatggtaaccctatttcagtggcaaaccgtggtaagatggtgcgcaacgatatatttaaatgtctcgataagaaggaaagagtcgtataccgttttgtccccatttatgagcatcaaattttagatacacacttacctaatcaatatgctccatttgctaaaaatatttttgtgaatgataaagaccaatttatttgttctttgagtaagggggatgcggttgaagtgaaacttagcactcctaagaaagtagaaaattgtgatgagccatatgtatgtgatcattttattggttattttgatggatcagatatcagtagtaatcgaataaaaattaatgcattagataattcttgttcaattcgcgcctctatgagtaaattgattagcattcaaaaatgtgatgttaccatttttggtagtattcataaggtgcatgagaaagtgcgtcaacctttcaacttgaagcataaataatggcattccgacatgtttacattgagcatcccgtttatataagtattaagttaaagcaattgaacatttattcagaacatgatcaatacacttttaccattccattagaagacattgagagtattatattggacaactataagtcagttattactgcttatgcccttatggaaataacaaggtataaaattacgatggttatttgtggaagtaatcatctaccgcaaggtatttgcttaccacaacaccaatattataaaaagtttacaatgttaaatgaacaatttaagatgtctaaacaagtgattggtagattgtggcgtaacatagttaaacaaaaactaaagaatgaatctactaccctatctattttgaatcgaccttatacttcaaatattgagaaattaattaagctagtaaagcctaatgatgttaacaatgttgaagctcaagcagcaagaatatatttcatagccctatttggccaagattttcaaagaagagatgaaaatcctttaaatgacgttttgaattatggatatgccattatcaggagtatgattagtcgagatttatgcgcttacgggttagagccttgtctaggattacatcaccacaactatttaaattcttttaacttatctgatgatttaatagaaccatttagaagctatgtagacttatatgtttttttataatatgcaaacttttaacaagggtctgagtagttctaataagaaattattggtcaatatgataaatggttatgtctatattgataatcaatatgaaactgttactaatgctattcacggaatggtttcagcttataataactgttgtataaacaagtcgtctagaattgtgttaccagagataagagatgaaaaataattagatttatgagactaattgttatgttcgatttaccagttactaaagctcaagaacgcaaagctgctagtaaatttcgtaaatatattatagaaaatggattctatatgttgcaatattcggtttatactagaattgttaataattttatttctattgaaaaatatactaaaagactaaagagtcatttaccaaatcgcggctccatatatttattgacggttactgacaatcaatattctaatatgaatatattagttggtaagccacctactaatgacgaaagagttaattcaaattcaatatcattattttaaattaaaaataatactaaaagagcctgcactttttgcagtcttttttttagattgaattactttgtcgtacattatgaattcatcataaaatttatttttattgatatataattaatatgtaatcgaaaaatagaaataatagataggagtaattttatgcattatataaagaaattgatttattcaatactattgttaacctcatttataggtttaattagcgtttctagtgttacatctaaagctaacagcgactattcaattaaagctactactaaggttccgcttaattatcaaattttagagttggctaaggataatattcattacagattagctagtagtagttacgctaagtttttaaaatcggacgggatgactccagataaaaagatttccgctggtacacgtattaaaatttataatcaaccagcgcttaaacatggtggttataaatattatcctgttacttttctaactaaaaaatatgctcatctatataaatttgaaaaaggtgttttccctaccattgcaataaagaattttcatcaattaaagcatgtaaataaggttaattaaaaaagagtctgcaaacaatatgtttgtaggctcttttagttaatatgtaatctaattattttgatattcaatggaaccttttaattttattatcaaaatcaaaatttattacttgccttagagttcactccagggtttatgattgtattcagtaagtgaggtgatgataatgaatattgaaaaagttagtcaagaattcaatttatcaaaggatactttgcgatattgggaacgaattgaactattgccgcccgttcagcgtaattctagcggttatcgtgattatactgaacaagatttaaactggattttctatgtcaattctttacgaaatgcggggatgtcaattgaaagactgcttgattttgtgaagtcatatcgattacaaagcagtagtaacgaatatcgcaagcaacttttaattgaacaacgtcagattttaaaacaggaagttgaaaatcgccaaaagactattaattacttatcttacaaaattgaacattttgctgaccacaccttaacttatgaaaatgaaaagttagcatacgataaagacaacgaagaggagaaataattatgaataaaagaacccttaacaatcaaaccaccatccctactctaggttttggagtgtttcaaattgatgaaaatggtactaccaaagcggcagtgttagatgctatcaaagctggttatcgtctaattgatacagcagcaagctattgtaacgagcgcgaagttggtgctgccattaaaacggcaattgatgaaggcttagttacacgtgaagaattatttgtaacatcaaaattatgggtagaagatgtgacggctgaaagagcacctaaggctattcaagcatccctagaccgtctacaactagattatttagatttattgttaattcaccaaccatataatgatatcttcggggcatggcgtgctatggaagcggcatatcgtgatggcaaattaaaagcaattggagtttcaaattttgatgaatcacaaattactaatttagctgaattcagtgatattaagcctatggttgaccaaattgaagttaatccatttgagcaaaacatcgaaaaggttaaatatttacaagcttacggtgtacaagttgaagcatgggcaccatttgcggaaggtaaaaatgacctatttaaaaatgatcttttacaatcgattggtgacaaatatggtaaatcaattgctcaagttattctacgttggctataccaaagaaatattattccattagctaaatcagttaagccagctcggatggcacaaaatctagacgttttagattttgaattatcagcagatgatatgcaacaaattagtaccttggatactaataagagccaattcttcagccatcgagatccagatatgattaaatggatggctagtcgtcatattgaatattaatgttaaaaagagcttgcaaattaatgcaagctcttttttttagtataattactttatattatatcccagcactgtcacgttaccatcgctatcaaagtgtaacttagtcaagctaccattttctgggcgtttttctaaatcatatttaccctgaccatagcggtcaattaagcttaaaatagctggcccatgactaactaataagactttactgccgtcttggacatttttatcattttgaattttttcaaatcctttgtgccagcgttgccaatattcatcattgttctcggcttgatgaaatggatcggattcatggaaaaagtctttaattttaacttgtccatatttattaactaaatcatggtaattactttcgccatgagtggcgcttacgatgtgattagcttcatcgatattagtaccttcataatatccataaaagacaccgcgtaaaagtggcgttgcaatagccctattaattttagaagcttggttgtgctttaaaatgacttcagctgtatattcagccctggtcatatcactggtatatgcagcatcaaattcaatgttagctaattttttagcgatgttttctgcatctttttggccttggttagtcaagggtgagttgctccagccctgcatttttcgataaatattataataagtttgaccatgtcgaacgatatataagtcaaatgttttcatgattttcacctcgtagaattattaactaatcctaacatatttaaatctttgttacacgtcattatctttttagtaaagtattataaatttttttataaatgaattcctgacacctctaatttaagtattgtaaatttaatatagttatttaaacgatgctaaaattttaaaaaaattaaattttattaaagatattaatagtggtattatatatgttataaatgttttttctataggaacattataataatatacttttgtatatttactattttatgatttaaggatgaacatacatgaaaatctacgttaaaagttatttttgtctagttttagggttacttttatcacttagctccattgttcatataattaaaatgattcaaggcgacaaagatttaaatatagttgttgttttaattttattttctattagtaatttcattcttggcataggtattaaaaagtaagcttgtctatcgttgaaaaactattaaacaaagttaaagattagtgtaaaattgatataatattaattctaattagggtggtatattttggggataactattaaagaaatcgcattagaacttggcattactaagcaagcagtgcaaagtcgaatgaatgacattgataattttagacaaaaatacacaactaaatctggaaataaattaattgttaacgatgaaggttataaattattgtctagtggcaataataaaaagatatctaacttgagtattggtttaaatgctctggttgcggaacaaatcaaggatcaaaaagctcagataaataaacaaaataatcaaataaatgaattacacaaaatgttgaatgatgcacataaaatacatttaaaattattgaatgaaaataataatttaaaagaacgtgtaaaagtttatgaaaaacaaacggacgttgatgaagataatgagaatatagataaaaaaaataagcctatttttagtcgtttattccataaataataaataaagggaatgcaatctaatgcattccctttattctataacaattgaaaacatgactatggctaatagtgctattttaaaaataatattaaagagtgaattaacgatttgaggcttgtgcttggctataaaaacattcgcaattgtttcaattaaaaataaacaaaatgctatggtaataattataccctcgtatttatatgtattatgtaatagtagcgaagtcatagaaaataatgcaaggccaacaattcctaaatacatagttaggtgcaagaattgttttttttcaatctaaaaaaactaaagacaaaggtaaataaagagtagctagcggttagggacaatatcattatatattcatacctccttaaatttttacttatcatagcctcattctaacactttaatgagaaaatgatttctcatgtgtctgaaattatataaataattaataatttaataaaaatgccatattgataatatcaatatggcatttttgtataaagttatgcttggttttgttg

SEQ ID NO: 968 - DNA, 23498 bp, synthetic construct
  misc_feature 1..23498: note = Synthetic
  source 1..23498: mol_type = other DNA
gcgacaggcccgcccgtgccgctccctgggtgatgctgccggcctcgatcaccgccaggaacagccgcagatccgtgagatcaaaacgcacgtgctttcctccggccagggcgcccgcatggatcagcctcaaggcttaacgaaggctgggtcaaggaatgccgcattgtggctgggcgtggggcctgccacccttcggcccatgatggatcacactcttcttctcgggctttgcctcgttgtgttcctggccgccggcgtggtcaagggtctgctgggcatgggcctgcccaccgtggccatgggcctgctgggcctggtgttgagcccggccgaggcggcggccctgatgctggtaccgtcactgctcaccaacctgtggcaggccctggccgggccgtcgccctggcccttgctccgccgccttgcgcccctgctggcgggcatcacctttggcaccgccctgggtgccccttggatgcacgccgaaacgacgttggtgcgggccggcctggggggaatcctggtggtgtacgcgctggtgggcctggggggcgtccggttgccccgggtgcgcgcgacccgtggcccggttccgatcgcggtgggcctggtcatgggccttctgaccggccttgccagcggggcgaccggcgttttcgtgctgccgtcggttccctacctggccagcctgtccttggatcggccccggctggttcaggcgctgggccttgccttcaccaccgcgagcgccgccctcgcgctggccctggccgcgcacgaccgccttccttttgcgtccctgggctggtcaacgctcgcggtggtgccggcggtggcgggcatggcggcgggggcgtggctgggggcccgggttccccaggccctgttccggcgcctgttctatggggggctgctggtcttggggggcgaaatcatgctgaaaagcctgggggggtgaaaaagggcgcgcgcggcggggccatgggcctatgataggggcctggcccgtggtggtcgcatccctttatctcgtggagagccgtcatttcttccctggaaaacccattgcccgtgaccgtggtcggaggcggcctggccgggtgcgaagccgcctggcaactggcccgcgccggcgttcccgtgaccttgatcgaaatgcgcccgcaccgcgccaccccggcccatcgcaccggggatttggccgagctggtgtgctccaattccctgcgcggcgacgatcccctgttcaacgccgtgggcctgctgcacgaggaaatgcgccgcgccggctcgctgatcctgacggcggccgaggccaccaaggtgccggcgggcggggcgctggcggttgatcgcgccggcttttcccaggtcatcgcccaggccctggaagcccatccggccgtgcgtatcgaacgcgccgaagtcaccgaactgcccccgggcccggcgatcatcgccaccggtccgctcaccgccgaccccctggcccaggccatccaggcggtgacgggggccgaaagcctggcctttttcgatgccatcgcccccattgtccaccgcgacagcatcgacttcgaaaaggcctggttccagtcgcgctacgacaagggggacggccgcgactacatcaattgcggtctcagccgcgagcaatacgacgccttcgtggacgccctgctggaagcggcggtgacgccgacccgcgagtgggagggcacgccctatttcgacggctgcctgccgatcgaggtcatggcggcgcgcgggcgcgaaaccctggccttcgggcccatgaaaccggtgggcctgcgcgatccccgcgcgccggaacagcgcctgcatgccgtggtgcagttgcgccaggacaacaccctgggcacgctttacaacatcgtgggcttccagacccgcctgcgccatgccgagcaggtggcggtgctgcgcctgatccccggcctggagcatgccgagttcgcccgcctgggcggcatgcatcgcaacacgttcctgaacgggcccttggtgctcgatgggcggctgcgcttgaaaacccggcccgacctgcgcttcgcgggccagatcacgggctgcgagggctacgtggaaagcgccgccatcgggctgctggccgggcgcttcgccgccgccgaggccctggggctggatctggccctgccgcccgccaccaccgcgctgggcgcgcttttgggtcacgtgaccgggggcgccgacgccgaaaccttccagcccatgaacatcaacttcggtctgtttccgccgcttgatccggtcatcgcccggcccggcgccaaaccccgggtgcccaaggggcgcgagcgcaagctgggtgtctcgcgccgcgccctgaccgatctggccggctggctggaagcccccggcccgtgggccgaggacgacaccccgcgcgcgcgtcagccggtgcccgaccccccgccccggggcgacgacaaaaccgcttcggaggcgtgaaacaagcgcgaagaggcgcacccaccccctgggctaccccttggctggaggcggcggagaggaccttgccgtctccgcccgcccggcctgatcgcgaagggagggagcgggaagggggctccgtcagggagtcccggcgccctcgggcggtggctcgtcatcgtctgcctcaagatgggcgattccgatgtcttgataaagctggaacaaagcctgatgcgccttgtaggccagctcgaaccacgcggggttttgcacgacggcagggtgcccgagaaggcttcgatccaccgattccatcaggaaatcagccatgtgcagggcttcgtggcacccgaagctgccggggctgacctcgtcggggacaaagtcatcccccatttcatcaaggaagcgctgtctcagctcctcgatttcatcatcggacatgatggttttccttcgtttcaagccgacccagggcaaccggtcgggcgtattggctcgcaaaacgctctctcgccggaggcccccttgaaaacgcccggggtgatcatgtgggagcaaaggcgaagcggtcctggggtgtgttaaccctcttgaaagttcgggtcgatatcaaatgtattgaccatgaaaaccacactgacccgactggccgcgatctgggccctttttgcactgctctctcccgcgcgcgcggcgcagggcgagcagcaggtggcctatctgccgccccctggcgccattcccgccgttgtcgtcgaggtttacgacggggacacggtaaccgtcgatgcctatccctggcccggcctgaccgttcgcaccagcgtgcggctggatggaatcgacacaccggaaatccgggggaaatgcgaggcggaaaaagaagccgcccaggcggcccgcgatcgcctgcaagagctgctgggcacttccgtcaccctgacggatgtgcgcgagggcaaatatgccgggcgtgttgtggcgcgcatcatgctttccgacggacgcgacgccacaaccgtgctgctcaacgaaggcctgggccgcccctacgacggaaaggcccggcaggggtggtgcgccgggccgtcgtaagcctttccccgccagcaaagtcccccgccgttttgactctcacccggttcagggctgtcagggaaaggggaacaccgtctttcccgaaaaaacaaacttaaacaaagagatgcgcaccaaacggcggggcgcggtctcggttgtgatgtcgtcgcgcggcgcgcgcctgaccctcccgccacccttgtttttcttcaaaaaagagaaaacagcgcctaaaatgcgttgaagaagaaaaaacacggagagggagaaatgatactgtctcgtggacaacgccttccgctggagaccctggtgggagcgtcccccttttccctggcctggaaggtccagggccttggggtggacgcctcggtcttcggtctcgacgaccaggagcggctgagcgacgaccggtacatgatttttttcaatcagcctgtctctccgtgcggcggcctccggctggaaaacgatcgcgtggaggtgagtctggcccgcttgccctcctcgttgaaacgccttgtcctggtgttgtccgtggacggtcccggcgtgtttcacgacgtgacggcgggatcccttgtgatccaggctccgggccacgagtcccgcttcgacttttcaggcgcgacgttcgcccaggaacgggcgctgatgctggccgagatttatcgcaaggatgggaactggcggataggcctttccgctcagggcttcaacggcggcctggatgccgtggtccggcatttcgggggagtcgtggcggaggaaagcaggccagacacgtcgagggtttccctggaaaaacgcgtggcggccgaggcccctcatcttgtgaacctgaccaagaaagtgagcgtgagcctggaaaagaccgggcttgcctccttgcgcgcccgggtcgggcttgtcctggacgccacgggctccatgcgaaagcagtacaaggaaggaaaaatccaggccttgcttgatcgccttttacccctggcgctgcgcttcgacgacgatggggccttggatgtgtgggcgttcgatgatcgccagacgcgtcttccccccatgtccctggccaattgccgcgattacgtggctcacgcgaacggagggtggcgggcctgggtgggcggggctaacgatgagccgcccatcatgcgcgatgtcctcgatcattatgaaaaggatcccagccggctcccgatttatattctctttgtgagcgatggcggagttcgtaaaaacagggaaatcaaagaattaatcaccaactcctcgtctcggccgttgttctggcagttcatggggctcggcggaaaaaactatggagttctggagcagctcgatacccttggtcagggagggattgataattgcggattttttgccattgacgatcttcacgatctttcggacgaggccttttacgaccgcctcttgcaggaatttccgctttggttgaaggtcgcccgcaaggctgggatcgtccaggacaacccctgatcccggattttcaaggattgttcccgatgcgtggggggcttgaaaatttatctgggaaaagcggggaccgcttttcccagaaaggcacggccaagcaaatgcctcgccctgtccgtccgctcccgtccgaagccgacggatttctgaagcaccgtgcgttgaaccggatccggggacggtgctctggagtttgtcagggaaaagtgggcaccgcttttcccgaaaaacacgctcgatcaaacgggcgtcgggtctgtccgcttcaccgtgaaacggaccgacttcagtgcaggccggacaggcgcaaaaccgtgttgccccactcgggggacgaaggggcctggatgccgcccagggttccggccaaaggcgtttgcaagccgcctcccaggcgggcctcccccatctgaagcgcgccggccatcagggcgctgagcatgatcacggcaacaaacgccgtcatgtgctgggagaaagaataatggatccgaggcatgatcgcctccttgcgtcttgtcggggaaaccgcacgaaagcccctgcctgatgcgatttcacccgggccacacctgagtccagcgggactctggtccctgcccttctactaaacatattattccctaaagaaggattaaacaacatggaagaattattctttaatttttatggataaaactgaaaaattttcgttttcccgccgcatgggggagggcgatccgatacaagacgaaaacgaaacgcaatgccccggtttcaagggaaaacaagaagggggtccccggggatgggggcgttttcgcgccgctttccccgggggccgggccaaaaagcgctagagtccgtccgtttcacggtgaagcggacagactccggatccctttgtttgagtttgttgtttcgggaaaagcgctgcccccttttccctgacgaactctagggggagacccgaagaggggaaaccgcttctcggataggtcgaacacaaaaacaaagagtgaaagcatcgtgcctggctccgggccaacgcacgatgctccaagggaagatcaggaggccatcgtgtccggagcgcggtacgcggccagaacgtggatgcgaatcgcactcgacaggttgccggagcgctgcgcgtcgatgtcggtgaccaagtcgttgaccgaaatcccgcgccggcgggccagctccttgagggcctcccaaaaaggttcctccaaagacacgctggtgcggtgaccggcgattgttaccgatcgcttgcgcaccatcgggtccgcgacgacattgtccatgggtctgccaggctcctagggattggcgaaaaaagctcaaagggggaggaaagagggaagaatcagggggagagccccctatccggcggccttgcgggcgcgcttggccgcctcgaacgccttgcggccccactcggccatccggtcctcgtcgtccagcacgaacggggggaccgcccggaacttgaggccagccgacatgagaggggcgccaaacaggcccgcctcgggggtggcctcccgttcccaggcgtcgtattcggtgcgattgccggaatcgacccggaaatggaggcgtccgcccgaaaccaggccgaacagcactccatccaggtaaaaccccgtggcgtcggtcatgtcacagacctctaccgtccccagggtggcgcgcaacaggggcaggagggcctgcaccaagcgcgcccgacggagatcctcccgcccgcacgcgggcaggatcggctccttagagttgcttgaagaaatcattgcccttgtcatcgacgatgatgaatgcggggaagtcttttacttcaatgcgccagatcgcttccattccaagttccggatattccagcacctcaaccttgcggatgctgttcagggccagctgggccgcggcgccgccgatcgaccccagatagaacccgccgtgacgcttgcaggcctcggtgaccgccgtcgagcggttgcccttggcgatcatcaccatggaaccgccccggctttggaacagatccacataggcatccatccgtccggccgtggtcggcccgaacgagcccgaggcgtagttctggggcgttttggcgggtccggcgtaatacaccgccatgttcttgaagtagtccggcagatcctcgccccggtccaggcgttccttcagcttggcgtgggcgatgtcgcgcgcgacaatcatggggccactcagcgaaacccgggtgcgcaccggatactgcgacaaggtgcgccggatttcgtccatgggccgcgacagatcgatgtgcacgacctcgtccgacaggcggtcggtgcgcacgtcgggcaggtaatgggcgggatcggtttccaggtgctccaggaacacgccgtcgcgggtgatcttgcccaccacctgacggtcggccgagcacgaaaccccgatgcccaccggacagctggcgccatgacggggcaggcgcaccacccgcacgtcgtggcagaagtacttgccgccgaactgggcccccaaccccaaggagcgggtcaggtccaagatgcgctcttccagatccaggtcacggaaggcatggccggtggacgaccccgccgtgggcaggccgtcgaggtagtgggcgctggccagcttgaccgtcttcaggcaggtttcggcgctggtgccgccgatgaccacggcaaggtgatagggcgggcaggcggcggtgcccagggtgcggatctgttcgtcggcgaagcgcagcaaggattccgggttcagcagggccttggtctgctggtacaggtagaccttgttggccgagccgccgcccttggccatgaacaggaacttgtaggcattacctggggttgcgtacaaatcgatctgggccggcagattgttgccggtattgacctcgtcgtacatggtgagtggcgccatctgcgaatagcgcagattgaactcgccataggcctgggccacgccctcgctgagcgccagggcgtcgtcgtcgcccgagaacacccgctgccccttcttgcccatgatgatcgcggtgccggtgtcctggcacatgggcagcaccatgccggccgcgatgttggcgttcttcagcagttccagggccacgaagcggtcgttggccgatgcctcggggtcgtcgaaaatcgcgcgcacctgggccagatgcgccgggcgcagcaggtgggcgatatcgcggaaggccgttttggcgagaacgctcagggcttcgggcttgaccaccagcatgggggaaccgcgaaacgtttcttcgccaaccagaccttcggtgccttcgacccgacggtactcggtggtgtcggcggccagggggaacatttccgcgaaggcgggatcaatcatgccggtctctcccgaaggatatgagggtaggccctcccttgccgtcgccccggaaaaaccgggggcgcgatcaacaaccagggggccgtggacgcgaacgctcaaggtttcttgcggaagcggtccagcgtaataatattgccggggctaccctcggccggggtggatgccaagggcggcgtggcgtcgcccggagcctcgtcggtgaacaccaggccgggcgtgagcaaggccccttcgggcagggtatcgtcgtccccgaccccgttttcgggcacttcggaggcagccgggccgcccggaaccgaaaactgaaggctgaacgtcgcgtgcggatcggcaaaggtggaaaccgcccggaacggaatgaccaggcgttcgcgccggccgccgaacgacaggctgacttcgaaatggtcgggctcgaccaccaggtcccagaactggttttgcaaaacgatggtcatcgcctcggggtgctggcttttgaggcggggggccagctgaacgcccgggtaattggtgcggaaggtgatgtagaaatgatgggcaccgggcagcccctgacgcgcggtcacgtcaagcgcctcgcgcaccacgcccttcagggcactctcaaccatctggtcataggcaaagtgggtgatccggtcttccacgggcgctccttggggtccctatgaacgaataagcagggcggggcatgccacggtttcccaaacgggagcgtttctcccctgggatcccccgggcctgtccgggcctgtccccagcatagcgtctggctctccaagcgcaaccgggctcatggcccgcgctttgcattttgcgcatggcacgatctcccggacgcatggccgtaaggctgggcttgcagcaggtgggagaaaggaagcgatcagagaagagtcgaaaggtcgagccgcctgggcctaaagaatggggcggcgcgctgctttttcggggcgcccatgcgcgaggggcagggctccgagggagcagggttcttgtttggagagcagggggagaagtgggggggcttctgttgcccggtgcccccccgaaccgcgcttacggatttttaggccgcagcggcaagttcaacgttatcgttggcacttgtcagagttggtccgataacggtggtaccatgccgaacacaacccaggcctttaccacgcacgtcgatcctatttcgcccccgaggccgattccaagggatggggcccaagggatcgggactggtggaggcgccgggtaccgcccccgggtccgcaacgcttattccgcgtggggtttagtgtcatagccggcttgcaccggccctcttactatagggagggatcgcggccagggaaagaggcaagcgcattttatcacgccgaaggggccgggggcgcggttgacgacaaagggccagacgcatgtgacgcctggccccatttgtccccacggccccgaagggccgggattactgtagccgctctccgaagcagcatcttccagttaaaggcgttttaaaggtaccgtcaaccctttgatgaaaatatcgaagggaacggccatgggtcttggatggggtatcgacgttggcgtggccagcctgggcttcgccgttttggacctggacgaggcgggccagccgcaagaaatcgtggacggggtggcgcatgtgtacgacgcccccaccggcgcggtggagcggcggctgttccgctcgatgcgcaggcaaaaccagcgccggcgccggcgactggcgacgttgaaggcggcgctggtgcaaaacctgggcctggatcctggcttcgatcaggtggtgcccgacgacgagacggtgcgcaagggccacgccaacggcggcctgtcgcgggtgcgtccgcgtgccctggggcttgaggtcgcgttgtcgcccgaggacctggggcgggcgttgatgcacctggcccgcaatcgcggccggcgcctgagtcggggtttgcgggatgcccgtcccgacgacgccccggaacccgaccccaaggcgggcacgccccaggacgtgaaaaagggcaggggggcgaaaaaggccaaggcggatccggagtcgccggaaggcatggccgccgccgcgcgccggacccaggatctgctggcggccctggggcgcgagttggggcagggcgagccggccaccccggggcaatggttgcgccgcgaggaggagcgcgggaaccccacccgccaatccaggcacacgcccgatacgcccgtgttcacccggcggatgatgcaagacgaggcccggcggctgctggaggcccaggcttcttttcatccgggcctgacggcggaaacgcgcgccagccttttcggcctgattttccacgaggaaaccacggacgggcccagggtcgggaaatgtcgctatcgggtgcgcggcccggatggcgcgatcgaggaccggcttcccctggcctcggacctgttccagaccaagcggattttggaggaaatcgcgcatctcgtcaccctgaccgatccgatcaccggcacgaaggaaccgctgaccctggcccagcgcgacgggctgcgcgacaaggccctggccggcgaagacctgacggcggccaaggtgcgcgcctggttgaagctgggccggagcgccgaggcgccggttctggggctggaggttgccgcgggagcggcggccaaaaaggccggcaagggccgcaagaccgaggcccggatcgcgggccacgccctggccaaggcgttccgtgaggccggcgcccatgacctgtggcacggggccagcctggccgagcgcgaccgtctggcctgtcttctgcgcaccgtcgatgaccgggaagagctgacggaggttctggaaggcgaattcgggctggaggctccggtggccgccgcgctggcccaggcccgggttccgcagggatattcggcggccggggcaacggccacgcgccacatcatcgagcagatgcaagccgaggtgatcccggtgtcggaagcggtgcgccgcgccggcctgcgcgatgccctgggcacgcccgaggaagacaggccgccgcgcacggctcccttgccctactacggcgaagtcctgcccgaggcgtgcatgggcgggaccggggaacccggcgatcccccggaaaagcgctttggccgcgtgcccaacccggtggtgcacgtggccttgaaccggctgcgggtggtggcgaacgagttcctgaagcgctacggcccccccgaccggatcggcctggaattggcccgcgacatgcacaaaagcatcgaggaacgcgaagcccaggaaaaggaaaaccaggcccggcaaaaggaaaacgaccgccgggccgagatgctgatcagccagggcctgccggcgacccgtgacgccttgaagatgatgcgcttgtgggagtggcaaaagcacaagtgcctgtataccgggcaggaaatcagcctggaagacctggggcggggcgtggtcgaggtcgatcacatcctgccctgggccgagaccatggacgaccgcatgggcaatctggccttgtgcttgcgcgaggtgaacgccttcaagggtaaacgggccccgcacgcggcgttctacccccgttttccccggggggatggccgggatcgggattacgcccaccttctgaagcaggtgcaggaagaccggccggggtcgttgtggcgcttcgagcccgatgccctggagcgggtgcgcgggcaagagcgcttccaggagcgtttcttgaacgacacccggtacgtgggcaagctcgcgcgcgcgtatctggcccgtctggtgccccgggaaagcgatgtgctgtgtttgaacggggccatcaccgcccagctgcgccggcagtggggatgctcgaccctgatccgcgagatcatgattgacgaagggcgtctggatcccgacctgttcgcgccccagggcgatcccccggccgacgaagccgcgcgcgccgagcacgccaaggccctggcggaacgggtgcgggcgcggggcaagatccgctgggatgaccgccatcatctgctggatgccatcgtggccgggtgcgtgacccgctccgacgtgcagcgcctgcaaaccctgagcgcgcgcggcgtggcgggcgaggacgcggccaccgtgctggccgggattcgtcggggtgttggggacgcggcgccggccgggttttgctggcgcccggatttctccccccgggtcaaggccttcctgaccacgctcacgcccgagcagcccacccgtgtgacccgcaagcccgatcatgatcccaagggggccctgcacaagcaaacgcaactgggcgtgatctgcgaaaacccggaccggcccggcctgttcgtgaccctggcccgccaggaggtggccgccctgggggcgccatgcaaggaccgggcggcttttcaggaacgtttggaggagcgcctggggatcgggggcccggcgcgcgcggccctggcggcggcggtgaaggcggggcggccggtgtggtggggccgccagaaggccaccgaccccagcgacgccccgctggccgccctgggcaacctggagcgggccaacacccagctgcaagaagcgctgctggccgcctgggacagggccgccgaaaccctggacgacaaaggcaagcccaaatccggcccccttctggcccgcgaggcggtggccgaggtgctgaagcaagccaaacaataccgcttcacccgggttgagcaccaaaaggtgcgggtgctgcggaggaacaaggatgggcgcccgtgtgtttcgtatgtaacgggtagcaatcatgccctggtttgcttcaagcgccttgatgggagccccgatcttgaggtcatcacgaccttggatgcgaacgatacccgattcgttccgacatggaggcgtttgggaggtcatcttttgttcacgcttcaacagggggatcttgtcgaaatgacccctccttccttgcggagcgacgacgaggaagagaatttttggggcgggaacgcgcaatttaccggttggcctcgttttctggagacatgaaaaccattgatatcgaatgcttgcccgtccaggaaccgcgcggtcccaaggaagtgccgaagcaaacgcgcgttcgttttaaaagccgggataaatttttcgcggcccgcccggttcctgtctttctgacgccgggcggggttttgaaatggaagccaccggtgggcaattgaacgaggggagggggccgtgtggcgagtcgtggatattgccggcgacggccggatcctgaccttgtcccaccagcggctggcggtggcgggaccggaggggccgctgggtctggtgcccttgtccgatatccagtcgatcgtggtgcacgggcacggggccatggtgtcggcggcgctggtggcccgcctagccgaggaggggattcccctggtggtgtgcgggagcaaccacctgccggtggcctgctgcgtgccggtggtggggcacttcgagcaggccgaccggctggcggcgcaaaccacggcggcgctgcccgtgaccaagcgtctttggaagcaggtcgtgggcgccaagatccgcgcctagagtgagacccgaaaagtgggaaccgcttttcggataagtcgaacgtaaaaacaaatgcttagagcatcgtgcctggatcaggtttaacgcacgatgctctaggcggcggtgctggagcgtgcgggcaagcccgacgtggcccggctgcgcaccctggccggccgggtgcgttccggcgatcccgagaacgtcgaggcctggagtttgtcagggaaaagtgggcaccgcttttcccgaaaagacaaactcaaacaaagggatccagagtttgtccgtttcaacgtgaaacggataaactccaggcggcgcgggtgtattggccggccctgatgggggcggcattccggcgcgatcccgaaggtggcgggcccaacggcgcgttgaactatggctacacggtgctgcgggcggcggcggcgcgggcgatcgtgggcgtgggcctgcaccccagcctggggatctttcatgccggcaagcgtgatcccttccagttggccgacgacctcatggaacccttccgccccctggtggacgaggaggtccaccgtcatggcgacacctgggccggtccccttgatcccacccgcaaggcggccctggtggccctgaccacggcgggccttcccaccgaccagggggtggtgcccgtggtccgggtgctgattggcatcgcccagtcgctggtcgaggtgttccaggggcgccgttcccgtctctggttgcccgatgcctgggaaatcgtgcggcaggaaaggctggatctcgatgattgaaccggaagtccgtcggttggtcagtttgcgcacccgcgagcggcgcgggctgcgtcagggaggcgtttcggcgtatcgcagcatgtggctggttgttctcttcgatctgccggtggggtcccaggcggaacgccgggccgccaaccggtatcggcaccttctgcaagacgagggttttgtcatgaagcagtggtcggtgtatgtgcgctatttcgacagccgggccaaggccgaggccgccgccgaccgcctgggcgcccaggccccgcccatggggttggtcagcatgctgttcctgaccgacaagcaatacggtctgacccgcaacttcgaaggcgcggcaccgcgtccgaccgagaaaaaaccggagcaactggccctgttttgagccgttttgctccggtttttcgtcaccctacccccggaaaacaaagcgaaatcaaggaggtgggagggggtggactgtagcacggcttgtttcggagagcagctacagcttggtcggggcaagagggttcgaacctccgactgtagcacggcttgtttcggagagcagctacagcgcatacgcatgtccaggccgaaaggctaaaactgtagcacggcttgtttcggagagcagctacagctgatcaaggtccaccaaaaaaagaccggcgactgtagcacggcttgtttcggagagcagctacagccgtgcagagagcatcgaaatcccggggcgccatcgctctgacgacggccttgattctggcgaagagcatttcgatgggattgaggtcgggggaataggcgggcaagaaggacagcgtggcgccgcacgcttcgatggcccgtcgagcagcggcgttcttatggacgttgagattgtcgcaaatcacgatgtcgtcggcggccaaagtcggggccagggcttgctcgacccacgttgcgaacgcgtcgccatccatggcaccaggtaaaaggatgggagcgtccacacgctcagagcgcaggcccgcgataaaggtattgttatgccaatgtccgcggggaaccgaatcaatgcagggttggccccgcttggaacgcccgcgtaaacgggtcatcttcgtatcaaaaccactttcgccgatgaagaccaacgccccgatattaagatccgtcattccattacgccatcgcatccgcgcttcgacaatgtcttcgcgcttttgttcagaggcgaccagtgtcttttttttgcgcgtgatgccatgacgggccaacaggtgcgcgcccgcagcactggctgaaaggccgtcttccagaagcgccacaaagcgcccgcgcaaatcactcgaatacggctttcccatcccggccgacctcctgacggtcagcccgttgaatcataaaacgtgatccttgggaatcccacgcgactcaacccgagatcagagcactctaggagatgcccagtgccttcaggcggcgagagaccgtcgattggtctatcccaaggatatcggcaatttcctgctgcgttttcttctgtcgcacccgaagatcccgaatcgcttgatcctggtcggtcgatgaagaatcggccccattataaacaactgcggtctggagcagtcccccaactgtggtctcgcgcgaaaggacattgccctcaggagtttttatatgctcccgctccacgcctcccttcctcacaaatttgacatcgttttgcggatcatcccgaagaacatctagctgattcgagcctgccccgcttgtcggagtaaggtctttagccatgtcatcctccatctagcacaggtgctttatcggcgcattggtgtcccagcggtgtcccgatcaaagaaaaggctgatgctttgggacaccagcctttcttcaagcccttgaaattcaagggaaactatggtgagcccggcgcgactcgaacgcgcgacccgctgattaaaagtctattccaaggcacgccacgaaccctaggaaatccgcgtgtcagaggcccgtcgcgtatttttccatcatataaacaaggacataatttgacaaccgactgacagcgagagacacttaacgccatcggatagccgcttttggcactgacacagtgctgacacgagatcggggtaaagcgatggccgagagcatcacggataaagctgtcaaggcgttggtgcccccggagacggggaacaggatcgtgtgggacgccaccgtgcgaggcttcggtgtgaggatcaccgccaagggcgtccgggcattcgtgctggactacagagcttcgggacgacaacgccgcctgaccatagggcaatatccggattggaccgtgaccgccgcccgggacgaagccaagcggctgaagcgggaaatcgacctggggaacgatcccctggccgcagtggaagcggagcgtgaggcgccgaccgtgggcgtgctgatcgaccgcttcaaggctgaggtgctaccccgcaaccggcctgctaccgcaaccgaatatgcccggatgctggatgacctggcccggcccgccctcggcaggatgaaggctgaggatgtggcataccgggatatcgctgccctgcatcgaaaggtgtccgcgcgcgcgccctaccgggcgaacaggctggtggccgtgctgtccaagatgatgaattgggccgggaaggagggattgcgcactggccccaacccctgcaagggtatcgagcggaaccacgaagaccgccgcgagcggtttctttccccgcttgaactggcgcacctgtcggacgccttgcacggactgcaagaccgccggagcgcggatgccatccgccttcttttgctgaccggcgcccgccgtggtgaagtcctgtccgcaacctgggatcaattcgacctgtcggccggtgtctggaccaagccatctgctcacacaaaacagaagaagacgcaccggatcccgctgtcggcgcctgcgcgcgccctgctggccgacatccgggcgcgacaggatggaggcgccgcctacctgttccccggcgagggtgccgacgcgcacctgatggacgtgaagaaggcatgggcgagcgcaacccaacgcgccaccatcgccatgtgggacgcgcgcgtggacaccgaagccggccggctggtggccgacctgacgacggacgggaagctgccgacctggaccgccgtccaggcggaggccaaggcccgggggattaccttgtccgccggcctgacgaacgtgcgcgtgcatgatcttcgccacactttcgcgtctgttctggcatcggccggcctgtcgctgcccgtgatcggcgccctactggggcacacacagacggcgaccaccgcgcgatatgcccacctgattgacgatgccctacgggccgcgaccgagcgggccggaagcctgatcgacgctgctaccgggccggaagctgaggtggtgccgctgagtcgagacagtcaaaatggttccgattaggtactaatatgcgtaaacgcataaattgatagagtgaaactgaaatagattgctggttgcgtcaaaaggaaccacaatggcccccattggcacgggatgacgtgtcttgctaacaatgagggactaccatgcacgcggagatgtccactggggcacccctggagaatgctgcccccgcgcttgatgaaaaccgtcttaccatcgaggggcgaacgtacctgacccgcgccgggctggcccgcacgctgggggtgtctgtgcgcaccttgacccgctgggagaccgcccggatccatccgccgcgcgttaaaatcgccaatctggtgctttaccccgaggcggagatcccggggtggctggacacacacacggtgcggacgccggcccggcgcgggcgggcttaagccatggcccaaaacggagaaaccccggccgcgctggcgggcgctggccggggtctggatacatcggcggcgggctgtgatgcggctgatagtacccctcgcgctgaccgtaagcaagggtcgctggcgaagctgactgtcatcacggccgcaaagccggcccggctggccaagtcctaccggctcgacgccgacggcaagttggtcaaggccggggccggtcaaatggtgcgggggcgagccgaagttgtcactgtgagcggtctggacgacctggccgcctacctggagctatgccttgggccggcgcaagccctgacctacggactgccggcccggcacccggtggatctggtgccgcatcgtgattgggtcgctgctggccagccgcacgggcagctacctcgcaccctgaatcatttttcctggccgtctggtcctggggtgatgatgctagatcatgacccggcgcccggcgccaccgcgctgtcgcgcgacgatctggtggccgcaatccgcaccgccgcgcccggcttggccgatgccgcgatgctctggtggtgtagcgcatcgtcgcacatcatccacggcgacaccggcgaggatctgaccggcctgcgaggccagcggctctatatactggtggccgacgccagcgacattccgcgcggtggtgccgcgctggtcgaacggttatgggccgccggatacggacatatcagggtgtcgcaatcgggccagcggctggaacgcaccgtgattgatgccagcgtgtggcagaccaaccgttttgactttgcagccggcgccgcctgcgaaccgccgctccgtcaggagcggggcgcgccggtggtgatccctggcgccgtcgaagtggtagatacgcgggcagcgatcccggatcccgatgccgaggtgcgcaaggccgccgacacggcgaaggccaacgcacgggccgctgcgaagcccgaggccgaccgtgcggcggctctgtgggccgacgccagagcgcgggacatggtggccgagggcgcgacggagggcgagcgcgaggccgcccggcgcactgccgtccaggcgctggaaaagcgcaccttggccggcgattggccgctgatcgcgatgattgacggcacggaaaaccccctcaccgtggggcaagccctggacgatcccgaccgctggcacggggtccgcacgctggatccgctcgaaccggattacgacggccggcgcgccgtgggaaagctgtatctgatcgatagtcggccgcatctgtacagcctcgcccacggtggcatgtcataccgactcgtgcgccagccggcgcgaatcgagatcgtcaaggggcaggtgtccgccacggtggacgaggccctgcgcatcatgcgcgcatcgcctgacctgtacgatttcggcggcaccctggcccacgtcgagggcgggcaggtccggccgctggacgagcacacggcgacatatcacctgggccgcatcacgcaattctggcgatggcaccggatccccaaaggcgagccggtggaagtgctggaggatccgccggcacggctggtcaagatgatcgtgggcatgggtgcggcgcgcggtctgaagcggcttgatgccgtcatcacggccccgaccatccggccggacaagaccgtactggatcggcccggtttcgacgccgaaaccggcctgctactggagccgagcgacgacctggtggaggtgcccgacgcgccgacgcacgatcaggtccgcgaggccgtcaactgtctgttgacgccgtttgcgggcttcccgctcgttggcccgggcgactggggtgtgctgttggccgcgatcctgaccgccgttgcgcggccggctctgcccacggcgcccggcttcgcatttgacgctccggtgcagggcagcggaaaaacgctcctggcgaagacaatcggcaccctggcagcggggcgcgagccgcaggcatggccgcacaccgccgggcgcgatgacgaggagacgcgcaagcggctgttcgccatgttgcggaccggcgaccgcgttttgctctgggataacgtaattggccgttttgagagcgcggctctcgcaaccgccctgacggcgccaatgtacaccgaccgcgtgctgggcaaatcggaatcgcccgccgtgccaaaccgcgccctgctgctggtcacgggcaacaacctttcgctgggccgagacctgtcacggcgcatcctggtctgtcgcatcgaccccaggatggaaaagccgtggttgcgtaagttcgacctggagccggtggcgtgggtacaggggcgccgacaggccatggtcgccgccgcgctgaccgtgatccgggggtattggaccggcgggtgcggccgggcgcctggggcgtttgcgtcgttcgagccgtgggacgatctggtgcgccaaccggtggcctggatcgggcgcgacattctgcccggcgagtttggggatcccgtgggcgccgtcgaggccagcacgaccgccgaccccgatgaagaggcaaccggcgcgctgttcggcgcgctgcgggatcggttcggcgacgagacgtttttggcgaaagacgtggcggggtgcatggccgagttgacgcccgacgataaggccgtgtcggaagcaatccgcgagattttgccaagcacccaaagtgcaaaatcaatcggaaagattttgcgaaacagacgagaccgcatcgtttgtgggctggcgatccggtgcgcccccgacgcgacgggtacaatgttgtggaggattgcacattcggcccgtgctgagtgtgcataattttacccatccgggtttaccggctttatcgggtttacataccctctaacacgaggactcatgaaagggtttggtatgagtacgcatatggaaggggagacaaacccggcgaagcctgtaaacccgggcacgcaaaaaacacacgttcagaccgaccccgacctggaccgcctacgccaaatcctggacggcttgggccacggcggcaccctgccgcccgaggctggacggatccgccgcaccctggccgaacggttcggccggcgctgggggctgaccctgaccccgccgctccgcgagtttggcccccggtccctggccgagatggccgggccgaggaggtggcgccgcgatatccccgactggccttatacggtggcggatcatcaccagtgcttcgccgacgcgaccggccgcgcggcgatggtcgcatgccacaactacagttggcatccccatgccatccgcgagtttgcccgtcggcatgggctggtggcgctgatcgacccggccgatccggagggctggtggtggccgggtgggccgacgtacctggtcatctacaggcccacgacggcgcgcccgctggacgggctggggctggtggcatagccgcttgccccctttggccgctttccgcattttttgcacaaactccgaacgtgcaaaaactgcgggttcggccccccagaatacccgggtccttccaggggtctttaaccgagggtgagcgcccgtcgcgatgccgccctagcgtctgcctattttttaggctaaactggcctaatcgcatataaagtaggcaattccgatgcccgacaccgaaaccaaatccgcttttgccgcgcgcgttggcgtcacccctggccgcgtctcgcaactgatcggccagggcttgcccctgaccgaggacggcaagcgggttcgggtggccgaggctttggcctggctggatcggaccctatcgccgcatcaggtgctggcccagaggcgaccgaggcccgacccgcccaaagggggccctgaatcgcagacccctttgcccgacccgcccaaagggggcggggaatcgcacccccctttgcccgacgtgccggaaggcgactatccggaggcccggcgcgtacacgaatggcacaaggcccgccgcgccgcgcttgaatacgaccgtgcccggggccgcgtcatcgatgccgacgctgcacggcaagaggcgttcgcccgtgcccgggccgagcgggatagctggatggcctggattcaccgggtggcgccgatcctggccgccgagcttcgggccgatgaacacgccgttttcgtcgcgttgcagcgggaggttgacgatcatctttcctggttggccgacacgccgcttgccgccatgggggccagcgatggggatcattgacgatgcccgacgcgacggactgcgaccggcgccacggctgaccgtctcggaatgggcggaccagcaccggcgcctgccgccaaccgccgccgaaccgggccgctggcgcaccgaccgcacgccatacctgcgggcgatcatggattgcctgtcgccatcggacccgaccgagcgcgtggtattcatcaagggcgcacaagtcggaggcaccgaggccgggcttaattggatcgcctacgccatccatcacgcgccgggcctgatgatgctggttcagcccagtctggacatggccaaacgcaacacggtaacgcgcattgatccgatgatcgccgcgacaccggccttgcgtgatcttgtcgttgccccgcgaagccgcgaagccgggaacagcatgttccgcaaggcgttccccgccggggaactgatcctcaccggggccaattccgccgccgccttgcgatcgaccccggcccgctacctcttcctggacgaggtggacggcttccccggtgacgttgacggcgaaggcgacccggtagacctggccgttcaacggacggcgacctttcgcgggcggcgcaagatcctg

SEQ ID NO: 969 - DNA, 5365 bp, synthetic construct
  misc_feature 1..5365: note = Synthetic
  source 1..5365: mol_type = other DNA
ggtctgccaaggcccgaattcctcgggtaaatcgcgccaaggtgcccctgttcgcaagatccagatgaccccattcaagataaaacgcgtatctgttgaaggtctccctctgggatctttgcgcaccggacggacatggggttcaattcgttgccatagttcatctgtaatatcgtgtctgctcatacgggcagcatgacatgaataggatttttgtctagattttttttagaaacaggccctaggcaggaccgtattttcagcaggatgttacaatgaaaaagggcttacgattttagtcgtaagcccttgaaatatggcggagagggagggatttgaaccctcgatacaggtctaccccgtatactcgcttagcaggcgagctccttcggccgactcggacacctctccaatgagctgctttgcataaagcaaaagcaatatttcgtgaatctcgaaacaaaaatactagccgcatggcattgtctttgtcaagagtttcagtgcattttttccgctttgaattgacagggacgtcacgagggagaacctcctcaccaaggcgcgttcggtcggatacggcgccatggatcatcgacccctcttgggtaatgagcgcatagcgttcccggaccacaaaccacggctggcccgcatcaataaagacacgggccagccggctgctctggaagaaccagattaccgtggttccgctccagattaaactgtgctatacgcatagtgcgctatgtatcaacatttgtcaagcgggaggacgtaatttgatgttggtgaatgataatttatgcttagggttggacataggtataggttcgcttgggtgggccttggttgcatatgaagatggcgataacgcttcattgctctatttacccactaacgggggcggcagcaacgccgctatgggcgtgagaaccttcgacgtgcctgaaaaccccaaaaccaaggaacttctgaacaagcacaggcgggaggtgcgtcggcagcgcatcacgatcagacgcagggcgaagcggatgcgggatgtacggcggctgttgcggcggcatggcctgttccacgcgcaacccggcggcgttgcggcggactgcggcgcggacccttgggcattgcgcgccgccgggctgaaccgcctgctgctgccggaggaattggccgtggtgctgctgcatatggccaagcaccgggggttcaagtccaacagcaaggccgacaaagccagcgcctcgtcttctgacacgggaaaaatgctcaaggccgtgggagcgttgcaggaagcggtgcgtgaaaacggatacagaaccgtgggcgaatacatggcccggcaggagcgcaagcgcaaccggagcggcccggatggaaaacccgtgtatgaaaacaccatgctgcgctccttgctggaggaggaagccgccgtgctcttttcgcgtcagcaagatttcggctccacgcacgccacgtccgaactcctcgaagcgtatctgaaggcggcttttttccaacgccccctgaagagctgggaagacagcgtggggcagtgcctctttgaaaaggatcagaaacgcgcccccgctttgtcgtatacggcggaaagatttcgcctcgcccagcgcctggtgaatctgcgtatgcgcatgcccgacggcggcctggagcgtattccctccgacaaggtgtggagcgtgatcggccagatgggaaaatggagggggctttccttcatacggctcaaaaaactcatcggatatgaccatgtcacctttgaagggctgaactacgggcgtcgcgacaaaaaaggcgagatcgtggaccctgaaaaacaggatgtctgcggcgtaagcgcggggtgcgcccagggcgtttacactttggccggcgtgctgggcttcgacggcgtgcgggatctggcctcgcgcagaaccttggaggggcgttcgctcctggacgccgtggcggttgtgctgaccatgcacgacgacatggaaaagatcggcgcattgctgcgggaattgccgctcaccggcggggaatcggaaaaattgctcaacgctctggagcagggggctttcgccgtgttcaggcgttttttcaaactgtcgctcaaggccatggagcgcattctgccgcatatgatcgataacggggattacgcccttggctgcgaaatggcgggatatgaccacgccaaggcgcgtccggtggatctgcgcgccgtgcggaaccccgtggtgctgcgcatcgtgagcgaggtgcgcagacaattcacaaccatcgtgcgccaggcgggcgttattcccggaaaagtgtgcatcgagctgctgcgcgacgtgggcaaaagcgtggaggagcgcaacgccattcaaaaggggctggagcgccgttacctggaaaaacaggggaacagaaagcgtttcgccgatttggtgcaaaagaaacccgaagaggtctcgcccacggaactcctgcgctatgaactgtggaaagagcagggggagcgctgcgcctactacttcctgtggaaagaccttggcggagagcgcgcctatgaggcgcgccacggcatgatagcggtaaacgagctgctcgacgggccgaacgccgcgcagatagaccatatcctgccgcgcagcagaaccttcgacaatcggttcatcaatctttgcctcgcccgtgtcgaagccaaccaggccaaaggcgacagaacgccgtgggagtggctcggaagcaggaacccgcaacaatggcacgtgttcgaggaatgggtcggttctctgcatgtcaaaggcctgaaaaagcgcaattaccttctcaagaatcttgacgcggacatggagggccgctttcacgagcgcaacaaacacgatacgagctacgccgcgcgcctggtgcagcaatggatcgcggaggaatacgaaagattgggagcgcccatggaacgggagcgaggcggcgccattcgccgcgtcttcgccaggccgggaagagtgaccgcggatctgcgcaaggcctggggcgtggaaagcctgaaaaaggacgcctccggcagaaggctgggggatcggcatcatgccctggacgcgctcatcgtggccctttgcacggaatcgaccctgcaaaggatgacgcgggcctataagcagatggagcagtggcgggaaaagaatcgcctggtgcccaacatcgccccgccttgggaaaccttccgcgaagacgttgccaaggcccttggttcggtttttgtctcccgtaaggagcgcggcaaggagcgggggcggctgcacgaggataccctgcgccagatccgcagcgaaacgggccaggacggccggcaggtggagatgctctacgagcgcgtgcccgtgcggaaactggccctggccgatctcgaacgcatcaaggacgtggagcgcaacggctggctgcgcgatatcctgcgccattggatagaacggggcaagcccgtttcagcccccccgcgttctccgaaaggggatgtcatccgccgggtgcgcgtgcggcgtgggccgtataccagcggcatgctcgtgccccgtggggatggccgcgcccaggcggacaacgcggccataatccgcacggatgtttttattaagaaaaacaggtactttctcgttcccgtgtacgccagccgcattgccgcgcctgcgccgccgaatctggccattgttccggggaaggaggaaaaggactggctggagatggacgcggactgtgccttttgtttttccctgatgaaaaattcctatgtggtggcggaaaagggcaatggcgaggtggtggaaggctattttgtcaatacggacagaagcgtggccgcaatcaccatcgccatggccaacgaccacggcataagtacgaaaatcggcgtaaaaacattgaaaagctttattaaatgtcgcgtggacaggctgggcggcgttcatcccgtgaaaaaggagacacgcacatggcatggcgaggcctgcacataagcaatccggcgcggctctttttgcgtgacaaacgcctggtggtttcaccggaacagggggcggagttttccatcgccctggaggacgtgtcctacgtggtcctggacacgccgcaggtcagcatgacggcggccctgctcgcggcgtgcgcctccgccgattgcctggtgctgtgctcggacgcccgccatctccccaatggcgcgcttctgccgttccacggctatcaccgccaggcggaaacggtacgcagccagatggggctttccctgccgcgtatgaaacggatgtggcgggacgtggtgcgcgccaagatagaaaaccaggccagggccctggaaattctcgggaaaggcgcgggaggcgcgttgcggtccttgcggcgcaaggtgcgcagcggagatgcggacaacatcgaagccctggccgcgcgccgctattggcaggcgtaccagcaacaacatgtgcggcgcccccgcaatcaggacaggggcaatgcgcttctggattacggctacgccgtggtgcgcggttgtctcgcccgcaatctcgcggcctacggcttttggcccagcttgggcatacaccataaaagcgacaccaatccctttaacctggcggatgacctgatggagcctttccgccccctggttgacgtgcgcgcgtacaggcttctggaaggggcggaaaaagcggagatggaccttgcggaccggcggagcatggttctgaccctgcacgacgaggtgctgctggaacaagcgaggatgacgtgcgtttccgccatgcgcagatatgtggagctatttcgggagggcattgtccgcagaggagggcgtttttctctcgagcccctgctgccggttttgccgcttgcataaggaggcgacatgtcccgcgaagaggtgcggtttatgagactgctcgtgctgttcgacctgccggtgaaaacaaaggatgatcgcaaggaagccgcggcgtttcgtcattttctcataaaggacggctacgatatgctgcaactgtcagtttatatgcgtatctgccgggggcgcgacgcagtggacaaacacatgcgcaggctcgccctgagcctgccgcccaaggggtgtgtgcgcgtgcttgaactgacggacaggcagtatgcccggatgcagatccttgtgggaccggaaaagcctgtggagaaagtggccacgcaacaactcctgcttttttgaaaaaaagcgggtcatggtggcgcaaaacaacgataaccgcctttttcccggatgaagattttccataatcatctgtggaatgaggcggttatctgttgactgaaatagcacagttcagtctggaggggaacc

SEQ ID NO: 970 - DNA, 23777 bp, synthetic construct
  source 1..23777: mol_type = other DNA
  misc_feature 1..23777: note = Synthetic
tcgcccctgtcttcatcgttgacctgctcagcgaaatcgagaaaggcgccgggctagggctagaagtgcgagcttacgagcagtccgagagtgagcccggggtcttactctattcgacttgcggacaggtgagtaatgccggacatatcttaaatgtcatcgagcatgagcgcactagcatcgagatctttaacgagtacgaccacgagctcaagaatatcaagctaatagcagcccgttttacccacccagagattactcctttctatatttgcaaacagatcgccgggtcaggtagcctcaatgaacgaactgcctgggagatcggcgaggatggtaagctgcagcagtttagcgctgctagcgcctttaagatccctctcgacaaccaggttctgatcgccggcaatggcgacaatgacgccgaccgacgaatcttcgccttcgccccgaagaaatttgaggcgatgtttggctacaattacaagaagcaggctatcgccgacaagaaggttgagcagatcttgtctcgctaccagcttaacttcccggaggggcaagacctcaataccatggtgtcgggtcatcctaaactaatcaataaactccagaatctagagcttggcaccaagactcaggaagagttggttgactacggcgaagagatggggctggatctgatgaccactgacgacggcgctatcatcatcatggatagccgggacatagagaccttcgtcggcttgcttaatgacgactacatgaccagcgacctaaccgggttaaagtacgagatcaaaggcaagaaactactggaagatcgcccggcagacgaataagctcttaaatcatcaatcaaaaagcccgcccagaagcaagggtgggcatcgcttctgtagcgggctatttgacctctcgacgcaccattccggctactgacaaccagtaagcgtaacccacctcacacttggggctcgccggtcaagagggttagatacgtgccgactagctgtcgccgaagcgatagctaaaagtggagggtagaatacttcgagtctgcacgtagcctaacactaattagtgttatgatagggggtataatgtgctagtcgggcattagcagtggctatcacccgataacgctgatatattagcacgctttgtcgtgattgtcaactactttagcaggataatggataacatcaagcaaatactccctcatgacaacgattttctccagcggacggccgtcattgacaagccggccaagaagctgtggtacatcggtagtatcccaccgctcacaccgaccgtcgccgtcgtcggtagtcgcaagccgaccagctacggcagagctgtcaacgcccagatcaccggcgagctagctcggcacggagtagtcatcgtcagcggactagccattggtcatgacgggctggctcaccgagcttgtctcgacgccggcggcacgaccgtagccgtcttgggtaatggactggctcacatttacccgcagaccaatcgcactctagctcagcgcatcgtccaggcaggtggcgccttgatcagtgagtatccgcccgaggcgccggtcttacctcatcagttcttggagcgcaaccgtttgatcagtgccctcgccgatgtcgtggtggtgatcgaggcaggcgagcgctccggtacgctcaataccgcttcacacgccttgactcagggcaaagaagtgatggcggtgcccggtaacatcacctcgccgctatcgaccggctgcaacagattgatcgcccaaggtgccggcccagtgctcacggcgcaggacatcttagatcgcctgccgctcactgaggcagaagaccgacccgaccgtcaagccgagagggcggatcaggttcgcttcgactcgcccgacagtcagaccatctacgacctgatcgttcagggtgaaagcaatggtgaccgcctactaagtaagagtggcctcagcaccagtcagtttagccttgccttaaccatgcttgaactaaatggctacatcgtagccctaggcaacaacacctggggcaggcgctagccggaagtcgctcaagcttgacgaccacccgaggtaatattacagtaaggttgttacctcaaagtgaggtaatctagcgccatgcgctagccaagccgaggggaaggaggggatgatgaatccccgcaaacctcttaagcccggagatctcctggtagacatccgggtaaatggtcgactcattgggaagatagatcccactgagttggtggggatattcgcccggacggacgaatatcaattaattgaagggttgcgttaccattgcgtacgctatgagtcgtacgacagacggcgctacctttcgagaaggaagcttgtccaccttgagccacccaaggtggacaggcaaagggctatacgcatttcccccgacggggtaatgctgctggggtggtcggtcatggagaccggccaaacgataaagctttccatccggacggatgggatggccatcgttgccgagtaaccacccccaagcccttaaagccccgaccggattcgttcggtcggggtgttttctgattgtgctatacttgaccaaatgaaaacaaccaagatcaagaacctgattatcgtcgagtctcccgccaaggctaagaagatcgagagcttcctcggcagtgactataccgtcatggccagcattggtcatatccgctccatcgctaagaaagctggcggcggtgtcaagccgattgataccgaacacgacttcgccactatttatgagattgaccccgagaagcggaaagtggtcaaggagctgaaagacgccgtcaagcaagctgagaccgtttggctggcctcagatgaagaccgcgagggggaagcgattgcttggcacctctgccaggtgctggggcttgacccggccaaaactaaccgcatcacttaccacgagatcaccaaggaggctattaccgaggcactggctcatccccatacagtagatatgaacctggtctatgctcagcaggctcgccagatcttagataggctggtcggctttgagctgagtccggtagtctggcgtaaagtcccgggcggcaaatcggccgggcgagtccagtcgccggcagtccgcttgctggtcgaacgggagcgagagatcgagcactatcaaactacctctatttataagacaaccggtatgtttaatgccgacagtcagagctttaaggcgactctcgacactgactttaccgacaaagagcaggccaagcaatttctagccggtctgcccggcagcacgtacaccgtagccgacatagccaagacgaccggcaccagacaccctttgccgcctttcaccaccagcaccttacagcaggacgccaataatcgcctcggctacagcgctaaggcgaccatgagcattgcccaagggctataccagagcggctacatcacctacatgcgaaccgactcagtcaacttgagcaaccaagccttagctcagatgaccgactatattggcaagacctatggcgatagataccatcaattccgcacctttatcactaagactgccggcgctcaggaagcacacgaggctatccgcccgaccgacatagccagggaatccgtaccgggtgatagccgagcccagaagctttatgacctgattcgtcggcgcactctggctacccagatggctgacgctaagattgaccgaacgaccatcaccatcgacattagccggcaccaacccaagtttacctctaaaggggaggtgctggttttcgacggcttcttaaaggtctacggtagtagtaaggatgagatcttgcccgacttagctactggtcaagccgtaacagcgaacgaaatcgttgcccggcagaccttcagccgaccgccggctcgctacagcgaaggctcgctggttaaaaagctggaagagctggaaattggtcgcccctccacctatgccaccatcctgagcaacattcagctacggggctacgctaagaagggtgacagcgacggggtagagcgaccggttaacgagctagtcctccagagtgaccagctgagtgagcggactgtccacgaaaaaaccggctcgaccaagggcaagctagtaccaaccgatagcggcatcatcctgtctgacttcctggttgactattttaacgacatagttgactacgacttcactgccggcatcgagaatgagcttgaccagatagctgaccatcagctggataaagtcaaaatgctccgccggttctacgaccccttccatgacaagatcaaagatagcgataagattgagcgttccagcgtagccggtcaacgactggtcggcaccgacccaaaggacggccagcccatgggggcatacggtgctatgctccagaaaggtgatagctctcaggaagacgccagagtgacctttgccaatatgcccgagggggcaagcattgccaccgtcaccctagagcaggccgtcaagatgttccagctacctcggaaagtcggcacgacagctgacggacaagaaatcatcgctaacatcgggcgtttcggtccgtacatcaaggtcggcaagctcttcgtcaatatcaagccggagtcgccctttgaaatcagcgaaaccaaggctagagagctataccaagccaaactggaggctgaggcagccaggcatatcgccagttggggcgaggttgaaatcctgaatggtcgctacggaccatatgtcactgacggtactaagaatgccaagatcccgaaagataccgacccgaaatctctgactgaggagcaggctagacagctactcgccgacgctcccgcccgcccggccaggcgacgaggcagaaggaaaacagcgtaaattacataactagtttttatcttcgtacatctagctagcaatacggttcaagaatcaaattgctcgccaccatagccctcattcttcactctatcatcattttcctcagacccgcctggctggctcgtgcactgctgagcttcaagcgtgcacagtcttcaggaaatgactgacgcagacgaaggacgaaagacacccttagcgtgacaaaaggtaatgtacgtaagagcagggcgatatggttgacgaagactgttgatataacagcttggtagcaattgcacgtggtgtcttatgcgtcgccagcctgtccagctgatgccagccagactaactaagcacagcaaagcattatcatgtcttgggcttcctttgcggttgtgagcgttaagcatcatgctggagcctgaggaagctaggtgagctactccgactagagcgttgacacacgtaatttccccagtctcatttcctaatctagcctcaattaaaacaggcattcctaggtacgagtagtacagtgtggttgacgaaggctgttgatatatcagtaagctatccagtgcacgtggtagtttatgcggtgccaagcctgaggagaccacctgtactactcgcacaaacctggactatacgtggagggaaattacaggtatgattgcaaatgaaagattagcggaaaagcctaaaacattcgcccgctaaatatgataagataactggtgatgatacagtggctgtttaccttctttacccagtggtacatctggatgcctctcgtcggcatcctcagcatcttgacctggcgcaactatcatagccttaacgaccccggcgatgcttacgactacgtcctcctggctctggaaatccctcgagataacgacaagaaagagctctctgccgagcagctcttcgcctccttgcacggtatcctccgtgacaagcaggagctccaccgagccaccggtgttcaggagcacctctcgtttgagatcgccagtgtgggagggcagatccgtttctatgtccgcacccctaagcatctgcagaacttcgtcgaagggcaaatctacgcccaatatccaaccgtccagatccagccggccgaggaagactacgctgacggcatcaatgctcaccgagccacagcagttgatgagctagtcctgaccgacaacgaattcttgcccatccggactttccaggcgttcgacgtcgacccgttagctggtatcaccgccgccctgaccaagctgggcagcaacgacgaggagatctgggtgcagatcctcgtccgacccataccggatagctggcagaaagatagtgccaagtacgtcgctcgctatcgtagcggctttggctcgccactccgctcgggtgccttctactacgtcctccaggcactggaggcactctggcaaccgcccgaaggaaacgacaaaaataccgagctgtccgaccgtgacaagctgcggatcagcgagatggagaagaaatcgcagaagctgggctacaaggtctgcatcaggctagcttacctcggacacgaccaagactcggctcgcatccagatgaatgccgtggcgagcgcctttaagcagtttaactcgaccagtcttaatggcttcaagctggctactcagcctcgctacgatcgggcggcgctcgacctctgcgccaagcgatctttcccggatggcacaggcttcatcttaaatattgaggagctggccagcgtctttcatctaccgcacatgaatgtcgagacacctagcgtagtctgggctaattctaagaccgccgagccgccgaccaatctgccggtacttgatggcgacccggtccacgaccgagatatcagcgccttcgggctgactaacttccgaggtatgcaaaagcagttcggcatcctgcgagctgatcgaagccgccatatgtacatcatcgggcagaccggcacagggaaatcgggcttgcttgagctgctggccttatcagatatctaccacaatcagggctacgccatcattgacccgcacggcgacttcgctactgataacctcaagtttatcccgccgacacgagtaaatgacgtagtctactttaaccccgccgacaccgaccacccgatcggctttaacccgatggaggtctacgacccgaatcaacgcaataatatcagctcagagatcatcggagtgatgaagcggatgttcggcgagagctggggcccacgactagagtatatcttgcgccacaccctgctcgctctactggagtaccccgacaccaccatgctggatatcaatcgcatgctaaccgataaagacttccgcagtcgggtgctatctcaggtcaaagataccgtggtgctccaattttggcgagtcgaattcgccggctggaacgagcgctatgtctctgaggcgattgccccggtgctcaataaggtcggtgctttcgtggccaacccggtcatccgcaatatcatcgggcagcccaagtctagcttcaatatccgccagatcatggacgagggtaagatcctgatcgttaatttatccaagggattgatcggggaagacaacgccgccatcttgggctctttcttagtaactaaaatccagctagccgctatgagtcgctcggatatccctcggatagaagatcgacgacctttttacctatacgtcgacgagtttcagaacttcgccaccgactctttcgccgtaatcttgtccgaggctcgtaagtacgggctcaatctcaccgtcgctaaccaatacatatctcagatggaagataccgtgcgagacgccgtctttggcaacgtcggtactatggtctcgatgcgagtcagcccggaggatgcaccaatcttagcccagcaattcgcccctaatttcgaagcgcaggatatcttgcagatgaataatcgccatctcgtctgcggcatgatgatcaatggcgagaagatgcctgctttctcaggcaccaccctcaagctgccggaagcggggaagggctacattgaccaaatcatcgagcactccagggctaattacactcgtcccaaagcggaggtggaggcagagattgccgagctggtcactccaccgatggggctaatgtccagaaccgcccgagataaggcgaagaaagccctcaaagagcaacaacaagccgccgctcagtcaaccgccaaccagctgaagaatatcagcagcctgatggcacaaatccgtcagactgcccaagctggcgaccctgatagcatgaagattgagccgactcacgagactagcagtaagagtaatggcaatagcaacggtggcggtggcagcaataaggctcgttccggcggtagtcaggcagggcagggcagtcggagcggtcagaatcaaggcaataagaatcagcccaagaaaaataagaataaagctaacaagcataatcgtggggtagataaaggtggtcaacccggccggccgattcccgcagcttccgtcagtcagccaagctcaccgaccagctacgtcagaccgaatcgccccctgcctcagccgcacccaagtcagcccgccaagccggataaaccgacctcggtagcaccgcccgccacccaggttcacgagatcaggtttcattagggccggcaataaaagaaagacccgacctctcgccttgatggctggaggtcgggtaggttaactgccggtggtggataacggcagttcacggatagctagcgagccaactatttcttcttgccgtcgccgatagcgatcttgtgtggctcaggcagcttggccattgggatggtgaccactagcttgccgtcaaccatatctgctttgatcgcctctcggtcagcccgctcgggtagagtgatggagcgatagaagctattcgagctctctcgcacgaagtacttcttatcctcgtcttcttccttatcatgacgctcggcgctgatcaccagattgtccttgtcgatgctgatgtcgacatcttctttatcaaagttgggcatgtgggtctcgaccaccaggttgcccgccttctgatatacatcagtcaccggaatgttgctggtcatggtcggtagcagcaggtcgtcaccgaagaagcggcgctgcaagctatttagctcctcaaacgggtcatcatacttgattaaactgctcatatcatcctccttttattacgatggtatcaccatctgctagtagtatagtcggttagcactcacacgtcaagagtgccagcgtaagcgtcttggggaagaaatatggggcgatgcgaacatcgcccctggagggaatggatagaggaggaaaattacaattcgatgcgatagacatcacctccgatctgcacaagtgcgcaggactgattgagcctgcgcatcattttctcgacaaaggagaagaacggccttctgcagtacgggtcccctccccgcagatgggtctcaagccgcaacgcgacctgggagccacccaatttctcctggcacgtctggtgtaccaggaaaaaggtgatattatcaagcttatggtcaatggattcattgcgaatccattgaccaatcttactcaggtcaacgtccccctcgtaacgagggaaaccatcgcccagggcaataacgatacttgccgctatcgccctccgaaactttcttgtagacataccgaccacctctctgacggcaccgcagtaccatcaagtcgcttggtcacagcccgtctgtgacctcacagggagcaggagagacctgcgcccggcgagaccacagacatatccatccacttcatcataaagtacaccgcacccacctacagcactactatcatgacacatttgacaggaaagtaaagccagctattgcaatccggccttgatactctataatgagaatgtacactcgtgggagcatgattgtacgactatctgaattgcttaggtttctataataatttagtagaaatactaaagcaaagctctaatccgtctctttatgaggcggattatctttgtctataggctacttgacccaaagaggctataatagaggcatggacgatggtataaagtattccctagggctcgacattggcacgacatcagtcggttgggcggtagttaatctagataaagaacgaatcgaagatctgggtgtccgtatttttgagcgtccagagaaccccaagaacggcaaatcattagctgagccccgacgtactgcccgtagcacacgacgtcgcttgcgtaggcgtcgccagagacttaattatctaaagcagttctttattaaccagggattactgacaaagcaagaagtcgacgacatcattagctctgcccacaccaaagcctggcatcaggcacatgacccctatcagctaagggtcaagggattgaccgaaaaattatcaccggatgagctcctaatcgctctctatcatattgctaagcgacgtggctacaaatctaaccgtaagtctattgagcaaagcgataccaccggtgatggtaaaaaggtaaatagcgccattagcaagaacgaccagatattatctgagatgaaatacagttcggtcagccaagcactcctagccgacgatcggttcagagaacgcaaacgtaataccattgacgattatcgttactctttctctcgagtagattttctcgacgaaataagacatatccttgaccggcagaaagacttttaccctaacgaactcagcatagaccacataaatcaactgcttggcatagatgtatatcatgacgaaaatggtcagccgattccgatagatcacaagctaaccaataacgatatcaatcgactgactaagcatggtcaaaccacgctaaatggcatcttctatcagcgcccatttatgaccagtgaactaattaaccgcatgcggggcaagtgccctctagagaaagatcagcctcgtgcacccaaagccagctattcattcgaacttttccgcctagccgaggacttgtcgcacttacagtatacactcgacttcgttgagaccggtacggactggcaagtgcgcaaagaacgcaagcgccaggctcagttcttgaccgccgaccagattaaggcatgtgtcgataagtgtcttaaaactcaaaccgtcaagtatagcgctatcagagaggtactaggctttaaggacgataatagctttcaatttacctacattagaggtaagagccctgacgaaaagactctagccaaagatcctttagccaaggagaagaatacctttgctcagctcaggttttatcatggcgtcaaatcagtactgaaagatctgcccaatgactggcaagacgtctctagcgaccaagacttatttgataagattggtgaagtattaacctgcaacaaagatgactatagcatcagagaaggcttgatagaggtcaacaaagaccggtccgcccagggcaaagccgaattatcagacgaagcgatcaacgctatcgtcaacagtaagcttagcttcgccggctttggacacctatcactggtagcattacgcaagattacaccatatctactaaaaggtaatggcatgacatacgataaggcagtagaggaggccggctatcaattcaacgccaagctgtcgggacacaaaaaccttctacctccgctcagtgaggaggagtcgcaccagataactaacccggtggtcaagcgtgccgttagtcagaccatcaaagtagtcaacgccatcatccataaatacggtgcgccgtaccgcatcggaatagagtgcgccggtgaattagctaagagctttaaggagcgtgaagatattaagaagcgccaagataagaacgccgagaataatcaagaggcggtcaaggaattacggtcaggtaagctggtttctgatggagagcagtttgaggcacagattgcgccaacaggcaccagcataaccaagctaaacttctataaacaacaagattgtaaatgtccttattgtggtgagccgataaatcttagcaagatctttagtgacgataactacgctgaaattgatcatatcattccattctctatttgcggcaacgacaccaaggctaataaggtcttagttcataccacctgtaatcagatcaagggaaatcagacgccataccagacttggggcaatgaccctgagaggtggaagatcattgaggctaccgcccgggctaaccataagttaggtgccgccaaacgaaggcgactgctgacgcagactctacccgatgaggattggtcgcttcatgccatcaatgatactcgttatatctctaagttcatctccaggtatatcaagtcaaatctaaagttccgaccaatggatgatacagatgacgatggacatacccaacgacaacgagtaattatgcccacaggggcaattaccagctatctacgtcgtatgtggcatatcggtcgtaaagaccgtgaagaggattgcctgcatcactcagtcgatgctgtaattgtcgctctaaccacccaagcgattatccaggattgttctgtatatagcgcctatattgacgaccacaccaagatgcagcttggcgataacgcatcgcagaccgggagcgctaagctagtcagagcccttcagcaaataacagatccggctaccggcgagataaaagaagctgattacaaggaattaatgcaggatatgctaccatggccgagatttgacgaggagctccgcaagcgggaagaacagccggatccggtcaacgacaacttggcaatttggcgtaataagtttagcgatttatacaaagaccaagacagtgacttcattaaccggattcaccccatatttgtatctcgtatgcccaagcgccagggagccggcgcagtgaacaaagaaacggtgcgctctaacaagacgaaagacgatgatggcaagaccagatcggctagagtcaaattgcgtgacttaaccccaaagcaacttagcaactcggctatcagtagcaacgaaggagtatacgagcagatcaaacagtacatcatagatcgtgataaatggaaagatgagataaaagcttggcgtaaggctaagaaggctagtaaacaaacatcgaatactgacgaagctaatgacggtaaagacgagccatcagtgccggcagagccccgggagcctaaagtatacaagtctaatagacgattcgatcgcaacggtaatcctatctcaccgattaaatcaatcaaagtctacgacccccacccaatgacgagtggctttctggtcaataacgacactgcttatgtcaacaacggtagtatggtcagactggacgtatataagcgccctaacaagaaagggaagattgagcatttcttcgtgccggtttatgcccatatgatcaagaaagggcatcctgagattaggccaactaagatattgcctgagcccaagaagggtactccaaaagagattgatgacagctttagcttcgtctgtagcctgtttccgaatgattatgtcaaagtcacattaggcaatgaagtgcaagaaggctactacgtgtcatacgatatccaaagcgcccggcttacacttctaccacatgctggtaccagaaaggatttgccgacaaaaaagaaagatgaaacaaatgacgatcaaaccaatcagttaactgatgagaccgacggtaacgacaaaaagaagactaaggttaaacaccccaaccgatatccagcatttcgtatcgctccacgctcagccacaaaaatagagcgcctcgacatcaacgtcctgggcgataactataagtgggattagattatagactatggggtggcgagttgtagctatagaaaaccaggctcatctgagcctggagcagggaagtttggtcatcaagggcgataaaagtgctaagctaccgatagaagacatcgatacgctacttattgatagttacgccgtgaccatgaccgccaatctcctcggcgaactcgccacgaacaacgtcacgaccatcatttgcgaccaccagcacacgccctgttcagtaatcgagccactatcacagcactctcgccaagccaaagtatcccgcatgcagctagagatgtctcagccgctacgtaagaatctatggcaagcaatcgtcaagcaaaagatcattaaccaagcccaagtcctgaccgcatttacacataccgagcaagccgggcagctcattaagctagctaccgaggttcgcagtggtgacaccactaatcgagagtctatcgccgcccgtatatatttcgatactctactggcagacgccaccagacgccagccgacctggtataattcagcacttaactattcgtacgctatcgtccgtagcttagttgccagacatatcgccagtcgaggactcatcccgtcgctaggtctctttcaccacagcgagctaaatagcttcaacttagccgatgacctgattgaaccctatagagcaatagttgaccattttgtcctgtcaaaattagctgatcagcacttagacttgagtgacagtagactgaccaaagaagatcgacggctgtcccttgacattctcaatgattatgctattatcaaagataagcagtttacagtgcgagacgccatagacttaaccgtcagtagtctagtgcaggctattggcgacaagtcacccgactcgcttcaattgcccaagtttaatcgctaagttaatcttaatcatgagctaccgttatatgcgtgtgttggtactatttgatttgcccacaggaacgaaagctgagcgcaagcaggctagtcaattccgcaactttttagttggggatggctttgatatgctacagttcagcgtctacagcaggctgtgccctaatcgagacgtagccatgaagcatctcgccagagtcaccaagaatacgccagcggataccaaaggctccatccgagcacttctcgtcaccgagcgtcagttcgctactatgttcatcatcctaggtgaaaaaactgaccaagaagagctcgttaaagccaaccaactatcatttttctaaactaaaatcccctctgtaacagaggggattttgagtgagtattatacaactatctgaattgttagagaactataacgacaacaataatcctacacgtaaaactcagattatacaactatctgaattgttagagaactataactctaataagcctttaatctatgtatcagcaattatacaactatctgaattgttagagaactataacaccgttctgtctactaattgccgtaatttaattatacaactatctgaattgttagagaactataacggaattactccttattagatttactggttaattatacaactatctgaattgttagagaactataacttatctcctaatgcgtgcagatccgccactattatacaactatctgaattgttagagaactataactgattgttgcctcaggcgtcttggttggaaattatacaactatctgaattgttagagaactataacgcggcttttatccaggcattgatgcagagtattatacaactatctgaattgttagagaactataacgaaaagtcagcccaccactgggcgggcaacttttcgttgcaaatcctaacggatttgcattcctctaagatccccttacatggcgaatttcccgtttctcaagcgccggcttttggattggaagatgcggtatgtggtaaagggtgtaagtgtgaccaagattttctccttacgtaacatacccgaggcatgacatatcagccacgccaattcacgcaatcaccacgcaaaaccgctgagaggctacctcactcagtcgttacaccatcgaagtcttcttcgttagcctcggcttcctggcgtgtcgctctgacgatgccgtctttgtgatgcgccgggctgtagatagtgtacagccttagcggctcatcgccggtattgatgacattatgctcggcaccggccggcacgatgatggcgctgccgtcagacacagcatattcgttgccatcaattagcactttgccctgaccagcttcaaagcgaaagaattggtcgttctcgtcatgaacttccgagccaatctcaccgccgaccggcaagctcatcaacaccagctgacaatgcttggcagtgtaaagcacttgacgaaagttgtcattcgccagcgtcaattgctcgatatttgcactaaaccccttcataatacctcctactgattaccgctattagtataccagcctctccgccaaaaagcagggttgcgcattatctcataaataaggttacccatttgatagtcgttagcccataatttcggttacccccaccctacaccatgaaaggactaagtggagtggacatgaaggagatcatcaggtttcataccgtagccgatttaattaactcataccccagcacacctggacgcatgctataatctcggaaaggagaaatagtatgtactacggtaataaggctaaagttcatattccgggttggtgggagatccggaagatgtgtaaggggttggagaagctggagccacgagttgaccttgagcttgagtacgacggctctttcaagggtattcccagcgtaaatggacgtttgcatttggttgccaatgagtccggagtacatatacgccacggcgatgttgacgtgagagaacttacaccgcaacaagatgctaagtggattgaatgggtaagaatacgaagtaggggttataagccggctgatcagccggaagaaaagtttattgcacactttaagtgggaggatatttgcggttttagctacgacaagtctgttgatgccggctccaacgtcaccaccactcagcgcattaccgccacccgagtggccgtccttggcttgttcgccctggcggcgcccaagaccaagaagcattacgagtattacgataatggcggcgaggtgacagctacgcttcatactacatccggagacctcaggctgagatggggatgtaggtctgccgagattgccagatcggtcgccaaagaatgtcgcaccttcggcaagtacgtcgccaaacatgccaaggctactccatcgtagggttggttgccgacccggttctattgctaagatatcgttcatatttcttactgtatagaaacctcgaaacgagcctgttttacagtagtgaacacacactgtgttcggcgccatgatttacacccaagacgccggcggtggtataattgagaaacatgaaaggagcgatatggaagaagtattgcgtgaatacaagaccataagacgcctggggatgaaccctatcaaaatagaaaccaataacaggatattcgagaagtcttggatgactacaggcgtaattttaagaaaggcgttgaatgaaacgacgagctcagctacaaaggcactacccgccaggcgcaaagccaacagcaagcgacgggttgatcgcaagaagcgcatctaaagacagcggagactcggctcaaaacgaagttgccatccgagctatctctgctgtcgcctaccaaggacccatccctccggccagtgagtttgcgaagtacgaacaggtgatgcccgggtccgccaaacgcatatttaggatggcggagaaatcagaggctgcggagatagctcatatcgaacgcagagatgcaatgataaagacgtcgatgatgatagacaaggtgttagtgtgtctattccttgtagctgcatttatattagcaataaataataagcctacagaagctcttgtgtccgccatagtgcccgctgcgcaacttatgtacggtgttcatggcaaagacaataccaagcgtgacaacaacgacaaaatggggcgttctaaatagcgccccattctctactctaaagctgcttgccggcgaaaagacccgccccacatccgtaagattagcctactataaagctactctaaagttttatagctgcgatctcagtctggctctagctagtgggctgtccaggtagcaaagtctccatgtgccagaaggaaagtactatcaccacggcgtagcgaacagcaagctatccgaatcaccagagaacatatgcgcctacgaccatcacatcatcacctcctcgatacttcgtcgcttggagtagggttgccgtttgccatagccgattcgcagcaggatggtagggtactcgccatccagccccaggtccttcgccatggcttccgccacttccgcctcctcgttcggttgattgaagtacgagtgggcgatacccaggctagtagcagccagcaagaagcgctgtaacgtccgccccaagttgacccattcacgtagtgtattatctttggtagtaaagagaaccagatgggaggccgagacaagcttgcgacggtcggccttattctgcgacttagcattgatggcacccgacataattagctccgccagccgacggggaacattcggcgcaccaaagacagcgtagctcagcccatccagcatctgatcctgatgctttttattaaatctcatccagctcttcagctcaatcttaaagtcctcgttttgcatctggcggtcgtcgccctctaggacacgtcgctcaacggcactaaattgcgtcgtcccacgagcatagtagtggagcagtacgccatcatcgatgtagacagactgtagcttagtcagtgtttcgggcgggatcgtctctccgctgtagacactgcggttcgtctgcctcttatctatctgattaaagagcggatccggcgtcaatgccctcctagctagtgagatagtgatgatacccgcatcgctcgtcgcaacgttaacttcataattattggcatgagctgccaggcaaatattctccgccgcacagcccagactgatgaataactctcggtgagatgcatccaccaccttcagtgcccggctaaaatccgggtgaatctctaccgccatgtccttccgccggaatagccagggctgggtattgtgccctgatggcgccttgacagcctgctccaccagatacttgaaatcagcgggggatagctgtgtttcgctcgtcatctctgccatagtgcttattataacactaccactttagccaggttaaaggcgagtcgccgcctcatagctctgcttaccaatgacacaatatgcttttacgcctattatcgctgaaactgagcgccaagacggctctatttccactcccgatgactattaatctcgtgcttctcgaaataggcttccgccagattaacgtcgaaccgattagccagttccatcaggtagttcaggacatcggcgaattcttgccgcagattgtcgtgattctccggcttagtttcacccttaaagcccgtctccttacggatggctttagccagctcaccaatctcctccgagaaaagcaaaaacacctgagtcactgagtttttatcccagccattctctcggcacgttttatccagatgctcctgcaattcagtcaagctaatagtcgatggatccatgggcaattcttctcctctttactgatcttgatcaggcctgataccgcagttgtcataatgtagattacacctttgctcataattgcactcctgtttatctaattctaccattattcgcagagacggcgaccatgacgtccgcacccccttgacaataagagataacgtgttatcattatatcaatttagctataggagattatcatgagcgaaattagtcccaaattaaacgaacatctcaacggtctgaccaatgagatttctcgtcgccatttcgacgaggcgttggagcacggcagggaagcgatagcttccgacgagctacatagtgatgagaataggtcaatcttagcggctgtctaccgtaatatgggtgccgccaatgaccacctcgggcgagacgacatagcctgcgactacatggagcaagcctaccggatccatgacgaccaggtagccgagaaccgcactcccgagacgctacgggagcgttcggctacagcttcttacgtcggcatcttcgccaccaaggcgtacctggccgggcagaggcaagatcctgagctggccaagaaggcgataggtgccgttcatcaagcagaagcggatatggcagaggcgggtcgcatttccggcgataaatatcatcaatacgagatcaacatgaccggccgctggagtatgattgagagcttggtcggcagtaaagggcgaggctttatcctggccggacgagccattcgcctggctccattatctgagaaaaatcagcagaaaggcttgaccaagaaagacgtcctgcgagccaggaagcgggctctcatgcgaggggtagccgccatggcagttaatctagccagccacactaagcccaccgagaaaatcgctgaatccattgccaataaggcgatgtagactaagctagcattccatctcacgagccgggcactccgcttagcgcatccgactcatggtataatagccactagagtaagggggtctacacattatatggacaaacaagacgggcagtctcagcaatcaagcttacatcagccgagcgacaccgcttatctgcctgaaccgggcttagccgagtcgtctcaagagaaacagctcactagtcaacagcgctcagctcagtctcaggctataccggcacaaccagcgacgacaagctcgtcacacctcaatggtatcgcaggctggctagccttctttatggttgtccttatcatcggtgcccttcttttcttggtgtcttttttaacacactgattaagattaacaaaccgcgatttcttccttctgacttacttttccctttcgccgataacgtcttgccaataagcgacgacgaatcatcctacatggtttccgctgttatggcgcccgttgtggcaacactggccatcgccgccgtggtggcgattagccagcgaaagaggctgggcaagcagctagctatcgccacctatatctcttactttgttcatcaggtgctatacgtcgtcttcagtgcgatgagcaaaagctattatgtgaagcctatcgacattaccatcagtatcgttagcttcgtcatcatcatagcgaccatagccggactactctgcttatatttcttcacctccaggcgagtcaaggagacactggtcgagtaagctagcgcactttacccgatgtcacaagctcatagcataatcattaccgaagcaggagagactagcactatgaatgaacaaaatcagcaacacaaacaatcggtgttacgcgagccggatatccctcgtcaactatccaagccggcacctacctcaactgaaatgcctcatgagaggcaacccgtcagccggcagagctccgctcaaccccggatttcaccagtgcagtatgcattagcgacgccaccacccaaggatgtcgcaggctggctagccttctttatgtttgtcgtcaccattggtgctctggtctccgccaccatgttcttcacctcgctactcgacattagccagccgtatgcaattatctcgatcatcatggcacccatcgtcgttacactagccattgccactgcagtcatggtcagtcggcgaaagaagctgggtggacgactagccatcgctacccttatcgcatcattcctacatacgatattaatgactgtcacctatacacttattgatggcttagaaacatctgtagtgattatttacattgccattatgcaggctattgccgcctttctgtgttgcctgtacttccgtatctccaggcgagccaaggagacattggtcgggtgaaagagcacttagctgatatgcttagactcgtggtataatagccaccaggataaaggagaatatcatggataaacaaaatgaacagcccaaacaaccaaaagcacctaagccaaacgccgcccagcagctatttggcccggctccggcaccggctgagacaccttacgagaagcaacccgtcaatcagcagtacttcgctcagcctcaggctgcgccggtacaatacgtggtaatggcgccgtcgctcaaaggagtcaaggggtggctagctttcttcatggtcattctagccatcgacgccctgatctatgtcggcgtcttcttcaattcactattaaatctctctgttactacctctgtcatctcggctattatggcacccatcatcgtcgcactatccatctcagctgtggtgacgatcaatatgcaaaagaagttgggtaaacggctggccatcgccacctacctcgtcacactattgcactcggtaataaatattatagttgctactgttggcgtgtccggcaatgtgcttaatacgaccactgacatggtgaatgctatcagtagcctcaccagtcaagtaatcgtttccggcttgctctgcctctacttctgcgtctccaagcgagtcaaagaaacgctggtcgactagtctagccggacttactgacggtcaatatctgcgcctgctagtagggcgcatatttggtttgcctgtctttacctcttgggccaagaaaactggccgtaaataccgaagaatagtagggggtggtgtcacctacctgtctttacgcagggtcagagcatactgcatgaagtagtcctcgatcgactcgtcctctagaccggcaaaaatctcccgagctcgcaagagttcacgtagccgaggcgacttttgctcggctaatatctcagcagtagcgtcgatcagatccagaccacggtacagcgccccggtcatcgcttcctcgtcgccacgacgcttagccgagaaagttcgccccacctccgccgcaatgttagccatttgttctaagaagctccgactccgccatctctcacgatcaaaatgatattcacctgtcggtctagcgactttcatgactttgattgtagcacacattgaagtggggtagagcaggcaggggagcgtcaaatttcgctgattctgtagtggattgtaataaaaggttcactaagctacttttttcgagctattagcctttttccattttctgtattcactcatagcaatctgcatgtatttgtatggtgcctctccagctttgatattatttttatcaacgaaagagggtatatttaggtcgtcttcgagaccatgggcattctccatcgcctcatcatagagcttatcattactatatttttctctgatatatttcacgaatttatctttctcatcttctgactcgaatttgataaaatggctatcccattctttcagtccatactctatcttggaagtaagaccaccgttatacatctttttctgcttatcaataatgaattcgtttatcacatcatcaaacgaccccttaattatataaaacaggataagtcccctcggttcgtctggtaaaggcttgccatcatcattgactttcactccaacactgcggccggcagggaaaacttcttctcgacgaggagctaccaagggaatgcctttaatcgtaccaaaggaacgaagtatacctacttcatggataacgttgccattgacccgtacgacacatttgtctattatgccgtcatccctgagcaaatatttaactatcatcccgatatcgcttccacccagccaaaccctctcgttgcttttactgcctttgccatctttatcgtaattatcatacaattcttcgtaatagttatctatcatttcaattgaatactcgatcgaatactggtaatt

SEQ ID NO: 971 - DNA, 23402 bp, synthetic construct
  misc_feature 1..23402: note = Synthetic
  source 1..23402: mol_type = other DNA
tatgactctaaaatattaaaatcaattagatttagagaagatatttattttatggaagattcagtttttctcatagaatatctgaaaaaatgtaaagctaaggaaatcatcgaatataaagatacgttttatttgtatagaaataatatggagtcggcatccaataattcttccaatatgctaagaaacattaaggacgtatcaaaggtatttgagattagaaaaaatcttctggacggaacttggaacagcgacaataaaaaagccttatgtaaggccaggtttcgaatatacgaaaaccaaatcgcaaaaatagataatagaaaagaataccttaaagtgaaacaagataaggaatttaggcaaataataaaaaatgaaattagaacaccagggatatcactattgtctaaattatattttcttaccattttatattctccatatgcagtatttttgatatatagaatcatccgaaaacaactcaaggagctaaaacatgcctaagctctcaatcatcatcccagcatataatgctgaacagtatataaaaccatgtctagactctattctgcaaaacagcaaagaatctctttctaaaactgaaataatagtcatcaatgatggctcaactgataatacattgaaaatccttgaaagctataatcagtacaagaatataaaaatccatacaactaaaaatcaaggtgtctctgccgcccgtaatctcggtattagtctagccaaaggagaatggattacctttattgatgcggatgatactgtaaataccaattttagtaaggttgtaaacttggtggaaaatagcaaatcttcatttattatcttcggtaattatgatatagagactattgataaaaaaatactgactactcaaacattgcaatcatcaatgtatctatctggcccttggtcgaaagtatataataggcaattcctaataaaatataaaatactttttgagaaagacatattaatgggcgaggatatgttatttaatcttgaagtaattcagaatagtgatgcaatagagtcgtacaaaataggtttctacaattatagacaaaacaataactcggtgactaggcgttttaatcaaaaaatcatcgagtctgataaaaagttttacaaaaaattggaaaaaatattaattaatcaacatgacccgaaagaagatatggttcagctcatccaaaatgaaaaaagtagggccgtattatcactactaactaggatctcttattcaaaaaatattgatgaggcaatatccttctataagaagattgatatagattattataatcctcacccaagtatgtttagtggagtgaaaaagatagtagtatatctattcctcaagaaaagatataatcttatctatatattcatgaatcttagattgtcattaggaaggataaggaacacaaaggaaaggtttatagaaatatgaaaaaaaataacattgggatcattacattccataattcaaataactgtggctcaatgctagaatcttttgctatgaatagaatcgttgattctattggatttaattcagaaattattaactatagctcaaaaggacaacaacaactatacaaatctctgtttttgtggaatagtccaaaaaacattattaaaaatatcctcctcttgccgcataaaaagagattggatcgtaataatagaaaatatcaagaatttaaacagaaatatatgagcttaaattctcaggatatccagacagatgcgaaagtccataaattgacatatgatgcagttatcgcagggagtgatcagatatggaacgtgacaattgaagattataatgatgtatattttttgccatgggtccagagcggattaaaaatagcgtatgcgccaagtttcggagcaaaaaatcctgccaagtatgatccaaagagaatcacaaaatacagtaattttctaaaaagctttgatgctctatcggttagagaaaataatggacagaaatggattaaagaaattagcgggagagacgccaaggttgttctagatccaacactactattgcctatagatgaatatcgaaggctagagcgtaaaaatatgaagctaccagaaaaatatattttcttctatagtccaggttttaacttagatatctgcaaatttgtcaaacaggtaagtaagaaatataatctccctgtaattacttggagtgctaagccattctatgtaaaaaatgtttggaaatatggatttcaattgccagattatgaggatccgtccacgtatttaaccctaattaaaaatgcaacattagtatttacaacctcttttcatggcactattttttcaagtttgtatcataagaaattctttgttcttaaaaatggcggaatgtatggcactgatgatcgcgtgattactctagtagataaattaaaactgaacaaacatcttattgagtataaatttaatgaaaaatttgattacctagctgaacctgattacgccgagttcgataaaacattagaggaagagaagaaaaaatccatagattttttgaaaagtagtctatctcggctagaggaaaaaaatgaaaaatctaagtaagaatcttatatataatattatctaccaggttctactgtatattattccgttcatattaaccccatatctttctcgcactcttggtgcgacacagattggcgaatattcctatacgtattcaatcgtctactactttatgctatttacccttctagggataaataattatggtgtaagaaaaatatcaaaagcaaaacgcgaaaaagatgcactagaggaagcgttctcttctatatatggactgcaattatttctcggactaatttcattaatcgtgtataatctagtatcagtagtgctcttaagtacgcaccatactatattattaatacataatttatttcttatctctgcagtagtcgacatcaattggtttttctttggtattgaaaaatttgatattacggttaccagaaatgcaatcattaaagtattgtcaacgctcctaatttatatgttggttaaaagcccagactcaattcttgtttacactataattatggctggaagtacattgctgagccagttatatctagttgctatattacataaatatattaatttttatcctttagatatttctaagtcaatcaaacaccactttacaaaatgtctagtattatttattccagtgattgcctacagtatttatcgagtcatggataaaacaatgattggtggaattgtttctactactgaacttggttattatgagaacgctgagaagataataaatattccaattggaatcctcacggcaatcggaacggttatgcttccatttatgtctaagcaggttaaaaaagatcagtcgattatgggtaacgaaaaaaatgatattctatatagaatgtttcaggtatgttttctgattatgatacctatggcttttatgttattcgtaattgcgaaagattttacctctttatattttgggccaggctttgaaaaaagtggtgatattcttatgctgctatcatcgactataatttttgctacggttgctaatgtcatcagaacaaactatttaattcctaatgaaaaggataagatctatgttacctcaacaatagtgggggcggtcgtgaatctaattctgaatcttattttcataaagagtttaggggcaattggtgcctgcattgggacaattgccgcagaggcttcggtgatgttttatcagattatcgccaccaagaaaaacatagattataaaaaagtttttctattaatttttgcgctaataataaaatgcacaataactgcttcgatttgtgtagtattagtaaatttacttaaagttcaaggactccttagaattattctcgcactgagcgtatttactgttctgtatatattggttaatgttaagatgttgaaaaagataataaacagaagataagataatatctgggaggtataaaatgctagcggatggtttaataagaaagaaatacgatctaataaattgtatagaagatttaattccgctaatctcggattcaaatgatggcgaggctccatggcttgaatttaaggccataaataaccaagaacgaaaaaatgaaaaagattttttagtgcaccaaaaatcgcttttagcaaaagaaatttgcgccttcctaaatacattagacggaattatcgtatggggcgttgaatattctgagtctgacggaattaaaatccgtaatgattacgatggaaacttatatcaggtgctagattcatgtattcagacaatagttgagcctactccttctggaattgattttaaaagtatagaaaaagacggtaaaaaagctttgctgatttttgtgccaagaagcaatatgatgccgcatcgtgtctggggtggtgcagacgactcatttagacgcaactactacgtgaaatctgggactaatagtgttgccttaaatgaaagcatggttcgattgctatatcgttccgacggttatactccaagaatttctacttttatagaacccaagtttttaactagtgatattgtgtctttggagatattagccaatcctgacagtctatattatatcgataaatattatagtaaaggagaggtaattttgttagataagagtaggtttcctatattaaccgagttagacggaaatacatggattgagatagagaaaaataaattagcgcctgaaattgcaatatatccagctgacagtcctatccagctttataatatgtttgtagaaccaattgttcgtcctggagctggttattttactcaaggtccagaaaatattcggggatttgtagttgatggtgttctggaaatagaaaagagagattttaataatgtgaaattcattgtaacaaggtcctattttgcatgcaataaagtatcaatcactattgataaaagactttatgttctaaatactttttcggatatagggagtttgattaataatggcaggattaacttttgctttgcaaggaaagaagttcttcgaaaaatagaaagtgactataatatagagatttatgttttggatacatatacggatgacgacattataaatgactatgattataatggggtagacccttgttataatgggaagataaatattagtttcctaaaatatatactcaataacataaaagatctgtagaagtagttggggcctttatcatactcatggtgtatatttttacattttgccaaaaactcaaagtcatgttaaactgacatcatgaaaccccaaaggataaaaacatcatgaataaacaaaaaatcaacactattgtcggatcagtcggagcttttatcggagtttttgtctttataacctacattccacaaattctcgctaacctcagcggtaataaagcccaaccatggcagccactcactgcctcaatatcatgtctcatctgggttatatacggctggaccaaggagccaaaaaaggactacatcctcatcatcccaaactttgctggtgttgtgctcggattcctgacatttgtgactgcattgtagttatctcagatattaatatacgactaagttagggaataatgttttataattcgtgggcgtcacataatcgttctaagtattaattccgtgcagtgggcttctaaaaggaataagttcccccatgaattctaaattcagcagccacctcacttaatcaaatctccaatttgtataacgttaatttgacaaaaatctgctactctaacatctcaaatgtaacaccttgagatgttaacttaggggtgaccttgccgccataatttttttatgatataccaataagcatagcagacgaactataaataaacagtatgacggataatgtaataaatttgggcagtaatgttaaggtagatttttcttcaaatatctatagagtattttctggtagaatcattactcagtatactaaggatagcaatgaaagtaaaataatacgagaattatctgatcgagtacggagcatatttaatgttagatttccaggtcggcataatatcataaacgaattatttgactttttacgtgtttgcgtgagccttagtgattttacaattgttagatttgattttaaaaaatttttctatagtgtttcaaccgcatttgtatataatgagtatataaaaaatagtagtttaaaaaggtgggaaaaagatattatatctgatttatgcttagaggtaaaaaaatgtattccaggaatatcgatatttaattattttatagagatagtatccagagaatttgattatgaaatacattcaactctagataaagaaggtctaattttttatcgtagatacgtagacgatggaatacttatttttaattgctctattttagaaacacaaattgaagataagctaaaaaatataattgaaaaaatctttcataataaagaaacattaaataaagtaagaatccaaaaagaaaaatttgtagttattaataggggggaccttattaaagagaataaaagatttgatttcttagggtatgaattctttatttcaaaaaacgcaaagaagattaatgaactgtccatacaaatagggatctctgagaagaaaagaaaaaaatatcagaataaggttaacgagtttgtctcggaaatttattctatagaccacaatatagctagcacaaggttaaggcatgcaatcaaagcacattgctcaagggtggtatattttgttatttctcctacaaaaagtcataaaatgtgggtttcaaaaggtattattgcaaattacaataagctgtcagattattatggctgcatacatcaagacacaaaaaaatttttattggaaatatattataacgcattcaagaaaattggagttagaccaccacattatctgaaagaggatagatactctttatgtcaaggatttattaagaatcgggcattaatttttcatgaaatgataggcgttaataaaaaatgtctatgtaagtatttgaggcaaataggtgaagaagttgacgaaaaaagagattttgactacttacttaaggattatttaattaatataaaaataggttactaattaaatacactccattagtggagtgtatttaatggggaattagctaaaatttcccttagtattttgtctaaacaaaataccgatgatgtgtgtagtgtaaactaccggaaaatatgatttttccttatatgtattatacaatattaatcatgaaagaatataatataaagagggatgatctagattacatacttaccgatactctacccgtcgaattatctgagctttatacaaatatatatttttacgagtttttacatagtcgtaaaactgaaattgatgagatttctgatgagtttaaaaaacttgtctttagcttttccactaagaatccttttatgaaaaatagttcggataatcatggaataccaacaataccactcaccttcaatatccttaaatctgatcaagaaaataaaagaaagatgagtatccctcagcccctttcggcgctcgaaatatatttctttatacgacattatcagacagatatattgttatcacttaaaaaatcgagatattctattcgttatcacacgagaaataattcattaaattataaaactagacatcataagccactattgattgattatcaatatagatgtagtaagaaaaataaaaaattattggagcagagcggatcattttttaatattggtccagttagtaggattaatcatctaacgagttgtgaagaatgggttctccataatttaaaatacaagttttattgcaaattagattataaaagatgttttgattctatctacactcactcatttaaatggatcgttgctagtaatacagttgattcaaagaatttcaataattcaagtttatttgcagccatagatagaattttgcaaaacatcaatggatattcatcgaacgggatcatagtaggccctgagttttcaagattaattgctgaaatattattacaagaaatcgataatgaagtattttatgatttgctgaataataatataaaactaaacgaagactatgtattattgcgatatgtggatgatatgtttttattcacaaacagtgaagatacgcaaaaaaagattattgaagtaatcgatgcaaagtctaaaaaatacttgttagagctaaacgagcataaaatagaaaagtcattaactccgtattcgggaaatgcatgggtatttgacatgcaaagatttactaatagctgcgaccagttattattcaacggaaatcaaacatatacatttggtgatgatgtgtatcaattgaatctaaatcaaaaaaatattgaatcaatcagagaaacatttatgtatataatttctaaaaatcgtgattttattcctccaataactagttatgcaatgagcgtactttttaacaatatgtcaagaaaaaagaaagaatgtactttttttagaagggggtcatcagataaaacggtgtgtaaatttttagatttagtattttttatatattcacactgtattaatttttataatacacagaaattgatttcaataatgtattattgtcacaacgagataagccttatcgggtcaaaatatttacaagatattattaataaatatgattttttaactagcaatagtagtgaaatagttaacctttttgtcgccctacgtggatttaatattagttttaggacaaaaattgaagaagaaattttagaaaatattttagaatctgacaacccaatcttattggcaacatttttatattattcgcaatataatgatcgatatttagatgagatctcttcagtagtgaataatattttgaataagaagcttaattaccttaataataaaaatgagattttattattaagggaattttggtatattattattttcaataaatgcccttacatctccgaagaaaataagaaactaatcgaagagattcttaaaatatttttggataagaatagcaagaatagaaatattaaattatttgtagactttatgctcgataaaaaccaaagatattgtttcttttcatggcgtaagaaaggaatcaaatttatgcgggaaattacatacagaacaagtagcaggactgtttttaaaagaaaaggactacctttgttaacctctatttaatataaaaattcaacttaataataaaatagtcaaaagactaaaaagagaattatttctttacttgtcttactaaactttactaaaatactaataatatttcctttttgtaatgatgtaatctatgaataaaaagaaaaaacatcatcatcggattggccggcattttattggagtttttgtctttatagcctatacttatcaaatcttcgccaatctcagcagcaatgaaagttggtcataatggcggttactcttgatgtaatcccatttgacattcatacttactggtgataatatataaacattaaaacctccccccgatattgtttcgggactaggaggttttattttttactaaatctagtttatttaaattaggatctggaccccagtctcggcgccctcaatcataaaaatttatcttcttgacatatcaactcaactggtatatataatactcataatcccttaagtaaggattatgctactatcgaagtttattaggtctctataataatatagatttctaataatctatgtaaagcactaaggtatctcctcgtgggataccttatctattttttacggtattatattattattcttatatctaaatagtcccaccgtaggtccatcccgcttttgcatgacaaaacaaaaagttgtgctataacataaatatgaagtactctttaggattggatatcggcaccaactcttgcggttggtccgtgattaacttagataaaaaacgtattgaagatctcggagttcgtattttcaatgaagcggagcatccaaaaaccggccaatctcttgccgctccgcgtcgtgaaaaacgcggcatgcgaaaacgtcttcataggcgccgcatccgtctcaacttcctcaaacaattctttattcagcaaaaaatcctaagtagtcaacaaatcgaatctctcctcgctcctcataaaaaccaaatcgacccctttattgttcgtgaaaaagctctctcagaaaagctcactcctgaagaattattcgtcgcgctatatcacatctccaagcgtcgcggctataaatcaaatagtcgtaccgagtcaagtagcgatgccagcgaaaataaaaagaccttaagcgccattgctgccaatcaggaatttttaaaggattatcgaaccgtcgcagaagctctcaaccacgccgagaagtttaaggctcataaacgcaataagccagatgactatagcaactccttcgctagggctgattttgaaaatgaaattactagaattatttctaaacaagctgaattctattcattcctcaatgaagacagtatcaaagatttattatatcgtccgaattttggcgtctttttccagcgtcgcttcttaactccaaaacaaattgaaggaatgcgcggcaaatgtcaatttgaaaaggataaaccccgcgctcaaagagcctcatattcttttgaacttttccgtctagcctctgacttagtccaccttacttataatatgggtaataaactaactattgacgagatcgcagcctgtattgaaaaagccaaagaactttctgtcttaaaatattcccatattcaaaaaattctagccgaaaatacatcggaagagattaatttcgactatgtccgcggtttaaaaagaaaggatcttcttaaggatgaagctgaggcaaaaaagaaagcccttgaacaaaaattcggagaactaaaattctatcacgctatcaaaaaagctttaaaagatcagcctgcagaatggagagatattgaatccaacattgaattatttgataacatcggctttgttcttactgctaacaaggaagatgattcggtcagagaagagttggagaagttgggtcttaatccctcggtgattgatggtatttctaatatcaagcagtcttttgcgggtttctgccacctttcacttgaagttcttcgcaaaattactccatttatattacaaggggaaacttatgacaaggctgttgtcgatgctggttatgtctttactgccaagctttctggcgacatgaatcatctaccagctctctcgaaggaagagaataatcaaattactaatccagttgtaaggcgtgcagtttcacaaagtattaaggtagtaaatgcaattatcttaaagtatggcgcccccaccaggcttcacattgagtgtgcttcagaacttgctaaaagttttgagaaacgtaatgaaatcatcaagactcaggatgagaatcgtgaaaataatgaaaaaattattgcacgtcttaaggatgagtttcatatattatctccaaccgctctgcaggttacaaaattcaagctctacgaacaacaggatggtaaatgtctctattctggccacccaatcgatctaaatcaacttttctccgacgaacattattgtgaaattgaccacattattccaaagtcacgctgtggcaatgatagcatgattaacaaagctcttgtttttaatcaaaaaaatcaagaaaaacgcgatcagactccatttgaagcttggggaagtgatgagaagcgctggcaaagttttgttgcgcgcgttgagtcgaaccctaaaatctttgcaaaaaaacgtgcaaggcttcttgctaagactccaccaaaagaagattggaactcacgggctttaaatgatactagatatattacaagattcctttcaaattattttaaacagaatcttaaatttgcagattatatagagggcaaaaaagttgtttatactccaactggtgatattacttcctacctccgtcatgtctggcatattggtaagaaagaccgctcaaagaatctgcatcatgctgttgatgcagtaattaccgcccttgttactgatgaagtggtcaggcaatgcgctctgatgaacaagatgattgagttgggtgcaaaatataaaactaaaggtataaatttagcagattatcagaatggtatgcttaccgcaaccgatccagtcactggtgagattgttgatcttgctaaatatgaggaggtttgcgaatcagtcttaccatggccaaattttgatcacgaagtccgtttccgtgccacacctctcgcctgtttcataactgagggtagagaagataagaagaaaactgaggtaggccagttatctgaagaagcaaaagctcatcttcaaaatgcctcaatcaatactcttgccgagtggcgcgatcagtttagagaaatttataaagatcaagatgaggagtttaagaattctattcatccaatttttgtctctcgtatgccaaagcgcaaaggtacgggcagtttacatgatgatacatttcgctcgccaaaaggtatcttaattgaccaaaaaactggcattatttcggccaacccaaaccgcagttcgtttattcgcaaaaaaattcaggacattaagcttgcagatctagaaaactcaatcttaaggcaaagcgacgcggtactatatcagcagttgaaaagtcttctcgaagctaatggcgacgatccaaagaaagctttcaaagaaccagtctataaaaataatgttaaggtcgataagaacgggcgtccactttctccagtcacaacaatcaaggttaatgatgataaaaacgtaaaatctggtattctacttaatcgcggcacgcaatttgcaaataatagccctggctcgatggtgaggcttgatgtatatcaaaaagaaatcaagggaaataagaagctattctatgtaccagtttatacacatcaagtccgtagaggttcaaatcgcatccttccgaccacttgtggttacgattttgtggatggaactttcaagaaactcttttcactttatcctaatgactatctaatcatgaaaaaaggtgatgaaatatttcaggggtattatattaaatataatataagtagttctgttattacgtatatatcgaatattgatgaggggggagataagaaaaatgagaccactggtcgtgccttgttggagctatatcgtcttgacatttcaatcctcggtgacaattatccctgggaaagattatattaaaatatcatggcttggcgtacggtttatctagaacaacaaacaaagctttggctaagccggaacagcctgtgtttttatcatgacgaggcggagttgtcgattccaattgaggatatcgataccttgataattgataatcatggaacaaaaatcacgacaaatctcatcaacagtctcgccaatcaagatgtatctgttataatatgcgattcttcacatctaccaagtaccgtgattttaccatacgcgaaacattctcgtcaggctaaaatttctagtgaccagataaaaatgcgccagccaattaaaaaacagctttggcagaaaaatattatccagaaaattcttaatcaggcagaggccttaaagagatttaacttagaaccatcggaactgattaaattatctggacttgttaaatctggtgatacttcaaactgcgaggcgatcgccgcaagaatttattttaatcaattattgagcgattcaactaggcgtcagtcaaactggtataattccgctcttgattatggttacagtatagtgcgaagttgtattgctaggagtgtggcttcgcatggattaattgcttcgctaggggtattccatcatagcgaactaaacaatttcaatctagtagatgatcttatcgaatgctatcgtccgtttgttgatttttacgtcttgaagacagttcgcatgcgccatatcggtaaggagctcgatgagaatctatcaagagaagaccgggtcttgctcacacaggttattaatgaaaatgtcagaattcgtaatttatcttattccataaaacacagtattgatattacggtcgaaagttttattgctgcatttcagaaagaggatgtcaatttgtttgaactccccgaattttgctgattaataattttttgggtgggagaaagaagatatgagtagttataattttatgcgagccctagttttatttgacctaccaaccgacaccaaacttaatcgaggaaacgctacgcggttccgaaactatctattaaacgacggatttacgatgctgcaatatagtatttatagtcgactttgtccggatcgagataatgcaaatacccatcttgagcgagtaaagaaacatgcgccacatgaagggtcgatccgcatgctgatgctgacagagaatcagttcactaatatggaggtgatttgtggcaataaaaccgagcaagagaaacatattagtaacgaacagatgctcttattttgaataaaaaataagtgtaagtacaataaaaactactcttaaagacatagctttctgagaaagaaggcaaaaactaaaacgcttaactaacaaaaaatcttccattaacggggaagattctttgtaagtaaaattgtagtattatactactatcgaaattattaggggactataacagtgatacaatcttcatttttttgttctcgattatactactatcgaaattattaggggactataacttataatcttctactatatctccacaatcaattatactactatcgaaattattaggggactataacctttccttttctgcatgttttccttgtatcattatactactatcgaaattattaggggactataacaacctgatttgtcaggattaaagaactataattatactactatcgaaattattaggggactataactaatctctggtgttaagcccgttcctgtaaattatactgctatcgaaattattaggggactataacttgtcattctgaacgtgatacttaataatcattatactactatcgaaattattaggggactataacttagacatttcatcgtcttcttttggctctattatactactatcgaaattattaggggactataactcgcaaccacagcacggttgtcttccgcccattatactactatcgaaattattaggggactataacttcaagaccaactataaacgtttctgctggattatactactatcgaaattattaggggactataacacgtatgcgctactataaaagtactcttcgattatactactatcgaaattattaggggactataacgcactatttttagaccactccactagcgttattatactactatcgaaattattaggggactataactggtgattatgtgtgatagacaagatgatgattatactactatcgaaattattaggggactataactgccttgctatgttccagccaacggtcgtaattatactactatcgaaattattaggggactataacccatcgacaggcatactgcgttatagttctattatactactatcgaaattgttatgggactacaacattacgcttggtattagtgattacccctcgattatactactattaaaattatcagaagattatagtaaggagagaggttggatgtgctatcatctccgattagtaatatagttagattcaacgagtctataagtattgaaaatataacgctatccagcctaaggaagagttacgttatctaaaagaagactccggagctgagtttttgaaagttgacaaattaactgaaagtattgatagtgaccaaatggtaaagaaagttgggggaggcagaactactgactcgtgtgtatctgtggtgattacgtatgttggggatatattgagatacgatatactggattttagggagaggcaagaaccaaagtttcttttctattgacataaaacaaataataaagaaaatcatcatcattagagaaggagggtgatggacataaaactaggtatttttattaaaggcaatggatggaaaacctttacaaaaaatacactaaaaattgtttggctatcctagaacccaaacaaagcatggattaacgatattaatcagggggtatttaatagaaattgaatcatccgagaggataaaaggcttttctgatatacttggttatatcaacacgtcacaaaaagtcagttaaaaggcaaaactgggaggaatttataatgccagaaatcgatggctatattgaatggacgaaagagaagcctgataatgaagtttggtggggaacaatttttcatggcatttctgagaatgacataaaaacgggacgagccacagatggtgacataatcgattccataggatggggagaccatattttttctttcgataaacaaaaagtctattggttatttaaagattatccagatgccttaacaaatgaagaaaaagaagcctttgataaagaaaattcgtattggaaaagtttttttaagaatagataatatgagtgtcgcattgtttaataatgggaaataatttctgttattgtaggcttattagcgatctaactcacagaattacctagtcctttatattcatgtttttcgcccccaagttttctactaaccttcttctcaatctccttaatatgaacttctggaggaaggttctctggcatcgttccgccaatatcttttatggtctgtcttaccttaccaccgatcataaaatgtattgaatctgctttttgttctccaattgtcttaccactactaagttcattttggagcttatcattggtctgagtaatacggaacagattcgctgctagttcggttgtcccagctctatctaggatcttatctttcccaagattctttttcgaagcaagatctttagcactcatgccgtagagtccacgataccccgcgtcattaaattttccaaaattccttacgccactggattttgcagaatcaaacaaggttttattattatcaataacttgcgtgcgcacatgtaatctcttctcttcatcagacattgattgaaattgctcttgcctaaatgtctgaatattaaaatacgcttgtgcttgtgcaatttcgggtttatctggatcaccattttgagcaataagatagcaggcatacttagacaactcgaaatctacaacagtacgttccgcaccttttccggtccgtatcattttcaccgcttggcgaaaatgatcatttatgttgtaatattttgttattttacttgtttcaaaagacttcttagccctatttatagcattctgaaatttctcccagcttgcatatcccagaatcttctgtaactctcttgcgctccaaaactcacgactcgtgtcgtcgtgtcgaatatcatcaaaaatactaatctcggctgacatttaactcctccactttataattaattgaattctctcgctctctgttagtattatacttgtaatttgtaaataaaatcaaccgacttcttattctctacaccaccacctcaaattccgccccgcgcccttcactacttcgaagcacaattttatacccctgtcgctccgccaaattcttcgcaatcgctagccccagcccatgactcgtcttgtcctccgtcctggtcctcgccgcgtcgacctggtaaaatctctcaaaaatcttcttctgatcctctttcttcactcccaccccattatccttcacgctaaacaccacatttttcccgcgtcgccctgcccgcaaataaataatcttttcctccgaatacttcatcgcattatctgcaaaaattgtcaaaatctgctctagtgtattcttcgccacactcgctcgcaaatttttccccaggttcatctccatctcaaccttcactcctcgctccctcgctactggcgccagtttctcttgcaaatcagctaaaaactcaggcacgctaatctcggtcgacttctcaggctcgccattctcccgcgccacatccaacatcgaggctgtcagctccttcattttcaaaatctcttcaatattcttctcgattacctcgcgcgccttctcctcgggcaaactcttcttcctcagtgccacctcatttcgtaccagcattgcggttagtggtgtttttagctcatgactcgcatcaaagataaattgtgtctgcttcatcattgctctctcaattggcgccaaggtcaattttgccaaacttcggctcacaaaaattccaatcacaaaaatcccaagattaaatcccatcagggaataaataatcgttatccgtgttgtattatctcgcctttctagtcgcttgcgaaaagtattctcaaacgaatgttcttcaaattctgtcgcttccacactgacactcgagttctcttcttcgcttggcaggagtggcctattcaagctcgccgttgaaagtagataaataattcccgtaaaaatcaaggacagggtcataatcacagccagataacttaaggtcaaacgatttacttcagattttctcattatttctattctaacttattttttaaaatcactcatccctaccctgtgggatataaggagtcaaatcagcctatctcgtcttcccgcccacaattttatagccaaatccaggcacggtctggattagcttttgcttataaggcttatcaatcttctttcgcaaaaacataataaataactccacattattcggcaacacgtccgcatcaaaattccagacgttcgaaataattttctccttcgacaaaaccttgccctcgtttcgcatcaaatattctagcaccgcatactctttggaagtcagcttaatctcgtctcccgcgcgcgagacagtttttgagcttggatcaagtactaagtcttctacccgcagcacctcttctagtttctgggccggtctcctcagcagtgctcgcatatgggcaagcagaacttcaaaattaaacggtttcggcaggtagtcatccgccccgtaatcaagcccccgtaccacatcctgtgactgccctctcgctgtcagcatcagaatcggtgtagtatttttctcagctcgcagtttcttacaaacttcaaagccgttcattgaaggtaacattacgtcgagaataatcaaatcatactcttccgccatcgccgtatgatagccatcttcaccatcaaagcaggagtccacagcataagattcgtcttccagcccctcttttaaggcttcattaatttctttgtcatcttcaataattaaaattttcataaaaataatcgtaaaattaacaagcgaatatcactatctctgatccacaacgatttaataagcgatatcgttattgctgactcgcaacaatctaataagccagcgttacagcttctggccacatcgcattcactaacttcttgccttgactagttacgcttactagaattttaccataggtctgttggatcaccgtaagaagccccttggatttcagttccgtcagcacattcatcgttactttcttcggcatgccggcctgatccacgatattatccacatcgtccaccccgtcttcataaacttgctgcaaaataagagcctcattcaccgacaaattcatttgcttagttttcttagattttttcgtgttttggctcttattcttcatagttttctccttctttacagttttcttaattaaaatttcatcttccgcgtataggttaacatcataacttttcattttattcctttcgtttatgatacttatagtttatcgggatgttctttaaaatcgctttaagaccttaaaagatgtataattaatctatgaaacaagaaaaaaccgttaaaaaatcgagaccgcttttgtccttattccagcttctcactgtactatctagtctcgccatgctctattttttgtaccaagctcaaatcctgccaattcgactttttggctttatcgctatcttttattttctcctagtctctcttttgatcatcattagccgaaaaattattctgctcatcatccttttaattttggatattcttcttaatcttgcacttgtctttgtgttttataaatataacggctatctttctcagattagcaaaaatgaaacttaccaggaaaaatatagccttcttacgctcgccgcctctcctcttgtcgaaactggccagggtgagattgttcgtatcggtattctcagcagtgatccctataaggaaactgttgagcaatatttacaagctgacgccagttcccgtaaggggctacttgcgaaatctctcgcgccatctgactatcttggcttcgctgacacactctcactcacttctgccctcttaaatcaaactaatgctagtgaagcttcttccgttagaactatctttatttcaaacggtaatcttgaatctctcaaagataacaatcaggaaatttggaacaagttgcacgtcctccaagaagcgtctttaaatgttactccaaaaaccatcgagaccaccaaaaacacttcgctagatagcccgtttacggtttatattagcggcattgataaccgtgaccacaccttgccttatgctgctcgctcggacgtgaatttaattctagtctttaatcccgccagacatcagattctcgtgctgaatactccacgtgactactatgtgcctctcgccatgaatggacagaacgataaactcactcacgccggtctttatggcgtaaacgagtctattcatactctcgaaaaattctataatatcaaaattaattactacgcgcgcattaactttgacgccacctcctccattattgatcagcttggtggtgtcgatattacgcttccttacgctattaatacctatcatggccgccgctcatacagcccaggcacctatcacttaaacggtgcagaggctctcgacatagccagggaacgagtgtcaattagttgggctggtggtgatcgcgaacgtggtcgtaaccaagaaaaaatcttggccgcccttatctccaagtctcaacacgatccgaatattctcggtaaggttgatcagatttttgcttcaattgccaaaaatattcagaccaattttactagtgatgatttaaaatatctcgtgcaaaaacaacttaccagtcctgccaaatggcaaaccgaactcattgatgttgatggtaaagctgatatcacctccaccttcacttatcaagaaccaaaacattttgtctggcatccttatccagagtctgtcgaccgcgccaaagctaaactgcaagaatatctcaaatagcccatgcaaaattttcttaagcgtcatcaaagaccccttcttttattactcctcgttttgcagatgacacttatttttacgatgtcctcttttggctcagattcttccaatgctcagagtaatcaaatcattcatgttcttcatcgggtttttccaaacctctcaaacgatcattcattttttggcgtgagtaatctggttttcatcgttcgtaaggccgcccatttcaccgagtatgccatccttggccttctcttctttcttgtctaccgcgcctattttgtaaaactcactaatgcaaaattctctaatgcaaagttccttttctttgccctatgctcaagttttctctatgcttgcacggacgaactgcatcaactcttcgtttcaggtcgcagcgggcagttcaccgatgtactcatagatactctcggggctctttttggctgcctcttattattaatgattaggcgtctaagaaaggcttggcgagctcgtcgccgtttgtaataatcttgcgatattcggtctcgccgattattttaattatttttttctcagccttctcaaatttcaaaaacactgaaccttctgcacgatgaatatctgtacctaaataactcaccagacggttttttagtaagaactttactgtcttctttgtcttggctccgtattgcccaacaatactgccataattagactgcaattttacccctaatttaataatctcaaagatggcttccttcttcttttggataaataaataacgttcagggtgtgcaagtaccggcacgagaccttttgcttttaactcaaatatgatatcacgaagataagaaacttctgcatagaacggtagttcaaaaagtacatgctggtgtttctttctgttatttagttctccgccatagcagaaagccttgcccttgactaaataatctaccatttttgggtcaatgtaaatttcattacctggcattaattttaatttaataccggccttatcaagttcagcctgaagcttctcgcgtagttgatttttggtctgattgtcagccgcctgtggactgtcggcgatgtaatgtgaagtacaaaataccccattaaaccctagtcccaccagcttcctcgccatctttacaccttcttcgatggacccgctgccatcgtcaattccaggtagaatatgtaagtgtaaatcaatcatagagtgacctaattataatatttataataattatcgccacgacgctcgtcaactgtgcggtttaagaccacgccagagattttaacttcaattgactcaagcgccttctttgaattttggagatcttcaatcgtagtcatattagcagcactaacaagtactaagcgatcagttttcttagctaagattagcgaatcggaaagaccatcaattggcgtaccgtcaagaattacataatcaaatttttgctttactttctcaagtaattcttccatgattgcagaatcgagcaattcgcttgggtttggtggtactacgccacgtgtaataattgaaagatttttaacggttgtcttttgtaggtattcacgatattcacctaacttactttcagctaaaagatttgataagccttctttgttggataggccaaaaatctcgtgctgacggccaagacgcatgtcacagtcgactaggagcacttttttcttggtctttgcaaaggccacggctaggtttgaagcgataaagcttttaccttcgtttggtgtggagctggtgatcaaaactgcatttgagtctttcttgtttagggagaagtatagactggtacgaatagtacgaaaatcttcactgaccttggattttggattatctctcagtactagctcaga

SEQ ID NO: 972 - DNA, 23402 bp, synthetic construct
  source 1..23402: mol_type = other DNA
  misc_feature 1..23402: note = Synthetic
caaaacagtttttagaggaatatgcacttaagagattaaaatataaagttaaaatactaaatatgtcagaaaatattggtggcgctggaggtttttttgaaggtatgaaatatgctatgcaggaaaaattagattgggtatatgtgtcggatgatgatgcgtatgtcaatagctctacgctaaaagaaatagagagtatatacacacaattagaagagaaagataaaatagttgcattatgcagtgttgtaaaaaatgaagatggaatagattatggccatagattgaggttaaacaaaaaattttttacagtaaaatggtatcctgtaaataaagtagagtataaaaagccatattttaatattgatattttttcatacgttggcacagctattaagattaataatttatttattactggattggatagaaaagatttttttatttatcatgacgatcaagagcactcactacgtttaagaaatactggaaaaattcttacttgtacaaaaagcacaatctatcatgatacaaaatcgataaaatacaaaaaattattctggggaaattattacgacacaagaaataggttactgatgattagatataattttccatcaagatattattatgtccgatttattttgggctatataagagattgtattatgtgtagagacaaaactaaaagaaacatgatgaaagaagcgtataatgacgcaaggaaacagaatataggtataaataaaacatataatccagaatggaaatagaataacaagaaaaatataaatatgaggatctaataaaaacttatatggcgataaaatttaataagcaaaaaataaatacatttttacagtatatattagtattttttatcgtccttgaaagtaggagtattttttctcggttattaaataattacttaaatacatttattataattaatttaattttagttcttctattaattatagtacttaattttagatcaaagatacagaaacaatacgtattattcatcattatgtattatatatttatgttgccatttctattgattagcgccagagaatatatgataaactttatcattatatttttaatattattaccgttattttttataatattctgcctatataaagtatcaaatatacatgatttagctaaaatttatgttgatacaatatttgtgttatcaattatctcaatatttttttatataagtggatccttattaaagttaataccggccaatattcgtgttgttatagattggggtggagtaagagaggtatctggctatttttatttacatttcaatagtcagacgactgtaattatgaatgaaacaatattaaggaatactggtatatttgtagaagggccaatgtttgcgctacatttaatgtttgcaatggtactatctttaaaaaggcatagaaaaatattggataaatattctatagtatttggtatcacaatttttagtactttatcaattactgggatcttgtattatttgtttatactattatataaatatattgttttctataaagctaaaattaaggtaatattattgcctgttatatttatatccatattaataagtagcatgattctgtttactgataaacaatctacaaactcatataatattagaaatgacgattatagcgtgggtttccatgtttttaacgaatatccaatttttggaagtggttttcttaattatgacatagtaaagaagtatatgtcggcttttagaatgtataataccggattatccagttcatttattatcatattaactcaaggaggaatttatttaacgcttttttatctcatgccaatggtaatcaattacattaaactgtattctaatagaaaaacaaacatagtactattccagcttatgcctttacaattatatttgatgttttcaagtacataccagtattcatcactaatgatgatacttttagcgtttgactattatattcttatctccaataaaaagaatatcgaaaatactggtttagagcgaaaggaaatactatgagaaagtcaatcgcgaaaaattatctgtacaatttggcatatcaaattctggtgatgttgttgccattaattacaacgccatatatttcaagagttttaggtgcaaataatatcggtatatatagttatacattatctatttctacattttttatcctatttggttctcttggtgttgcactctatggtcaaagagagattgcatatcatcagaataataaagaaaaatatagtcgattgttctgggagattatcatattacgttttactactatgttcgtctcatttatagtctattattttaattttatcaatggaagcaacgaatataacatctactataaaatactaattctagaaataataagtaatgtcatagatattagctggttcttccaaggcctagaagaattcaaaaaaatagttctaagaaatacttttattaagataataagcttgattctaatttttgtcttagtaaaaactagtaatgatcttccagtttatttttggatttatgctgcttcattattttttggaaatatctcattgtggttttatttgccgaaatatttagatagaattaaattaaggggactaagggtttttagacatctaaaaccaactgttatgttgtttattccgcaggtcgcagttcaactctacactgtcctagataaaacaatgattgggtctattgtcagcgacaagtcggaagttgggttttatgaacaagcgcagaagattattaaaatgcttttaacaattataacttctttaggcgtagtaatgatgccgcgggttgcaaatttttttgcgaataaagataaagaaaaaatagatgaaaatgtcaaaaaatcttttaggctagtatttttattatcttttccacttatctttttcatctttattagttctgattcttttgttccattattctttggagctggctatgaaaaaaccgcattaattatgaaaattattagccctataattttgtttataggactaagcaacgtcattggtacgcaatatttattaccgacaaagcggcaaaaagaatatactatctccgtcattgctggttcatgtataaatgcggtgtttaatttaatattaatcccagagtatggcgcgattggagcatctattggtaccattattgctgagctagtggttactggtactcaaatgtattacacaaagaatgattttaattttataaaaataataaaaatagcacaaaactatttaatagcaggcatatctatgtttatattgaatctactaatatctcaagttgccgcaaaaggaacaatctttttattgatacagacatttattggttttttgttttatatttccttgcttgttctaatgaaggacgaatttataggatttattttaaagaaaatattgaataggaagttaaaatcaaacaaggagagtaaatgaaacgaaattataatttagatttaatcagaatagctgcctgtgtggctattctagtattgcatatttttggtgtagaaggcggttacatcaatactatattatattaccttggtacatttggaattcctctattctttatgataagtgggtataacatgctcgctaaaaagagaagttatcacgagattttactaaaagtagtaaatatatatctattcttatttatattatgcattatttatggttcgatatatgcgcttttgaagaaaaagaatattagcgtgatatttgatatttttatagatatttttagtaataagagcaatcttggtatcctttggtttatggttgcgttatctataatatatctgattacaccaatattatataatcttagagataataggaaattggtgctttctctcgcggtaatctcatcactaatttttatctcaaatatatttttgaaaaaatattccgacgttattataaaagatatcgttgtccagccactaagactatggacgtggattacttattatttattgggatacaatataagaaacaataatatattatctcgtaaaaacaaccctatattccttgtgattataactttaattgctgttaactacgagtattttataggaaaatacatttttggaaatttatatgcagaaagtttttatgatagcttaataataaaaatatggattattctattatggaattacgcaatgcatatttcaatcgacaagaaattgtttagcaaaattactatactttcaaaagccaccttttgcgtatatattctacaggttatactcttctcgataatacataatgttattaaaatgagaacaaacgtttttattaactgttcaacatttgtattaagtacaattattttatttattatctctattttaataggaaaaactaagattctaaataggtattttagtttaaaaataataggagagaaaaagtgaaacataatttattgcatataatatgattgtgttgaatagcatttcagaatattaaatatgtttgataataataaattagtaatttaaagaaataagattaagattcaagggagaagaaaaaatgaaaattgcaatcgcaggtacaggatatgtaggtctatcattagctgtgcttttatctgaaaaacatgaggtgatggcacttgatgttgttccagaaaaggtagaaatgatcaataatcgcatgtcaccaattcgggataaatatattgaagagttcatgtttgagactaaaaaaggtgagagagtgatgaacctaactgcaactcttgattataaagaagcctttaaaaacgccaattttgtaatcatctctaccccaactaattatgatgatgaaaggaatttttttgacacttcttctgttgaagatatcatccagaaagttattagcacaggtgataaaaatattactattattatcaaatcaactatcccggttggatttacggaaaaagtacgaaagaaatatgattttaaaaacatcttcttttctccagaattcctaagagagggaaatgcattatatgataatcttcacccttcacgtattattgtggggggtgtaactgataaggcaaaagagtttgccaatctactcaaagaagcctccaaagacgaagatactgaagttctacttatgcaaaatacagaagctgaagctgttaaactatttgcaaatacctatcttgcgttgagagtggcatactttaatgagttagacacttatgcaagagttaaaaatctcaatacaaagaatattattcgcggtgtatgtttagatcctcgtattggtacacactataataatccttcatttggttatggtggatactgtttaccaaaggatacaaaacagctacttgcaaattaccgagatgttcctcagaacttaattgaatcgatcgttcggtctaataagactcgtaagcaatttattgctaaggaaatcatacgtctcaatcctgaagtaattggtgtttataggttgatcatgaaatatggatcagataattttcgttcttcggcgattcaagatattattaatatatttaaagaatataacaagacagttgttatttatgaaccaactctaaaagagcaagaatttaatggttgcagaattgttaatgatcttaatgaattcaaaaacatgagttcagttattattgctaatcgttttaacccagaaatttccgatgtgagtgataaaatttatactcgcgatttatttatgtgtgactagaaattatcctactacgtaaagctcgcgttttataaaaacgatgagtgtattatagttatttcaatagaagaaccaatacccatgaaacagtcaaagagtaataatataggcaatatgataaaaggagatctgtctgataaatttagtccactctgtgcacaaccattagattctacttcagagatctatcgtgatgctctagattttgctatagataataatgatattaaaaatattgcaatttcaggaacttattgttcgggaaaaagtacaatctggaatacatacgtagaaaatagaaataaaaacagaaacagaaataggattatccaagtacaacttggtagttatgcaaaaaatgatttaagtcctaacaacgcatcaaattgtcagaatactttaaatgagaatagaattgagcagcaaatcatcaatcaaataattgctcaagttaaaattagcagaattcctttatatgactatggacttcggagaagaaaaagcttttataactattttatcaatattgtaatgttgttacttttatttattggggtaatattttttaacagcagtgatactactttaaggtatacgagcattgttagtatcggtatctttatctttattgcatgtattttatttacacgaaaagataaatttaatctatcaagaattagtattaaaggagtagaagcaacttttgcatctcataataacgacgaaacgattctggatcgtgaaaataaacagttagtgtatcttctagaaagatcaaaatcaaagatagtagtctttgaggatttagaccgatttgagaatatagagatatttaataaacttaaagagctaaattttttacttaattcatatatagaaatcaaccgcagaaaatatttcaataaaatactagataaaatatatcagataacacaccttcattgcattaaagaaggaattaaagaaagaattaaagaaggaaatagtccagtaaaattcctctatatggttaaagacagtatctttataagtgaagatagaactaagttctttgactttatcattccggtggtgcctattattaattcatataattcaattgactactttattgatgagattaatcggtctggaatagaaagtaaaaattttgacaagaaactattaattacattgtcggtatatatgaatgacatgcgcatacttaagaatacaataaatgaatttatagtttataaaaataacttgaattatgacgaacttgaactagatgataataagttacttgtattagtttttataaaaaatatatctccgaaagaatatgaattactttgcgctgggcaaggatttatttatagtatcctagatgagaccaaagaccttattgataatgtaaaacagtatcttgatatagatgacgaagaatttcatgatattcttaattctaaacagatatttgaactaatcacacttgatacttttaaaaaactatataataataaaaatctaaaaagtgacttagaagaaccgtttctaggtctgatttattttcttattaaaaaaggattcctagataagacttactactactatataggtaaatttaaaattggtgctaaaggtaaactgagcacgcttggacgtaatgatagaaaattttataaaaatttacgacaacaagagtttaatttagtgaatctagagattgaaaatccagctgagattaatttgtatctagaagatgatgattttcaaagtaaatatattataaatagcacattattacgatacctagttgaagagtataggaatgaagacgatgaatttgccaaaagggtagtcttgatgtcatcagagatggtggatggagaagagggggttaagacttctctcattcttagtagtatagataagctagacaatgagttacttaagaagtatgtcaatttacttataataaaatatgaagatttatttattgaactattagaatactccgttaataaaaatgataaagcctttaagggaatattgttgatctatttatcattaagagaaaagttaatcccaacagataggattacaagacttgtaaaaaaactagatggtagctttcatttgttagatgaatttggtatagaaagctacgatatactacttgaaaatattgtaagattaaatataaggtttaatctattcatggataagacattaaatgaagctcttttagggaagatgattgattctagtctattcataaaagatatcaataatattcactttgttgtatcgtatctgctaaaaagaaatatagaaattgttgatttaattcacgagcttcttagtgaacctttgctttctacagttttcgataaaataattcatgaaaatacggatttctttacagattacattaatatgattaaggaaaatgagaagtgcaatctacaagacggagtattgcaagatattataatgtcagagttttgcaatactgacacaaaaaagaaatatattgcacatagtgactccaaggtgcagaatctagtagatatagaaaaaatcttagattttgatagtatattaccttgtcttactagatttggcttagttgagtttaccgaagaaaatttacaaatattatgggataataatcatgtcgacaaaaaaatgtttatcgactatattgaaaaaaatataaataactgcaattttgatcaaatattatcaaacaatgctaagatctgcaatgctttaatagtctggaggtgcagcgactcactttttaatttttcattacaaatagctaatgagcagattaatgatgtaggcgatatagatattaaaacagagaaaaatagaattaagaaattaataaataggaagttaatagcgctaaatgctgtaaacgtaaggtatcttattcagcaagattatatagatgaattgtatcttttatcaaaacagggggagagtgagttggttaatattatgattaaagaaagtatggaaattaatatagatctggttttctacttagcaaacaagatttcaaaagaaaatctaattaacttaataaatggattaggccagtatatatcgataggtgatattggtaataatgataaggaaatcaagtttatcttatccttagatgagattcccatatcatttaggactaaaatattagataggatattggcacgacagatagatggtgttacactatatgaatatttaaaaaatattcctgaaataaaacaattattagtcgtgtttaaagggagtcgtcctaaaataagtacgagtgatgagatgcaaatcgttgaaagtcttagtaagtacggatatgtctttattataagaaataaaagtcgtacacagttaaagaagagttattttttggaaaaagtctaaacttatcatccatcaacccttccagagtgtattataataacactgtaaattttctaaggaaataaatcatgaataaacaaaaaatcaacaccatcgtcggatcagtcggagcttttatcggagttttcgtctttataatctacatcccacaaatcctcgctaacctcaccggcaacaaggcccaaccttggcagcctctcatcgcctcaatctcatgtttcatctgggtcatctacggctggaccaaggagccaaaaaaggactacattctcatcatcccaaaccttgccggtgtcgtgctcaggttccttgcattcgtgaccgctctgtaattgttactgatattaatgtgcagcccatttgacatccatgttttctagtgataacatataagcattaaaatctccccccgatatgtttcgggactaggaggttttattttttattatgatatatttagactggagttggggtttagccccaatatccccattttaagactctaaaaacctcctcctcttgacatatccaagcaactggtatatataatacccataatcccttaagtaaggattgtgctactatcgaagtttattaggtctctataataatatagatttctagtaatctatgtaaagctctaaggtatttcctcgtgaaataccttatcttattttctagctatctttggtaagataccccattcctccattccgcttttgcatgacaaaacaaaaaattgtgctataacatagacatgaagtactctttaggattggatattggcaccacttcttgtggctggtccgtgattaacttagataaaaaacgtattgaggatctcggagttcgtatctttgacggtgcagaaaaccccaagaatggccaatcactcgctactccacgtcgcgaaaagcgcagtatgcgaaaacgtcttcatagacgtcgtattcgccttaacttcctcaaacaattttttattcagcaaaaaatcctaaacagtcagcaaatcgaatctcttcttataccgcataaaaaccaactcagcccatacaccgttcgtgaaaaagctctttctgagaaacttactcctgaagagttatttattgctctctatcatatttctaagcgtcgtggctataaatcaaatagtcgtgccgaatccggcagtgatgctagtgaaaacaaaaagaccctcagtgcaattactgtcaatcaggaatttctaaaagaatataaaaccgttgccgaagccctcaatcacgctgagaaattcaagtctcataaacgcaacaagccagatgattacaataactcctttgccaggacagattttgaaaatgaaattactaaaattctttctaaacaatctgaattctacccagccatcaatgaagataatattaaagatttactatatcgcccaaatttcggtgtcttttttcagcgtcgattcttgactccaaagcaaattgaagaaatgcgcggtaaatgccagtttgaaaaggataaaccacgcgcccaaagagcctcatattcttttgagcttttccgtcttgcctctgatctagttcaccttacttacaatatgggcaataaactaaccattgacgaaattgcagcctgtatagaaaaggccaaagaactttctatcttaaaatattcccatattcagaaaatattggcacaggatacgactgatgaaattaacttcgactacattcgtggactgaagcgaaaagatcttctaaaagatgaggctgaagcaaagaaaaaatctctcgaacaaaaatttggtgaaatgaaattctatcatgccattaaaaaggctctcaaagatcaacccgcagaatggagagatattgaatcgaatattgaattattcgacaatatcggctttgttcttactgctaacaaggaagatgattcagtcaaagaagaacttaaaaaactcggtcttaaatcatcagtcattgatagtatttctaatatcaaacagtccttcgcgggcttcggccacctctcacttgaggctcttcgcaaaattattccgtttatattgcagggggaaacttatgataaggctgtagttgatgctggatatatttttaccgccaagcttgcgggcgatttgaatcgtttgccagccctctcaaaagaagaaagcaaccaaattactaatccagttgcgaagcgcgcaatttcacagagtattaaagttgtaaatgctattattcaaaaatatggtattccgaccaggcttcatgtcgagtgtgcctccgaactcgccaagagtttcgataagcgtaatgaaatcattaaggctcaagacgaaaatcgtgaaaataatgaaaaaattattgcacgtctcaaggatgagttccatgtgttatctccaaccgctctgcaaattacaaaattcaagctctatgaacagcaggatggtaaatgtctctattctggaaaaccaattgatcttaatcgacttttctccgatgaatattactgcgaaatagatcatattattccaaaatcacgttgcggtaatgataatatgattaacaaagctcttgttttgaatcaagaaaatcaagaaaaacgcaatcaaactccatttgaggcttggggcaacgatgaaaaacgctggcaaagttttgttgcgcgcatcgaatctaatcctaaaatctttgcaaagaagcgagtgagacttcttgctaaaactccaccaaaagaggactggaacgctcgtgccttaaacgatactcgatatatcacaagatttctctcaaactattttaagcagaatcttaaattcgctgagcatactgcaggcaaaaaggtggtctatactccaaccggtaatatcacttcttatcttcgccatgtctggcatatcggcaagaaaaatcgttctaataatcttcaccatgccgttgatgcgacaattacggcgcttgtcacagatgaagtaattaggcagtgtgcccttatgaataaaatgattgaactaggcgctaaatatgcaactaagggtattgatcttgcaaattatcaaaatggcatacttgctgttacggatccagttactggtgagattgttgatcttgcgaaatatgaagagatccgcgagtctgttttgccttggccaaattttgatagagaagttcgctttcgtgctaccccgcttgcttgtttcataactgaagaaaaggaagataaaaagaaagctgaggagaggaaagagctgccatccaacgaggcaaaaactcaccttcaaaatacttcaattaacactcttgccgaatggcgcgaccagttcagggaaatttacaaagatcaggacgagaaatttaagaactctattcatcccatctttgtttcgcgtatgccaaaacgtaaaggtactggcagtttacatgatgatacaatccgctcaccaaaaggtattttaattgacgaaaaaactggcattatttcggtcaacccaaaccgcagttcattcatccgtaagaaaatccaagacgttaaacttgctgatctcgaaaattcaatcttgaagcagagtgatgctgtgttatatcaacagttaaagagtcttcttgaggtaaacggcgacgatcctaaaaaagctttcaaagagccagtttataagaataatgttaagttcgacaagaatagtcgtccactctcgccagtcatcacgattaaaatcaacgacgataaaaacgtaaagtctggtatcctacttaatcacggtacgcagtttgtaaataatggttcaatgattcgactcgatatctataagaaggaaataaaaggaaagaaccaactcttttatgtaccagtttatgctcatcaagtacgaaaagattccaccagaatccttccaaccacttgtggctacgactttgtggatgaaacttttatcaaactctgttcagtctatcctaatgattatctaatcatgaaaaaaggtgatgagattttgcaagggtattatattaaatatgatattactaatgcagtaatagccttcgcttcaaatttgattgctggtaattcgatatttgataggatatcatgtagatcattatctgagctacatcgtctcgacatctcggttcttggcgacaattatccttgggaaagattatattaaaatactatggcttggcgtacggtttatctagaacagcagacaaagctttggttaagccggaacaatctatgtttttatcatgatgaagcggagctaactataccaattgaggatattgatactctagttattgataatcatggcacaaaaattaccacaaacctcatcaatagtctcgcgaaccaggatgtcgcggtaattatctgcgaccagtcgcatctgcccagtactgtgattctgccctacgcaaagcactcgcgtcaggccaaaatttctagtggccaattaaatatgcgacagccaatcaggaaacaactttggcagaagaatattattcagaagattcttagccaggcagaagttttaaagaagttcaacttagaatactcggagctaatcagattatctgggtttgttaaatctggcgatacctcaaattgcgaggcgcttgctgcgagaatttattttaatcaactactcagtgactcaactcggcgtcagccaacctggtataactccgcccttgattacggatatagtataatgcgaagctgtattgctaggagcgtagtgtcacatggcttaattgcttcgctaggcatttttcatcataatgaactaaacaattttaatttagtcgatgatcttattgaatgttaccgtccatttgtcgatttttatgttttgagaaccgtctgtctccgccataccggtgaagaatttgatgagaatctatcaaaagaggaccgggtcttactcacgcaagttatcaatgaaaatgttagaattcgtaatttatcttactccataaagcatagtattgatattatggttgaaagttttattgccgcatttcggaatgaagatattggtctatttgaactcccggaattttgttgattaataattttttgggtgggagaaagaaaaaatgagtagttataattttatgcgagccttagttttatttgatctaccaactgacactaaaattaaccgtggaaacgctacacgttttcgaaactatttgctgcatgatgggttcacgatgttgcaatatagtatttatagtcgactctgtccagatcgcgacaacgcaaatacacaccttgaacgagtaaaaaagcatgctccacatgagggatcaattcgtatgttgatgctgactgaaaatcagtttactaatatggaagtgatttgtggtgagaagtctgaacaggaaaaacgaattaatgatgagcagatgttattattttgatcccgtattgtttaataagtataaatactatagaaaatagcaaaaaagtgattattattaaaaaatagggcctgaaaccaaaatgcttaaccaacaaaaaatcttccatcagcagggaagattttttgtaagtaaagttgtagcattatactactatcgaaattattaggggactataactgaccataagtgcagaagcaacacgtaaaattatactactatcgaaattattaggggactataaccaatctagccaatgctttctctagtgctttattatactactatcgaaattattaggggactataacttattaccatgtaccacgtagcgtagcgtcattatactactatcgaaattattaggggactataaccgagcattattgagggtgttggcggaataaattatactactatcgaaattattaggggactataacgtttcaggactagcaggagactctgccataattatactactatcgaaattattaggggactataactgtaccaatcaatgagttaagtatctattcattatactactatcgaaattattaggggactataacagttggtggaaagacagtatcatctagtggattatactactatcgaaattattaggggactataaccccaagtgcagtagcattagcattaggagaattatactactatcgaaattattaggggactataacgggtttgcctttatatgggacgcattcctaattatactactatcgaaattattaggggactataactacccgctaagatatttattcatcatcttcattatactactatcgaaattattaggggactataactctaatattgctggcttctttaatatcgtgattatactactatcgaaattattaggggactataactttaataggtggattacttttagcgtcttgattatactactatcgaaattattaggggactataacaccatacatggcacattctcatatttctttattatactactatcgaaattattaggggactataacaatacaagacactgttctccacagagctaattatactactatcgaaattattaggggactataacacaccagcgtggaagcctcaaggattttggattatactactatcgaaattattaggggactataacacacgaatgcatcgaatacaacacgaccatattatactactatcgaaattattaggggactataacttaggatttcaatggcgcaaccccggtggaattatactactatcgaaattattaggggactataactgagggtgaaatcaaaatcactggcgatatattatactactatcgaaattattaggggactataacagtcttacgtagaacctcagcatcagcctcattatactactatcgaaattattaggggactataacctatctgcgacattcattgggatattcccaattatactactatcgaaattattaggggactataactaataactttttgctctatgaaaaaacattatatatgtatatcaatatatgcagaagtattattatttggtttatggttaaattcgcttacataatgcttatgttcgcctaatcgctttttatctctgttgctctataaattagagcgttcgcttatgggacgtaaaattccatagcttgcatttttatctctcattttcttactatatttggtaactataccatcatttatcaagcctttaatattattttgaatagcacgttgtccagctataccagctttttctatatcctctaatgtggaatctccacgatataacaacctgtcaataatagcctttttagtagaattatacctcatataattctttgctattttttctaaaacaccacgacttatgtttttatcattactatagctagcatttatcagttttagggtaacaatatcattgtcatctgtataacgtggctcatcaagcctatattcattcatagacgaataaattctttttactccttcattcaattcccgcacaaaacccatttcaaacaaaactctaccaatacgtggatttcttgaaaatctacatttcctaatattatggatatttacttgtgctggtaaaggaccactattgctgatctctaagctattattaaaatgtttaataagtatacaattaccttgaaggttataagaacgatgaaatattgcattaacaacaccttctagccaggcgtcttcaggatattcaggaactctcttgaagattctatttttaatatcaaaataataataatcacctaatgaagctttaagaaactcacttgtcttccttattgcggttggaatgttacctcttactatctcgtcttttataacattatagccagccccagccccctcaaatgaaccatcatatctcacatatttattgtaggcagaggggatatatttttcaggatcttttgaaaaaagaagaattgcagaatttttatacatgattatgtcttttacttttttcgccaaattacgattaagtaagagttcttcttgagttccttcatactttaaactatttttctattcattaatcaactggaggtcaaaatcttcagtaccaaagtcttctacaatctggtcttcgaaacggcgaagattcttatcatagcgcaaattgtcaatctcactaatacttaaaggcccataattcgaatcaccaattcttttatatacttcattgccaccttttcttgaaaaaacgttctcattgttttctgatacatgatacaaatatatagtattattattaatcttaatctcttcaaatataacatggggagttggttgaatcatctctttgcatagttttctatagccatcaatgtcagaactaaaattctttgttttatctataataccattatcttctacccctacagctaatactccgccatcagcatttagcattccgactatctcatttgcaatttttgttcgttttgtatctcgtccctttctttcaaaaaataatgactctttcgaatttaaaagataatcttctgtaacgttcgggtcgattttagatacagctttcatgccataattatattatgccttagaatactactaatatgaggtcatacgttttcagttagtaaatgactatgtagttcgtctattataaagctctacaccaccacctcaaactccgcgccccgcttctcgccactccgaagcacaattctatacccctgtcgttccgccaaattcttcgcgattgcaagtcctagtccatggctcgtcttatcctctgttctcgtgcgtgctacatccacctgataaaatctctcaaaaatctttttctggtcttccttcttcacccccacgccgttatcttttacactgaaagatatgttctttccgcgtctccccgctcgcaaataaatcattttttctccagaatatttgatggcattgtccaaaaaaatcgtgaggatctgttcaagagtctttctcgctaccactgctgtcttatttttttcaagatccagttcaagttcgatcttcacgccgtattcgtcagtcaccggtatcattttctcgcgtagttctcccaaaaaatcagatacaataatttcttctgttttttctcgatcaccattctctcgcgccatatcaagcatagatgatgtcagctccttcatcttcaaaatctcttcaatatttttctcgatcacttcgcgtgccttctcctccggcaaactcttcttcctcagcgccacttcgtttcggatcaacatcgccgttaacggtgtttttaattcatggcttgcgtcagaaataaattgcatttgcttcatcattgctcgctcaatcggtcccaaagttaattttgccaagcttcggcttacaaaaatcccgatcagaaagatcccgatattaaaaccaaccagggaataaataattgtagcgcgtgtagtattatcgcgtttttccagtctctttcggaaagtattttcaaaagagtgttcctcaaattcaggtatttccacacttacgcttgagttttctccctcgcttggtagtagcggtcggttcaagctcgccgttgaaagtaaataaatgatccctgtaaaaatcaaagacagcgtcataattactaaaagatagctcagggtcaatcgatttatttcggattttttcattacttcccacccacaatcttatagccaaatcccggtactgtctgaatcagtttctgtttgtagggcttatcaattttcttacgcagaaacataataaataattccacattgttcggcaatacgtctgcatcaaaatcccagacgttcgaaataattttctctttcgacaaaaccttgccctcatttcgcattaaatattccagcaccgcatattcttttgtagttagtttgatctcatctcccgctctcgacacttgttttgaactcggattaagtaccaaatctcctactcgcaacatttcttctagtttctttgacggccttcttaagattgcccgcatatgtgctagtaaaacatcaaagttaaatggctttggcaagtaatcgtccgccccaaaatcaagccctcttaccacatcttgtgattgtcctctcgcggtcaacatcagaatcggtgtagtatttttctcagctcgcagtttcttacaaacctcaaaaccattcattgaaggtaacatcacgtcgagaataatcaaatcatactcatctgccgccgctgtccggtatccttcttctccatcaaggcaggtatccactgcgtaggattcatcttctagcccttcttttagcgcctcgctaatttctttatcatcttcaataattaaaattttcataaacttaatttctgttcagtatttgaaagaattgcccctccaattatctttttgattagctcttgactcttttatcggtcgcactttatttactagggaatcagtaagctaaggctacagcttcaggccacattgcattcaccaactttttaccttgactggtgacgcttactaaaattttaccataggtctgttgaattaccgtcagaagccccttggattttagttcggtcaacacattcatcgtcactttctttggcatgccagcctggtccacaatattatccacatcgtccaccccctcttcgtacacctgttgcaaaataagagcctcattcaccgacaaatccatctgtttattcttcttggactttttcgtgttttggctcttatttttcatgattttctccctctttaaactttttttaattagcacttcatcttcttcgtattgattaacatcataaattttcatgtctttcctttcgtttatgatgtttatagtttacaaagatgttctttaaaatcgctttaaggtatcaaaagatgtataattactctatgaaacgagaaaaaaataataaaaaatctaggccgatcttatcactttttcagcttctcgccgtactctccagtttcgctatattttacttcctatatcagtctcaaattttaccaactcatctttttagtttggtcattatttcctattttatactagtagtcctcctgattattattagtcgtaaatttattcttttaaccatccttttagtcttagatatcatcattaacgtcgtacttacctttgttttttataaatacaataactatttctctcagattggtcagaatgaaacatatgaagaaaagtatagtctcatcactctcgcttcttctcccctggcaaagactggacaaggcgagatcgtgcgtattggtattctaaataatgatccatacaaagaaactgttgagcaatatctaaaatccgatgctgatttacgtcaaggccttctcgccggaaatctcactcagtctgattatcttggcttttctgatctactctctctaacctcagctctgttcaagcaaattgatgcaaaagaggcctcttctgtcaaaaccgctctccttgctaacagtcatcttgaatccttaaaagacaataatcaggccgtctttgataaattacatgtcttacaagaaattgttttaaaagtaactccgaaaatcgtagaaaccaccaaaaatacttcacttaacacgccatttacggtctatattagtggtatcgataatcgtgatcacaccctgccttttgctgctcgttctgacgtaaatctcattctggtctttaatcctgaaaggcgcaagattcttattctaaatacaccacgtgatttttatgttccgctagccatgaatggacaaaaggacaaacttactcacgccggactttatggcgttaatgagtctattcatactctggaaaaattctataatattaaaattaattattatgcacgcattaattttgatgccacctcttctattattgatcaactcggtggtgtcgacattactttgccttacgccgttaatacctatcacggacatcgtagctatcgtcctggtacatatcatcttaatggggacgaggctcttgatctcgccagggaacgggtttcgattagctgggccggtggtgaccgcgaacgtggtcgtaaccaagaaaaaatcttggccgcactcatctccaaaatccaacatgatcccaatattctaagtaaagttgaccaaatttttacctcaatcgccaaaaatattcaaactaacttcactagtgatgatcttaaatatcttgttcaaaaacagcttactactctcgcggattggcagaccgagctcattgatgttgacggcaaagccgatattaccactactttcacctatcaagagccaaagcatttcgtttggcacccttatcaagaatctgtcgatcgtgccaaagccaaacttcaagaatatcttaaataatttatgaaaaaatttctaaaacttcattctcggtcgattatttctttgcttctgatttttcagatgatcttcatttttattatgtcttcttttggttcagactcctccagtgcgcaaagtggtcaaattatccaagctcttcgtcaagtttttccaaatttaaacaatacttctcatctcgatgcaagtaaccttgtttttattgttcgtaaaaccgcacactttactgagtatgccatcctcggaatcctcttttttctctttttccgtcagtctttttctcaaaaaaatagctcaagatattttatcctcgccattctttttagctttttttacgcctgcacggatgaaatccatcaactttttatccccgggcgtagtggtcaattcactgatgtcttaatcgatactctgggagcttcatttggttgtctcctgttagttctgtttaggcatttaagaaaggcttggcgagctcgtcaccgttcgcaataattttgcgatattcagcctcaccgattaatttaatcatctttttttcggccctctcgaatttgaggaacattgatccctcagctcgatgaatgtctgtccccaaataattcaccaggtggttttttagcaaaaatttcataatcttctttgctttgccaccatattgcccgactatacttccataatttgattgtaattttacccctaattttttcagctcaaagattatttctttatttttctgtacgaatagataacgttcagggtgtgcaagtactggaataatgtctttcgcttttaactcaaatatgatatcacgaagatatgggacttcggcataaaatggtagttcaaatagtacgtgttgatactttttctttgtatttaaatctccaccaaaacaagaagccttttttgcttttagaaaatctatcatttttgggtcaatataaatttcgttaccaggcagaagttttagttttattccggcctggtcaagtttattctgtaatttttctcgtagttgattctttgtcttattatcagctgcttgtgtactatcggcaatatagtgtgaagtacaaaacgctccggtaaatcctaaatcggtgagtttttttgccatctttacactctcatctatagagccactaccatcgtcaattccaggtaagatatgcaaatgtaaatcaatcatttaataaattaattataatattcattatatttactatacttgtcattacggcgttcatcaatagtacggttcaagacaacaccagaaatctttacctcaatcgattcaagtgtcttcttcgagttttgaagatcctcgatcgtagtcatatttgcggcactaacaaggactaagcgatcagttttctttgcaagaattaaggaatctgaaagtccatcaattggtgtaccatcaagaatcacgtaatcaaaattctgctttactttttccaggaaagtttccatggctgaagagtcaagtaactcgcttgggtttggcggcactacaccacgagtaataactgacagaccttttactgttgttttttggagatatttacggtattcttcggccttattttcggctagcagattagataggccttccttgttggaaagtccaaagatttcgtgttgacggccaagacgcatatcgcagtcaatcaaaagtactttcttcttagtttttgcgaaagccacggccaagtttgaagcaataaaacttttaccttcatttggggttgaactagtaatcaaaactgcgtttgattccttactgtttagcgagaaatataagctagtacgaat

SEQ ID NO: 973 - DNA, 23396 bp, synthetic construct
  misc_feature 1..23396: note = Synthetic
  source 1..23396: mol_type = other DNA
tagaactcttgaaccccgctcaattgagcatgtcgagatgggatctccatcttagtttccgtgtcaaaagacacaacaaaggagaagaaatgaagaaaacagaaacatatgcaaaaacaaatgcaataatcgaggcaacaaattccagccaggttagtataagcgagaaattatttttcacttatacggatgagttagtgaaggctaagctggatctggtggggaagactggtcagatgcttgccaccattaaggcttatgttcctctgaatatgattgatgttcaaagggtcgaatatatggcttttgagcagattttgttgcaggcaacggaatattacgagaagcttctaagagcggaatttctaaaagtcttggagtattatcataattatccggactatgcggcggctacaatcgtctcctcgatctgtgtttatatcttcgatgaggagaagtggattttgaagctcttccaggagctgatcgacgatccattcgccaagctgttttttaagaagcatactgaactgggtcgccagttttatcaggacattgagtgcgccagcgactgtgttgcttcgctgaagggtaagctacttgctctcgagactcagattaatgaggagtttgagaataagacgctatgtgtgaaggttgctagtgaactgagccataatttgcgattaattattaaatctttagataataagaaatcgtcagaattatttcgcggctcaaaaagcaatctgcagatctacgagatgctgaagaaaggagcacagccacttccagagaattttaagatgtgtccgaccgcatcagcagaagtcaaacaactctccccggagacgattaagagacttgtgggaagtacacactttcaatcgacatctcaagtgaagaaggaatcaacccaccctgagtccatcgaccagacaaagcttgataatccgcagggaggatcgttaaaacatagtgattcagaccgcaagattcatattgtcggctctaatggtgatgaggttgttagatagaaggtatgagagaaaaagcaaaaaagaagagttttagtatgacttgggaggcagaggcctccctttttaatgccgaatatttcgggttttgatctaggggcaatttgtacgcgatattatccaaaatcaactaccacagtaaattgacaaattgtcaaaaataaggtatgataagtagaataatagtaaaataattggaccgctgaaattgatgcaaaaagaaaagaaaaatttgcaagaaattaaaatctgtcttgtctgttcaagtggcggtcatcttgcgcagttataccagttaaaacctttttggcaggataaaaaacatttttgggtaacctttgataaggaagacgcaaatagtctccttaaagatgaaaaactctattactgtcattttcctacaaataggaacatcccgaacctaattaaaaacacatttcttgctcttaaagtcttaagaagggaaaaaccagacttgataatttcagatggagctgccattgcggtgcctttcttttatatcggaaaaatctttaggacaaaaaatatctacattgaggtttttgatagaatagataagcctacaatgactggtaaattagtccaaccggtttgcgataaaactattgtgcaatgggaggaaatgactaatgtttacaaaaattccatcaatttagggagtattttctaggagtattatgatttttgttactgtaggaactcatgagcagcagtttaaccgcctgataaagaaaatagatcaactaaaaaaagacggaaaaatcaaggacgaagtttttatccagactggcttttccgattacattccagaaaattgttcttgggaaaaatttctttcttatgaggagatgattcaaaagataaaagacgctaaaatagttattacacatggtgggccgtctagttttataattccacttcaatatggaaaaacaccaatagttattccacgcatgaggaaatatggcgaacatgttaatgatcatcaggttgatttttgtaagaaatatagttcagtgttttcagggcgaattatattagaggaagaattaaataaactttataatgacataataaccaacttagataaacattatgttaagaatgtagaaaaaattgataataacatagtttttagtagaaaattcaatgatcttataactagggaaattttatgataccgaaaataattcattactgctggtttggcggcaaagaacttccaaaagaagtgcaaaagtgtatcaatagttggaaaaaattttgtccagactataaaatcatccgatgggatgagtctaactatgatgtttataaaaacccatacacaaggtattgttttgagaataaaaaatgggcttttctcagtgattatgcacgattagatatagtttatagtcatggtggaatatatttagacacagatgttgagattataaaatcttgggatcctttacttaaaaatgaatgttttttgggtatggagcagcctgggtgtatcaatactggattaggttttggagcaaagaagggtaataattatattaaagaaaacaaagaatattacgagataacaccatttctcaaaaagaataataaatggataaaaactacatgtgttaagataacgtcgaaattactagctaatgaggggctgacagctgagaataaaactcaaacgataaaaaatattgttatatatccaactaattttttctgtccaaaagtcattggaacaaataaaatcaatattactgacaatacatattcgattcatcattatgacgcatcatggaagtcaaattccaagattcttagaaggatatcatattttttaattccgataaagtccaccataaaaaaaataataggcatcaaatgaacacatttgttatagtatttttttcactaatatcctttctcaaaggagttggaatgcaagcaggtaatattatctatgtatctctttttgttattatttctattccaatttttacaaaagtcattaatagtagttattctaaaagagaactagctgttttattcggattatttctttttagtgtattaaatcttattatcggccatagtccaacacttttgttcactgtcattgctttaagttcattgaagaatatggatattaagaaagtcctaaaatatacattttatgcaagattggctgcatttataatgatggtatttttaaccttcacaggaattaatggaaatccaatctcaataatgtacagaaatggagaatttattagtagacacaccctggggtacacacatgcaaatgaagcacatattatgttttcgtcaattgtatttctatatttattcttgaactataaaaaactaaattttattagatttatatccatttttttgttaaatattgctatgtatatctatacactatcaaggactggatttataactgtccttttttgtctgatcctgacatatattgaaagaaaaatatcaaggtcaaacaaaaagaacagattaattaatgtactgggttactcatatgtaatttttatgattatttcttttgggctaagtgtattatatttagtaaacccagagaaaatgcatactgtagatatttttctaagtggaagattgcaatataatagtatcttactttcacagcatgtgccaagtattttcggaaataatatggtttcaaagattgtcaatatagataatgggtacatttcgttactgtatgagggtggtattatactatttctcataattagtataatgcatttcaatatgcaaaaaaagtttaaaaatgataaaaaggtaccagagcttttattgattttttactacttatcatactcagtgacagaaagtttcttaccaagcatttctgtaaatagttcgcttattctactatcagaaggaatatttaaagaagataatgaaaaatgaaaaacatagaattgacaatttttactccgacatataatagactaccagaactaaaacgtctttataatagtctatgtattcaaactaataaaaaattcgtatggctcataattgatgacggatctagtgaaaatatatcagattttatttttcagatcaaagaagagaaaaaaatagcagtcgaatttattaggcaaaaaaatagtggtaaatttattgcaatgcagagagctatatccacgtgtaaaaccaagtatttatgttgtgtggatagtgatgattattttatgaacaaaaaagggataacagctatttacgattcgatcagcattttgagtagttcagcaattggtattatctttcctcataataaaaaaataaataaagatgtcccaatagaagttgatgtccaggaattatcgattattgcaaagaagataatagaaactactattgtccataaaacagaaacactaaaaaaactacatataaaaagttgtgcagatgaaaaatttatgagtgaggaagttatttataataaattatcacataatggtaagttcctatttattgatgacccaatagtaaaaagtgaatacctaccaagtggttatactaataatctgtataggttgtggaagagtaattataataatacaatgactttattatactcaaggtattattatttaggcaagtacccaacaaagatccgtatagccaaaagaataaaatgtatattaaatattgaaatgattaaaatgtcatgtaagaaaaatccaataacaatatcaccaaatttagttctatcaatcacgctatttccagccgcagtagtttatttaatttatagaaaaacaaaagggcaattatgaaacagcctttagttagtattattattccatgttacaatgcagagaaattttttttgaagtgttatgaaggaatacgagcgcaaacgtatcagaatattgagatagtagttgttgagaatggacgtaataagggcgttgagaaaatagtcaaatctattggggataaaaggataaagtatttttatacagaaataccgaatgtttcaaatgcaagaaatctcggaattagaaaatcaaatggaaagtatatttgctttgtagatgtagatgattatttaatgccaaaaatgatcgagacttttgtcaatcgcatcaaagaagacaatacaccagtagcagtatgtgagtattttgaagagtatagtaatggttctagaataataaaagagttcccatgggataggcaaatattaaatgaaaaagagattaaagataagtatataccattacttattgggtatggtgatggcaggtctatttttggtgccgtatggcgtctcatgatagagcgaagagtgttattcgcaaacaaaattgcttttaatagtgatgtttcgatcggagaggatcttctttttacgcttgaacttttattatgtattaataaaatttcattaataaaactccccctatatgtttaccaaaggaattcaggatcactaataaattcatataagtccgacgttgttagtatgtcaaaaaaatatcatttttatatgaaaaaatgccttgaaaaatttagcactttcgatttatacaaagagaactacaatgtcaatctattaagaatgtacccaaacgcaatctcatttgcagtaagatctggaaatattcaaaagtcattttctgatataaataaagtgtatgaaatatatatgcaaggagattgtgatttaaagaataatgcattgaggctggactttaggattgtgctttttctgcttgagcataaatacataaaactgctatatgtaatcttttatataaaagaaaaaataagaatctcaaagttaagcaattcaagtaataaggcgtaaaaatatatgaatagtaaatacgggaaattactaaaaaatatgggccttttgactataagtaattttggttcaaaggtacttactttcctactagtgcccctttatactaagatattatcgacatcggaatatggaacatatgatattgtttacactactatatggctagtgatgccaattatatctttaaatatagttgagtcggtagtgcgttttttactggatggtaaatatggcgaaaaggatattatgtatattggaatgaaatatacattgatctccatattcatatttagcgtattagtcgtgtttaatactatgtttaatatagtccctagcctcttaggatatgcagtttatttgatacttttttattcatcacagattctatataccttgtttacacaatatgctagaggtataaatcgtgtcgccaacttagcatttgccggtatattaaacacaatatcgaccatcatattaaacattattttcttagtagtacttagaatggggcttgatggttattttctcgccaatattattgggttgattattccagtattgtatctaatatttatcactaaaatcgcgtatagaaaaaagtctaaggaaaaacaaaaaagtttagaaagagagatgattgtctatagtaccccattgattatagaatctacaagttggtgggggataacagcatctgatcaccttattataacaatactttgtgggttctcagaaaacggtatttattcggttgcatataaaataccatcaatattaaatattttggttggtgtttttaatcaggcatggatattatctatagtcaaagaaataaaaaataagaactttaattttctaatgcaaacgtatagcttaataagcttattgacgtctgtttcatgctctgttttaatattcttcaacaagattattgcgtcaatcatgttctcgggtgagttttataacgcctggaggtttgcaccattcttaatggtttctacagtttttgcctcgctaataaccgtacttggtggatatttttcagcaataaaggattcaaagacgatagcatttactactttatgtggtgcaataataaacacggtactaaatttctctcttgtgtttttaattggacccatgggggctgcaattgcgacccttattgcatatattatagtttggtatcttagactgttgaaaataaaaaaagaaatcaattttaagtctaaaaatattgtaaaagaggttttttcatatatattgctgttgcttcaatgtgttactatgctactaatcgaaggaggcctcctatatatcgcacaaggaattattgtattttctataataataattcatcataatgagttgtctaggattttaaagaatttaataaataaattattaaaaaatagaaacacacatgtaaaaaaaatttttaaatactagaagatttaaaaaatgtaatcttatattaatataatgtaacagcagtaaactttatcgtttcgtttatattgatggcgtttgatcttcaaatataaataaaacaatattagctccgcgtgtagtggacataacgtttgcgtgctttaatagaattaagacatcgcttgtattcttgtccgcttagagtttttagtttagcctcgtaagatctaagttttgacatagtcttgattcctggtgtgacagtatttcttttaagctcgttgcctagatgttcaaaatgaccttttccaatatattcaccatttatatcatatgtattatttaagtaatccactatgaggcatttttcggtgtttaactctagtctataattaccactactgtctaataggctcttgacacaatgaaatacatctatcatcttattgagattagctcgactggccgttatcccgatatcatccacataaaatgatattcttgggtcaaaaccttttagtatacttcttgactttctgtcaatctgtttgaaaatttgcaaattgcaccatactgctaacctaggtgaggtcgaaaagccccttgctagtactctttttgtcccctgtgtacctttttgtccaagaggcacacagcaaattgttgcaaaaaaatgagacatactcaagctacatccagattttttatggaagaaatctactatcttctcgtaatcgttttgctcaaaaaatctatgaagatccatcttaagtaatgttctttttcgcttattaccaagcaaatgtaatgtagcacttttagtatttttcccggttactcctccaaagatattacaaggaagataactgtcgaaaggagcaaataatttcttattaataagcgaaagtagaattcctagttttgttccttttgcgctcctaacccacttatcttcttttggttttgagttttttagattatccttccataaattatcaaaatcattcttaacttcatttattaaagcaagtgcatcttttacagaaagatatttgtttgaaattctctttgccagctcattcttgcttctgatattaatagggataataggattatttttcttcttcaatacgactccttagcaatttagctttcttttctattaattgttcttgaagctttgtgccatacttatataattgctgctcaataaaagagagatcctttatcgaactaattttatgtgtaaataagaaagggctgatagatgctggctgtacatctagaattcttgcaattttttcaacaagcgatttggaaacatctttttgtccagtctcaaccatagcgatcaaaataggcgagacgtccaataatcttgcaaattcagtctgcgtcaacccagactttactcgtatttttcttatcaatgatgggaatgattccatgtatttttttctcacgactacaggccggcggttagcctaaaagatcgcagataatctttgcaatctgtagaattaacgaaagaattcgtaggattgcattgattacgcgccaaaatctttttggcattaattacctccagcctgttataagggtgccacaatttaactaacgaaaaaatgttttttctaaccataattatgattcctttcagcctaatgataaatttaattaacaaaacgactgcccatttttctcgtatctatcaatatcgactttcaggtaagcaccctgttatgcccgcgttcgtactttcgatattgatatatacgtttttttggacagtcctcaagtgcaaatattgtctgacaattaaacatttttttagagtacatagcttggaagccagtctgctctggtcaaacatcgcatcggagtattattcttaaccaaaggcgaagatgagatgtatcttagacatctatgtttacgatattgattttttcattactaaattgatttttaatgtactgagttttctgcctcagtacttacatcttatacgaaaagtaaaaaataatcaagagggaaaatgaaatttgaacaaaacaaaagatcaatgtaattagcgaaccggtcggcatccatgtcggagccttcgtccttattatctacatcccccagaattagcagcagtaaggccaaatcatgacagtttctcgccgcctcaatttggttattttaactgccttcaaagactagcttagtcatactgaaggccccagatttatgtcagtccacccttgcatcatttgacatccatctcaagcaatgatactatactaaacaataaagcctccccccgattttggttcgggactaggaggctttattttttaaccatggtttatttaaattagaatctaaacctcagtcttaatatccctaatcataaaaaatagcttcttgacatatccccccaactgatatatataatatccataatcccttaagtaaggattatactactatcgaagtttattaggtctctataataatatagatttctaataatctatgtaaagcactaaggcattccctcgtggggtgccttatctatttttatttctaaatagtcccaccttatccccattccgcttttgcatgacaaaataaaaagttatggtataacttagttatgaaatactctttaggattggatatcggcaccaactcttgcggttggtccgtgattaacttagacaaaaaacgtattgaagatctcggagttcgtatcttcgacggtgcagaaaatcccaagaatggccaatcactcgccactccgcgtcgtgaaaaacgcggtatgcgaaaacgtctccataggcgtcgcatccgtctgaatttcctcaaacaattctttgtccagcaaaaaatcctaagtaggcagcaaatcgaatctcttctcacgccacataaaaatcaaattgatccttatattgttcgtgaaaaagctctctcagagaagctcacacctgaagaattattcgtcgcgctatatcacatctctaaacgtcgtggttacaaatcaaatcgtcgcactgaatccagtaatgatagtagtgaaaataaaaagaccttaagcgccattactgccaatcaggaatttttgaaagaatatcaaaccgttgccgaagctcttaaccacgctgataaattcaaagctcataagcgtaataagccagatgattatagtaattcatttgctagggctgattttgaaaatgaaatcactaaaattctttccaagcaagctgaattctatccagccctcaatgaagaaaatatcaaagatctattatatcgtccaaattttggcgtctttttccagcgtcgtttcttaactccaaaacaaattgaagaaatgcgcggaaaatgtcagtttgaaaaggataaaccccgcgcccaaagagcctcatattcttttgagttttttcgtcttgcttctgatctggtccatcttacctataatatgggcaataaactaactatcgacgaaattgcagcttgtatcgaaaaagccaaagagctttctgtcttaaaatattctcatattcaaaaaatcctagccgaggatgtggaggacgagatcaattttgactatgttcgtggtctgaaaagaaaagatctcattaaggatgagactgaagcgaaaaagaaagcccttgaacaaaaattaggagaattaaaattctatcatgccataaaaatggctctcaaagatcagcccgcagaatggaaagatattgaatcaaatattgaattgtttgacaatatcggctttgttcttactgctaacaaggaagatgattcggttagggaagagttggagaagttgggcctaaaaccctcggttattgacggaatctctaatattaagcaatctttcgcaggttttggtcacttatcacttgaggctcttcgtaaaattactccatttatattgcagggggaaacttatgataaagctgttgttgatgctggttatatctttaccgccaaactttctggcgactcgaatcgtttgccggctctctcaaaggaagaaaataatcaaatcaccaatccagttgtgaagcgtgcaatttcacaaagtattaaagtagtaaatgcaattatcctaaaatatggcgcccccaccaggcttcatattgaatgtgcttcagagcttgctaaaagttttgagaaacgcaatgaaatcatcaagactcaggatgagaatcgtgaaaataacaaaaaaattattgcacgtcttaaagatgagttccatgtattatctccaactgctatgcagattataaaattcaaactctacgaacaacaggacggtaaatgtctctattctggatctccaatcgatcttaatcgactcttttctgacgaacattattgtgaaattgatcatattattccaaagtcacgctgtggtaatgatagtatgattaataaagttcttgttttaaatcaagaaaatcaagaaaaacgcaatcagactccatttgaggcttggggaagtgatgagaagcgctggcaaagctttattgcgcgcgttgagtcaaaccctaaaatatttgcaaaaaagcgtgcgagacttcttgctaaaactccaccaaaagaggactggaatgcatgtgctttaaacgataccagatatatcacaagattcctttcaaattattttaagcagaatcttaaatttgcagaccatacagatggtaaaaaagtggtctatactccaactggcaatattacttcctatctccgtcatgtctggcatatcggtaagaaggatcgctcagagaatcttcaccacgctgttgatgcagtaattacggcactagttacagatgaagtagtcaggcaatgtgctttaatgaataaaatgattgagttgggcgccaagtataaaactaaaggtataaatttagcaaattatcaaaatggtatgcttgccgcaaccgatccggttactggtgagattgttgatcttgtcaaatacgaagaggttcgtgaatctgtcttgccttggccaaattttgatcatgaagttcgtttccgcactaccccactcgcttgtttcataactgagaacacaaaagataagaagaaggctgaggcagatcagttatcggaagaggcaaaaactcatcttcaaaatgtttcgatcaatactctagccgaatggcgtgatcagtttagggaaatctataaagaccaatatgaggagtttagaagttctattcatccaatttttgtttctcgtatgccaaagcgcaaaggtataggcagtttacatgatgaaacaatccgttcaccaaaaggtattttaattgatgaaaaaactggcattatctcggccaatccaaatcgtagttcattcattcgtaagaggttgcaagatgttaaaattgcagatttggaaaattctatcctaaaacaaagtgataaggtattatatcagcagttgaaaagtcttcttgaagccaatggtgatgatcctaaaaaagcgttcaaggaacctgtctataaaaataatgttaagtttgataagaacgggcatccactttctccagttacaacaatcaaggtcaatgacgataagcgtgtaaaatccggcatttcgcttaaccatggcactcagtttgtaaataatggttctatggtaagattagatatctatcagaaggacataaagggggaaaagaagctattttatgtaccaatctatacacatcaagttcgcaatggatcaaatcgcatccttccaaccacctgcggctatgatttcatcgacaatactttcaccaaactttgctcagtttatcctaatgattatctaattatgaaaaaaggcgatgagatatcacaaggatactatataggatttgatacggatagtgcaaggatctcttatgtctcaaacctcctatccggaaattcagtgtttaacagggtgtctggtcggtcattaactgaggtctatcgattcgatatttcagttcttggcgacaattacccttgggaaaaaatgtattaaaatatcatggcttggcgtacggtttatctagagcaacaaacaaaactttggctaagtcgtaacaatctgtgtttttctcatgacgaagcagagttgtctgttccgattgaagatattgataccctagtaattgataatcacggcacaaaaatcaccactaacctcatcaatagtctcgccaatcaagatgtagctattataatatgcgattcttcgcatctaccaagtaccgtaattttgccctacgcgaaacattcacgccaggccaagatttctagtgatcagctaaaaatgcgccaaccaatcagaaagcagctctggcagaagaatattattcagaaaattcttaatcaggcagaggtcttaaagaaatttaatttagaaccctcggaactgattaggttatctaagcttgttaagtctggtgacacctcaaactgcgaggcggttgccgcaaggatatattttaatcaactactcagtgactcaactaggcgtcagccaacttggtataattccgctcttgattatggatatagtatagtgcgaagttgtattgctaggagtgtagcctcgcatggtctaatcgcctcactaggaatctttcatcacaacgagctgaataatttcaatctagtggacgatcttattgaatgttatcgtccatttgttgacttttatgttttgaagacagtccgcttgcggcatatcggagaagagtctgatgaaaatctaacaaaagatgatcgagttctactgacacaagttatcaatgaaaatgtcagaattcgtaatttatcttattccataaaacacagtattgatattacggtagaaagctttattgctgcatttcagaataaagattttagtctgtttgaacttccggaattttgctgattaataatatttgggtgggagaaagaaaatatgagtagttataattttatgcgagctctagtcctatttgatctaccaactgatactaaacttaatcgaggaaatgctacgcggttccgaaactatctattgaacgacggattcacgatgctgcaatacagtatttatagccgactctgtccagatcgcgataatgcaaatactcaccttgagcgagtgaaaaaacatgctccacatgaagggtctattcgtatgctgatgttgactgagaaccagttcactaatatggaggtaatttgtggtaagaaaactgagcaagaggaatatattagcaatgaacagatgctcttattttaaagtagaaaataaacataaatactataaaaattaactttaaatgcgcagatctctaataaagaagataaaaataaaaatgcttaaccaacaaaaaatcttccattaacagggaagattttctgtaagtaaatttgtagtattatactactatcgaaattattaggggactataacgccaagcgaagatgaccgaagacgaacgagattatactactatcgaaattattaggggactataacattgtaaaatttgtttcaaatatggtcggcattatactactatcgaaattattaggggactataactcattgattacagtgattgatagcttattaattatactactatcgaaattattaggggactataacttgattaccctataatctacactcattgagattatactactatcgaaattattaggggactataacaagacaaaacagtatggcgagatagcattgattatactactatcgaaattattaggggactataactgaggatgatattgccattgccctcggctcattatactactatcgaaattattaggggactataaccaaaacactcaaacacccccacaacaacctattatactactatcgaaattattaggggactataactggattaatcatgaagagaattggtattgtattatactactatcgaaattattaggggactataacgttatcagtgcgacggtcagattacaaccaattatactactatcgaaattattaggggactataactcttttagtaatttgtatcgtttcattttaattatactactatcgaaattattaggggactataacttgccgacccatgcttcttcattagtgataattatactactatcgaaattattaggggactataacttgtctgacaattaaacatttttttagattatactactatcgaaattattaggggactataacagcgttgatagcgagaccattggagtcgatattatactactatcgaaattattaggggactataacgcaaataataagcagacaggagataatacaattaatcactattgaaattgtcatggagctatatcaagaagaggttagagattctatcatctacggctaacaatgttgtcgaactcaatgaagtttcgggtgcacaaaaaaattgacttctactcaaggaagagctataccctttaagtgaagtttttgtctaaatgtttgaatattaaaatacgcttgtgtaatttctgatttatctggatcaccattttgagcaataagataacaggcatacttagatagctcaaaatccacaatattacgctccgcaccttttccagtccgtatcatcttctccacttggcgaaaataatcttttatgttgtaatattttattataccccttacaccaccacttcaaactccgccccatgtccctcactacttcgaagcacaatcttatatccctgtctctctgccaaattcttcgcaatcgccagccccagcccatggctcgtcttgtcttccgtcctcgtcctcgccgcgttcacttgataaaatctctcaaaaatccgtttttgatcttctttcttcactcctaccccatcatccttcacactaaacaccacattcttcccgcgtcgtcccgcgcgcagatataccgtcgaatctcccgaatattccattgcattgtccgcaaaaatcgtcagcacctgctccagggtattttttgccaccactgccgtcttgtcctttccgacattcacctcaagtttaatctctattccacttttccttgccactggcaataatttcccacgcaggttggtcataaattcgtcgataacaatcgtctccccattttcacggtcgttattctctcgcgccacatccagcatcgaagccgtcagctccttcattctcaaaatctcttcaatattcttcgcgatcacctcgcgtgccttctcttccggcaaatttttctttcgcatcgccacctcatttctgatcagcatcgccgtcagtggtgtttttagttcatggctcgcatcaaaaataaattgcgcttgcttcatcatcgctcgctcaatcggcgccagtgtcaatcttgccagactgcggctcacaaaaatcccaatcagaaatattccaagattaaatcccaccagggaataaataatcgtcacacgcgtcatattatcacgactttccaacctttttttaaagatcttttcgaacgagtgttcctcaagtcccgtcaccaccacacttacattagaattctcatcctcattagaaaccagcggccgattcaaacttgccgtagacaataaataaataattccagtaaagatcaacgacagcgtcataatgacagccaaatagctcagggctaaacggtttacttcggattttttcattgttttgattttccacccacaatcttatagccaaatccaggcacggtctggatcaatttttgcttataaggtttatcaatcttctttcgcaaaaacataataaataattccacattattcggcaacacgtccgcgtcaaaatcccaaacgttcgaaatgattttctctttcgacaaaaccttgccctcatttcgcatcaaatattctagcactgcgtattccttggaagttagtttaatctcacctcccgcccgcgagacgctcttcgtactcgggtcaagcacaagatccgacactcgtaaaacttcctctagcttctgggtcggcctcctaaggattgcccgcatatgtgccagtagcacatcaaagttaaatggttttgccagataatcatccgccccataatcgagccccttcaccacatcttgcgactgacctctcgctgtcagcattaaaatcggggtagtattcttttctgcccgcattttctgacaaacctcgaatccattcattgaaggtaacatcacgtcaagaataatcaaatcatattcttccgccatcgccgtgtggtaaccttcctcgccgtcaaagcaagtatccactgcatatgattcgtcctccagcccctccttcagcgcttcgttaatctctttgtcatcttcaataattaaaattttcataaatataaatttcagtttaataggcgaaagttatagcctccggccacatcgtattcaccaacttcttaccttggctggttacgcttactagaattttaccataagtctgctgaatgactgtgagaagacccttggatttgagctctgtcagtacattcatggtcactttttttggtatccccgcctgatccacaatactatccacatcgtctatcccatcttcgtacacctgctgtaaaatgagagcttcattcactgacaaatccatctgtttactattagtttttcgattcttatttttcatggttttctccttctttgaaatttttctaactaaaatttcatcatcttcgtattggttaacatcataatttttcattatattcctttcgcttatgttgcttatagtttattaggatgttctttaaaatcgctttaagaccctaaaagatgtataattaatctatgaaacaagagaaaaccgttaaaaaatcgagaccacttttgtccttattccagcttctcgctgtcttgtccagtctcaccatgctctattttttgtaccaagctcaaatcctgccgattcgtctttttggctttatcgctatcttttatcttctcctagtcgctcttttgatcatcattagtcgaaaaattgtcctgctcatcatctttataattttggatattcttcttaatcttgcacttgtctttgtgttttataaatataacggctatctttctcagattagcaaaaatgaaacctaccaggaaaaatatagtctacttacgctcgccgcctctcctcttgccgaaactggacagggtgagattattcgtatcggcattctcagtagtgacccctataaggaaaccgttgagcagtatctacaagctgacgccagttcccgtgaagggctacttgctaaatctctcggcccatctgactatcttagttttactgacactctctcacttacttctgcactcttaaatcaaactaatgccaaagaagcctcttccgttaggaccatcttcctttcaaacggcaatcttgaatctctcaaagatagcaatcaggaaatttggaacaagttacacgtcctccaagaagtgtctttaaatgttactccaaaaaccatcgagaccaccaaaaacacttctcttgatgctccgtttacggtttatattagcggcattgataaccgagatcataccttgccttatgctgctcgctcggatgtgaatctaattctcgtctttaatcccgccaggcatcagattctcgtgctgaatactccacgtgactactatgtgcctctcgccatgaatggacagaacgataaactcactcacgccggtctttatggcgtaaacgagtctattcatactctcgaaaaattctataatatcaaaattaattactacgcgcgcattaactttgacgccacctcctccattattgatcagctcggtggtgtcgatattacgcttccttacactattaatacctatcatggccgccgctcatacagccctggcacctatcacttaaatggcgcagaggctctcgacatagccagggaacgagtgtcaattagttgggctggtggtgatcgcgaacgtggtcgtaatcaagaaaaaatcttggccgcccttatctccaagtctcaacacgatccgaatattctcggtaaggttgatcagatttttgcttcaattgccaaaaatattcagaccaattttactagtgatgatttaaaatatctcgtgcaaaaacaacttacaagtcctgccaaatggcaaaccgaactcattgatgttgatggtaaagctgatatcacctccaccttcacttatcaagaaccaaaacattttgtctggcatccttatccagagtctgtcgaccgcgccaaagctaaactgcaagaatatctcaaatagcccatgcaaaattttcttaagcgtcatcaaagaccccttcttttattactcctcgttttgcagatgacacttatttttacgatgtcctcttttggctcagattcttccaatgctcagagtaatcaaatcattcatgttcttcatcaggtttttccaaacctctcaaacgatcattcattttttggcgtgagtaatctggttttcatcgttcgtaaggccgcccatttcaccgagtatgccatccttggccttctcttctttcttgtctaccgcgcctattttgtaaaactcactaatgcaaaattctctaatgcaaagttccttttctttgccctatgctcaagttttctctatgcttgcacggacgaactgcatcaactcttcgtttcaggtcgcagcgggcagttcaccgatgtactcatagatactctcggggctctttttggctgcctcttattattaatgattaggcgtctaagaaaggcttggcgagctcgtcgccgtttgtaataatcttgcgatattcggtctcgccgattattttaattatttttttctcagccttctcaaatttcaaaaacattgaaccttctgcacgatgaatatctgtacctaaataactcaccagacggttttttagtaagaactttactgtcttctttgtcttggctccgtattgcccaacaatactgccataattagactgcaattttacccctaatttaataatctcaaagatggcttccttcttcttttggataaataaataacgttcagggtgtgcaagtaccggcacgagatcttttgcttttaactcaaatatgatatcacgaagataagaaacttctgcatagaacggtagttcaaaaagtacatgctggtgtttctttctgttatttagttctccgccatagcagaaagccttgcccttgactaaataatccaccatttttggatcaatgtaaatttcattaccaggcatcaactttagtttaataccagccttagtaagttcagcctgaagcttctcacgtagttgatttttggtctgattgtcagccgcctgtggactgtcggcgatgtaatgtgaagtacaaaataccccattaaaccctagtcccaccagcttcctcgccatctttacactttcttcgatggacccgctgccatcgtcaattccaggtagaatatgtaagtgtaaatcaatcatagagtgacctattataatatttataataattatcgccacgacgctcgtcaactgtgcggtttaagaccacgccagagattttaacttcgattgattcaagcgccttctttgaattttggagatcttcaatcgtagtcatattagcagcactaacaagtactaagcgatcagttttcttagccaagattaatgaatcggaaagaccatcaattggcgtaccgtcaagaattacataatcaaatttttgctttactttctcaagtaattcttccatgattgcagaatcgagcaattcgcttgggtttggtggtactacgccacgtgtaataattgaaagatttttaacggttgtcttttgtagatattcacgatattcacctaacttactctcagctaaaagatttgataagccttctttgttggataagccaaaaatctcgtgctgacggccaagacgcatgtcacagtctatcaagagtacttttttcttggtctttgcaaaggccacggctaggtttgaagcgataaagcttttgccttcgtttggcgtggaactggtgatcaaaactgcgtttgagtctttcttgtttaaggagaagtatagactggtacgaatagtacgaaaatcttcactgaccttggattttggattatctctcagtactagttcagaatcttcgtctagcaattcttcattaaactcatcgttttcgacctcatctgcctccacctctgcagctaacttttcttgtagagccttctcttcagcaataatcttgcgaccaaccgccttaatttccaccactggcttcacttctgtctcagcctcttgttttgcctctgcttcagtgtttgtctcctcgccatcctgatagtcaatgccaagttcttcgttactggttttttcttgcttctcaagttttgcggctagtttttctgccttcttggcctctttttgctgttctttctctaattttgcagccagtttagcttctaattttgcagccttctcagcgcgtttcttgcgttgttgtttctgtttttcagtctcaagtttacggactttaccgtaaataggaagtttgaagagttgttcaatttgttcagtagtcttaatggtacggtcaaaatagaacattaagaaaattacggcagttgccagcacgataccggccgctgcataaatagcctcttgctttaccaggtccacattatgtggtttctgtggttccaccgcgcggtcaagtacatttacactcttatcattgtaaatctggccaatttcgtttgtgaaagtgtcggcaatcgtattagcaagggaatagctgtggtttttatctcggtccaccactgaaatgctaataatttctgtatccttcaaagatgcaacggtcactttcttcaccaactgctcataagtgtcatcaatttgcatctcgttcttcacgcgatcaagcacgcgatgcgattttacgacttccgtataagtatcaatcaaattcttgtttgcattgatttcactctgtacggtgttctttgacttgtcagaacttaagattactgttgcctgtgccttatattctggctttaatataaatactgaatagattgttccagccgaaaccacaaaaagcaccgttacgataaataaaatcaggcgctttttgaaatagctgagtaaatcccttaaattaatctcttccatacgtggtatattataacatatttatgggtactctgtaaagactaactacaccaaactgccaatattgcaaaaacataaaccttatctgttgaggcttcatagttcgcaagtctactcctactcccacccctgtaaaacttgcattttttaaacatttctgctaaaatctcaggtattgctcttttccacaagtcattctagagtattttgactaacgaggtgggtggtcggtcgtgagcaatagaattaaacggagtaagaaatttacttatgcgtagacttaaacgtgaatcttcgcgcaaaaagtcgaaaattcctcctgccccttggcaagagttcattatttactaatccgaagggtcaaacttcataaagacgatgtctttatctgtgaatagcaagtaaggaaaataccacttcaatcgaggtggtatttttttattcaatgctttatttatggtatagcttgcgttatgtagaaaatattgtataatagaaaaactatccaaaattggataagtacttttagaaaggttggtgactatgtatgccaaaaaattcaagtctcgactccctgaaatccagagagcaagatgcatttcatcgtaaacagttagtatttaaggattatcttgatgctaaaaatcgtgctgacattgcatatagtgcaatgcaagctgcccgccaagagtgtcgtactgcaagagaagaaatgaatcgtgaatatgaggatatgcagcgctctagtaataacttccgtgaagtttgggatgaa

SEQ ID NO: 974 - DNA, 23297 bp, synthetic construct
  source 1..23297: mol_type = other DNA
  misc_feature 1..23297: note = Synthetic
tgtttgaagagggcgatttgatacatgcagcaattattccagttggcggcaacaatatcacgaacgatctagcagtttatttgccagccgacatggacgttgcagaaaccttgaagcttaagcatgcttatgcggcgcaaaatttgcgcgcaaaagcagaagtcgtacacgtcaaaacagaagatgaggcactagattttgattcgcgcaaggttgatatggtagtcgaggcacgcgtcgaggctatctttggcttggttaatgacgagctaaaaaaggtagacaggtttgcaaaattgcctggcggagtcattataactggtgggagcgccaagttgtctggcatagtagaaactgccaaaaagacgctcaggctcaatacgaaaatcgctcatgttccaaaatttgccggtataacagataagataatgaacacaaaatttacaacatgtctcgggctaatgcttattgatgctgagagtcgtccacagtcaaagcaaaaaacacaaattatgaacaaattttttccaaagaaaaagaagaaataatattcccgaaaaaactcttgaaaaacatgcacgcagagtgtataattaatttaactagttaaagagaaggaggaggaaaaatgccagaagttaaaccagacacagcacaagcctttacggctattaaagttgtgggagtaggtggtgctggtggtgcagcaatcaaccgtatgaaagatgcgggtttaaaaaacgtagaattcatcgccgttaacacagatgctcaagcattgcataataacaaggcggacgtgaagttacacattggtcgcgagaccactcatggtcttggagctggtgccgatcccgaagttggacaaaaagctgccgaagaatcgcgtgaagatattaaaaatgcgctagcgggtgccgacatggtgtttatcgctcttggtgctggtggtggtactggttctggagcggggcacttggtcgcggatattgccaaggagtcagacattctaaccgtagcggtagtaactcgtccctttgaatttgaaggcgctaagcgccgtgcgaacgctgagtgggcgctggacaagctgtccgcaaaggtcgacgctctgattaccattcctaacgaccgactcctcaccgctatagatcgtcgcgttccgcttatggaggcgtttaaaattgccgacgacgtgctgcggcagggcgttcagggtatttctgagcttattaccgaagagggtatgattaatcttgatttcaacgatgtcaaaaatatcatgagtaatgctggttcggcgctgatgggtattggtcgcgccagtggtgaaaatcgggcggttatggcagttcagttggccattgagtcgccgttgcttgaggtttcgattgacggtgcgcgcggcgttctgctgaatgttactggtggttatgacatggcgctttctgaggcgcaagaagcggctgacgttattgctaaggcagtgtcgccagatgctaatattatcttcggcactaacgttgacccagatcttgatgatgaaattatcgttacggttgtggcaacgggttttgacgccacttattttaatagcaacaagtttgatagccctgttgactcgaccgacccagatgatgaaccagcagccgctgacgagccgcagcaagacaagccgacgcctgtggcgaaaactagcgcagttgacacggaaaaggttattgcggatattgatctggacaaagacgatattgaaacaaccaaaaacgattttcagagcgaaaatccaattgctggcacgccttggtcgcaaagtccttttgacgagcagaaagaaaaagagctcgacaagccatctatttggggtaaacttcgtcgcactaaagacaacgacaagaaggactggtaaatgcgttgtcataagtgtgggtctagtgagagcaaggttatagagtcgcgcgacgctgcggatgcgattcgtcgtcgtcgagaatgtcttgaatgcaaccatcgtttttcgacttacgagcgtattgagaagatgaacctggccgttgttaaacgcagcggttctcgtgagcttttcgatcgcgacaagctaaaacgagctatttaccaatcagtgggcaagtttctagatggcgagatggagactgattcggtggtttctgcggtcgaggaggttctctacgcgctgggagaaaatgaagtcccgtcaaatcaaatcggcgagctggtactaaatgaactactaaagcgcaatgaagtggcttatatccgattttccagcgtgttttatgagtttaaaactattgacgaatacgcaaatattctgcggaaattgaaaaaataaaaaaaggggaggtggggaatgcgaacaattataatttatcgtgaaacagacgattattaccctgacgttaggaactggttggcggacttttctcgtcgttatcctgacaaagttatcgaagagtacagcccagacgatgtcaaaattgacgatttaattcgcgttaacgagcttaataaatttccggctatagcagctctagacaatcaaaacaaagttgtggctaggtggacggaagacatgctacccaaactagcggatgtggcgtattattcggaagaaaaagctgaacggtcagatgcagaaaaatttagcgccaacaacaagcatgaagtcatagaaccgccaaccgccgccgataaaccaagtgtcgattagcgtctgctgctgttttggtttttgatttgctgcaaaacgtgatacaattgtgttgcaaaggcgttattagtggctatcaaccacgagccgagagaagaacctgttgtgttttgcggcatcattagaactctccgctggccaggcgttactggcaaaataagtgctaaaagaactatcttttggaaactggatggtaccgcgcgaaagcgttccagtgtcgaaaagatagtttttgtttaagaaaggagataaggtgaacaggaaattgcaacaatttttatatctagctaacgcgcacggatatggaagccctgaggtcaatgaagagagacgtcaaaacggagagcacgttatcacctttgcgcaagacgggttcgagtttagggacacttactatggaggtgaaccatattctgggcaagaagtaatttttgcgaatggtcgcgcaatgtgggctatgcagtatcgaggacgaatcatgcaaggcgaagatgtcgaaccaatctatgcatttttgggcaaagttttgactggacccaagcttggattaccgcgcggtgttgacggtacggttgctgatggtttgacttatcaatttgaaatggacggagagctagatgagtttactgcacgcgaaatcatctcgcgagggaaaaacgtcgtttactcggcagaatttttgggtgggttggttgatttgacaaaggagagctaaatgaaatttaaacacggcaccagacgcagagcgattgaatacgaaaaagacatcgctgcgcagtggaagaaaaataaaacttttgaaaaatcagttgagcaacgtccggccgaaagtgcatacgttttttacgacgggccgccgtttatcactggtgtgccacaccacgggacattgttgagttctatcgtgaaggacgctgtggcgcgctattggaccatgaaaggcaagcgagtcgagcgcgtttggggctgggattgtcacgggctgccagcggagaattttgttgaaaagcaacttggtattaccgatcgtcggcaaattatagtttctaggcagtcgaagattcgctttgagcaggactttaaaaaatccgctgaggttattcgcaaggttgcaaaatggcgtcaagaaaagggctttccgcatggcgatacgtgggggctagagcatactttaccggctgctcttttgaaagagtataaaaataaggcagaattttatacaatttataaccaagacactctaatcggcgcgtttattttgaaagacgacgactacgatggtatgtggcaagagcaacccgcggaaaactcacaatacctctacaaatttgcgattttgccacagtttcaagggcagggctacgcggacagcgttttggatttgttaaagcagcgaagtattgaaaatagacgcgacagttttcgtttggatactggagaacaccaaccggggttgataaaactctatgagcgcaatggttttaagaaaatttgcaactggaaatctgaaactaccaagttaaactggctactttatgaatggaaaactgaagaggcggcagagcttgagagttcgtgtgaaaaagacggcagtggtagcgcatgccgaactattagtttggaggattatattatcaaggctcgtgagtcgatggttgccaatagcgaaacgtgggaaaatgtgattagccgcatcggccgctgggtagattttaagggtgcttataaaactatggataaaaactttatggaatcagtttggtgggcgttcaagcagttgtatgaggcgggcaaaatttacgaaggcgaaaaggtgctgatgtatgacaccaaatttgctactccagtgagcaaaaacgaagtgactatggataatgatgcttatcagacggtgacggatccgagtgcgtatgtgaagttcaaagttgctgaagacaatctaatcgacaataacaacgggttggaaatcgcaagtaaaatccttaagaatatgtcaaacataaaatacggtatgaaattaaaaaatgggaaactgtgcgaaggtaatcacagtggcaaggagtggtggaacaactatgtcttgcagagcccaagcgaggttcagaaaaacaaactgggtgtttgttgggaccaggttgagtttgaaagaaaaatgtttgaagacaaaaacatttctgtaaaaactttcgcgattgtttattatgaccacaaaaataagagttacccaaatcatactttcttaattttcagatcaaataaaaaaatttattggcttgagcactcgtggctgccgtttgagggaattcatgaatataattccgaggaagaattactgaaagatgtgaaaaagaagtttataaaaaataccaaatatattcccgaaaactatgacgaaaaagaattgtgtgtttatgaatatcagcggccaaaatttggtataagcccacctcaattttataaacatttcgagggcggggaaaatattgttgagtttactgcgcaaaacacctacctcctcgcttggacgacgacaccctggactttgccagggaatacagctttggcggtaaatccgaagctcaaatacatcgaagtcaaagttggtaacgagggtttgattttggctaaaaaactagtcgaaaaagtgctggttgatgacaaaaaccaaccgttagattatgaaatcactagagaaatgaccggtgcggatttagttggcctggaatacgaaggtttatttggcggtggcggtaaagtttggacagccgatttcgttgaagacgcaggtggcactggcatagtccacatcgctccagcttacggtgaagatgactttgagttggctaaaaaacatggtattccattactacatacgatcgatgataacggctattatctaccagaatttgccgaaagactacatacaattggtgttaagaatactgacgataacggtattgaagtctgggctgctaataaatttattgcgaaacgtctgcatgagcaaggtgttgtttggaagattgactatattcaacacgaatatccgtttaacccacgttccggccaacgcattatgtaccgtgcaataccttcctggttctttgacgtccagggacagaaaccattgatgttggaacaaaatgaaaacattaattggttcccgaagcacattaaacaaggtcgatttgccaaaaatattgaacaagcaccagactggaacatcagtcgtgatcgattttgggctacagctatgccagtttggaaaggcgataagggaacggtcaaggtcattggttcgtatgcggaattaaaagagttatcaggtgtggagcttgatgattatcatcgtccgtgggttgatgatattacttttgatatcaacggtgaacactttacccgtatcgaaaaagtccttgattgttggtttgaatctggctcaatgccatttgctcaactacattatccgtttgagaacaaggagaagtttgagaagaactacccagcggactttattactgaatatgttgcacaggtacgagcctggttctactatgttcatgtggtaaacactgcactgtttggccaaaatgctttcaagaactgcatcgtgactggtacgctggctggtaacgatgggcgcaagatgagtaagagcttaggaaattatactgatccaaacgaactgatggacaaattcagtgctgactccttaagatttttactactaagttgtccgatacttagtggcgaagatttttcacttcaagacaaagatgtatccgacgtagcacgtaagctgtcaatggtttggaatatgtacgatttctttactatgtacgcagaagtagatggctgggagtctgataattcagaatcactaacattgaatcctgacgatgtcaaaagcccgcttgataaatggatcatatcgcgcctgcatcagcttaccgatcatttaacacgtcatatggatgattacaacttaccagaagcctgtagtgaagtactaccatttcttgacgacgcgtcaaattggtatgttcgtcgctcgcgccgacgtttttggaaaagtgaggatgactcagataagagcgaggcatataggactctacactatgtcttggtgaaacttggggtattgctagcaccgttcacaccgtttttggctgaggagttatatcaaaaattggctggcggagagtcagtccatttgctcgattggccagaggtaggcgagattgacaaaaaagctttgagcgacatgacacgaactcgtgaaatcattgagagaggtttgagcttgcgaatgaatcgtgatgacgagttcgggcagatcaaggttcggcagccactatctagattagaatatcctggtgataaactagatggtttttatgagcaaattattgttgaggaagtaaatattaaagttgtcgataatgcaaaagaactggtgcttgataaaaaaattacactagatcttaaacgcgaaggtcaagctcgcgagattattcgtgtaattcaaaacgctcgcaaagaagctgggtttaatgtcgacgatcgtatcgttgttaatataacaacatctaacagtattattgagaaaacaattaatgaatatcgtgatacaatagctgctgaaattctggctactaagtttgccgataacgatggatacaaaactaccgtatcagttaatggtgcggaactgattatccagttgaagaagagttaaggttgctggccagagccggacagcttgcaaaattgccgctattttgatacaatgccacttgtaactttgaaaatatggcggcgatgtttgttacaaacggcaaggggatatagctcagctggttagagcgcctgctttgcaagcaggaggcccagagttcgaatctctgtatctccaccagttcagggtcgctagctcagttggctagagcgcctcgtttacaccgaggaagtcgggggttcgagcccctcgcgacccaccagtctatggggacaccgaggttactccttggagtctccaccaaaaaataattattcaagaaaggataacatgaaagcagttgtcaaaatcagcggtaaacaatatattgttgctgaaaaagagaccctactggtggatctcctccaggaaggcacaaaagagctcaaagtcaacgctctcgctattttggatggcaaaaattccaaaataggcactccagaaactgacgtggtggtaaccgcaaaggttgtggaaccagaggtgaaggccgacaaaattcagtacattcgctacaaagcgaaaaaacgtgtgcacaaagtgaacggccatcgccaaaagtacagcaaaattgaaattgtttcaattaaataggctcggcctgcacaaataagcgccctgtaagagggcgttttttgaaaaactgattagcggtataatgccgcaatttaaaactccaaacgtgctataatatgctcatggatagttttgtggtagcgcagattcttagtgccgtggcggcggtcatttttatctccagcatacaatttaaagacaagaggcacataatttatttttttatagcgagcactttaattgctatgtcggcgctggcgttgatgggtgcgcgaagcgggttgatgatgaacttcgtaactttgcttccgaccctttacatttatcgtcagggcaaacatcgccgccgcctaaaaccggctaccgcttgggtgttttgggcgctgttgttggtcggttggctggctgtctactctggcccagtagatattttggcgctaattggcagctcgatttacgtgttttcgctgttccagcgtcacgaaaacaatattcgtggtatgttggtagtcaatcagattgcgtgggttagttataacttggttatcggactatatacgggggcttttttcggcgtttgttttattgtttcagacattgttgctatcaagcgctaccacaaacatcgacgttggcatcgacgctccacgcaccattggtggaagtagtttttatctagattctaaatgctcgcgggcctttttagtgaccacacgaccgcgtggagtacgctcgataaaaccaatctgcatgagatatggttcgtaaaaatcttcaatggttgaagtttcatcaccagtcagggcggctatggtattgagcccgacggcacgctctccgtagtttttcaaaatcgttgatagcagtaaacgatcggccggatcaagacccaagtgatccacttcgagctccagcagcgctcttttggtaattggttcgtcaataattccgtcgccgttaacgtctgtgaaatcacgcacgcgttttaacagacggttagcgatgcgtggcgtcagtcgagcgcgcgtcgacaaagtttcagcggcttcaccagaaatttgactgctcaagatcttagcagagcgcgaaataatttttttaatatcttctggtgcgtaaaactccagacgatataggtggccaaaacgatcgcgcaacggcgcagccaacgaaccagtgcgagtggtggcgccaatgactgtaaattgcggtaaatccaaacgtacactgcgcgcggcggggcccttgccaataactatgtccaacttataatcttccatagctgaatacaaaacttcttcaatagctctggaaagtcggtgaatttcgtcaataaataaaatgtcgccgtcgttcaaattggttaaaattgacgctaaatcgccagcccgttcaatagcagggccagccgttacgcgcagcccaacacccatctcgttagcaacaactcccgccatggtagttttgccaagtcccggcggcccgtaaagcaaaatatgatccaacgtatcaccgcgctttttggcggcatcaatagctagcttcaggtttttctttaagcgaggttggccaatgaactcggtgaatttttgcggtcgcaagttgatttcgtcgcgctcttccgaaacatctttcgctttgggcgaaacgatgcgctctggtgtgtcgttgattttttgaacaggcatattaataattgtatcacaactaatgcttgactgtgcaaaggttatgatatatgataagtatcaacatagctccttaagtaagagttgtgtcactatctaagttgcttaggtttctataataatttagttataaagactaaagcaaagctctaaaccgccaattggcggtttatcttgtgccacatttagtcttgtaggcaggggcggactgtggtataatacacaatcatgaaatattcactcggtctggatattggtactacgtctgtcggttgggcagtagttaatttagacgagaaccgcattgaagatttgggtgtgcgtatttttgaaaaacccgaaaacccaaaagatggcaagtctcttgccgagccgcgacgtacagcgaggagcacgcgtcgtagattgcgccgccgccgtcagcgtttgaattatctgaaagagttttttattgataataagttgttatctgctgagcaaattgaggaaattttgacgccacacaagggtgcgaaaaatccttatgaactacgcgaaaaagggctgagcaaaaaattggataacgaagagttgtttattgcgttatatcacatcgccaaacggcgcgggtataaatctaatcgcaagtcggttgaagaaaacgacaaagaaacgggcgaggtgcttaaatccatctctgagaataaagtacttttagaaaaatactcgacggttgtcgtaacgcttaataaagatagcaagtttaaggcgcacaagagaaacaaggctggtgattacagcaattcgttcatccgcgagaattttgaggcggaaatcaaggcgattctgaccgcacagcaaaaattttacccagaattaactgatgagaagattgacgagttattatttaaaaactatattctggaatacgacgttaagaagaaaaacggcaaagaattgtcagaagacaaaataaagcatctcaaagttaaaatggcggtcggtctttttgcccagcgtccttttgtggacaaagagttgattgaaaaaatgcgtggtaaatgcccctttgagccaagcgagccacgcgcgcaaaaagcttcaattacttttgagatgtttcgtttggcgagcgatttagcgcacttgacttataacggtggtcaaaaattaaccgaagaagaaattaagaaatgtattgagaaatgtaaaactactggaaaagtcacatataaagcgattcgtgaaacgcttgggtataagggcgatgacacttttgagtttgattacattcgcggcaaagacccgagtaaagaagacttagaaaaagataagtttgtcaaagaaaagaatacttttgcggagttgaagttttatcacggtgtgaaaaaagcactgaaagacttgccagacgattgggcgaaagttgagagcggcgcggatttgtttgacgaaattggctatattttgactgctaataaagacgacgaggcgataaagaacgagctaggaaaattgggcaaattgtcggacaaagccattactgagttaatgaaactatcgttttctgggttcgggcatttgtcaattaaggcactacggaaaattacgccgtttattttacaaggcaaaacatatgatcaagcagtcgctgaggcgggttatgtcttcaatgcgaaactatcgggtgagaagagcaagttgccaccgctcaacgaagacgaggcgcaccaaattaccaacccagtggtcaagcgggcgatttcgcaaactatcaaggttgtgaacgccgtgatacgaaaatatggcgcaccaacacgaattggcttagaatgtgcgggcgacttagctaaaaatttcaaagagcgtgacaagattaaaaaggcgcaggatgaaaatgcggcggaaaatgagaaaatagtcgaacggctgcaaaatgagttcggcgttgcgaacccaacgggtctacaaatcactaaattcagattttataacgaacaaaatggtaaatgcccgtattgtgttgagtcactggacataaaccaactgttttctgacgaacattacggtgaaattgatcacatcatcccgttctcgcgctgtggtaatgacggacgtggcaataaagttttgtgccacaacgagtgcaaccaaaacaagcgcaaccagacaccatatgaaacttggagtgcggacacggaacgttgggctaagatagagaactttgcgcgagcgacttattttggcaaaactcatggtaaacaaaaacgactattgactgagaagttgccgaaagaagattggagccagcgagccattaacgacacacgctacatctctaaatttatgtcgaatttcatcaagaagaatctcaaatttatagacaacgagaagcagcagaaagtgattatgcccgctggcggtattacttcacatatgcggagaatgtggagaataggagttaagaatcgcgaagagaataatctccaccatgcagttgatgctgtaattgtagcgttagtagatcagggtaaaattcaagagacttcgacatatagtagatggactggtcttggtgcggggagtttcaagtatcagtcggcattagcaaaagttacagatccattaacgggtgaaataatcaacaaaacagcatacgatgctttacgtgagagtattttgccgtgggagaattttgataaagaagttcgcctgcgcacttcgcaaccaaaaaccggtgataaattagagatttggcaagaccaattccgggacttgtacaaagaccaagacgataaattccgcgaaaaagtacacccaattttcgtatcgcgcatgccaaaacgtaacggtacgggtactgccaaccaagaaactatccgctcgccgcgtggtgtattagataaagagaaaatctcatatatccgcacgcggctagacaaggtaacgttagaaatattagaaaattcatccgttaaacaagatgacaaagtactttacgaacaactaaaaactttgttggagcaaaacggtaatgacccgaagaaagcctttgctgagcctgtctataaaggcggcaaaacgcacgacaaaaacggtaagccactctcaccagttagcacgattaaggttgatgattcaaagaacgtgaggtctggtttccttatcaataatgataaacaatttgtgaacaacggagatatcatacgggcggatgtctataagtttgttggagattgcaggccgaagagtaatataagatataagtacataccaatatatatgagccaattacataaaccaaaaacgcttgatgacactaattttgagtttgtgttttctttgtataaaaatgactactttgtcgctgtttttgataataaagtaattgaggggtatttcaacaactacccggggaagagccgtattgtttacaccgaccatacttcaagccaaccgggtaataagtatattgatacaggtaaggcgctggctattcgtcgacatgatataactgttctcggcgacaattacaagtggagttaatatggcttggcgagtaatctgcgttgaaaaccccgcgactctgagtgtaaaggacaataaacttgtcgtcaaacaagagcaagaggcgctagtgccgcttgaagacatagacagtcttgttttagatagttacggcatctctacctctgtgaatttgctcgcggaacttgccaataacgacgtggcggtggtgatttgtgaccaaaaacacttgccagcaagcatgctattgccatattcgcaacattcacgtggtgctagagtttcgcgtgaacagttagcgatgaacgagccgcttaaaaagcagatttggcaaaagactattacgcagaagattatcaaccaagcggccgttatgaagaaactaggttttgataacaaagaattactggaactcgcaaaatctgtgcgttcgggcgataccgacaaccgtgaatctgtggcggctagactgtactttgacgcgctgctagacgatgcgacgcgacgcaaaccgatgtggcataattcggcgttgaactatggttatgcaattgtgcgtagtgtgatagcgcgctcgatggcagcgcgcgggctaatcgcttcgcagggagttttccatcatagcgagctaaacggtttcaacttagcagacgatattattgaaacttttcgtccaatagtcgacgactttatactgaccaaggttgcggctcaacatattggggataaagatagcaaactcacaaaagaggacaggaagttaatagttgacataactaacgaatatgttataatgaacagcaagagattcatgattaagcacgcgtgcgatatggtggtggagagtctggttagagtaataaaatcgggcgatgcaagcgacatgagtcttccaaatgttatttgttaagaaagagtttaagttgtacaaaattatgagagcggtagttttatttgatttgcctacgggcaccaagagtgaacgcagagcggccacgcagtttcgcaagtttttgctggacgatggttttgacatgttgcaatatagtgtttacgcaaggatttgtcccgacagggataatgctaacatgcacttattgcgcgtcaagaaaaatgcgcctgatagtggttcggtgcgaatgttgatgttgaccgagaaccaatttatcaatatgcacatcatagttggtgagaaaaccacgcaagaattggtggttcctagtcagcaactgtcatttttttaaactaaaaacctctctgcaacagagaggtttttgagtaagtattatatcactatctaaattgttagggaactataactcaatgacgaatgttttaaactcaaaactgattatatcactatctaaattgttagggaactataactaaagggaactatgactattgaggggctggattatatcactatctaaattgttagggaactataacgacacggtgatcatttgaccgtttgcggtgattatatcactatctaaattgttagggaactataaccggctctcgcctatttagcgaacagttttgattatatcactatctaaattgttagggaactataacgcggtgcctatcgaagcgttcgacatatttattatatcactatctaaattgttagggaactataacacatcgtaatagcagcaaacgctgcaggttattatatcactatctaaattgttagggaactataacatactagacagcagcgaagatccaaatacaattatatcactatctaaattgttagggaactataacgagctactggcggtagtgtaaatcctttaaattatatcactatctaaattgttagggaactataactatcccagcgatggagtttattcactgtggattatatcactatctaaattgttagggaactataacaatcgcaagaggcggttaacaatgccgcgcattatatcactatctaaattgttagggaactataaccggctctcgcctatttagcgaacagttttgattatatcactatctaaattgttagggaactataactaggcaagttctacctaactaattttatcgtgaactgcaatctgaggatttgtatttgaattacaatcatcagacccctctttcttttgtcgataaagtgtgatataatcaccctatcgactaaattagttgatattatagagagctagcttgctagctcttttagttcaccgactttataagtttcatgtgcctgccactacaaactcactccttgcttttccagagataatatgctaaaattcaaacagttttaatattaatttaataagactatccgatttttgctggggcggggagaggattatataatttaagataggtagattcgcactccagaaggcgaatttacggagagagcagtggctacaaaagctattactatggacgaccttttgaacggtgcgtctgatgcggtcttagagactggcgcgaccctagagggcacaatattaaatgtaaaaaagaacgagatcaccgttgatttaggtgtttttggcgttggcgtggtgccgaagcgcgagattggctttggcaaaaaatacgaaatcggcgaagaagttaccatcacggttattgaagcagatttgggcgacgagattattttgagtttgcgtaaggctgccaaggacaagggctgggacgaaattcaggtcgtgttagaaaaaggcgagactattgaggtggtaccttatgatgctaacagaggcggattaatgattgaatacgaaggtgtgcgcggtttcatgccggtgtcgcaactgtcggctgagcattatccacgagtaggtagcgagagtaaagacgaaattctgaaccgcttaaatcaactggtcggcaaacctttgcacgcgcagattttagacgttgataaaaagcaaaacaagctgattttttctgaaaaagaagctatcaaagatggcatcgagaagaaatttgcctcaattaaagttgacgatacggtaaagggcaaaattactggcgtggttgattttggcgtttttgtgaatgttgacggcatagaaggtatggtgcatattagtgaaatttcctgggaacgtgtaactagccctggcgatttgcttaaggttggcgacgagattgaagcaaaaattatcgctatagacaaagatcgcttgagcctgtcgattaagcaactaaaagaagatccttatctgaaagaggtgcagaagtttaaggtaggcgatgtggtcgagggcaccattacgcgcatcacgccgtttggcgcttttgtgcagattagtccagcggtcgaagccttggtacacgtttctgagctgtctggcgacggcgacaaaactaacccagaaaagattttcaaattgaacgaaaagaaagaatttcgcattatcgaaatcaatccagaagctagaaaaatttcacttggtctagtcaagtaaaacaagttaaacgaaaggagctcgcatgaacacacaggaacaaaaaattttgattctaccagatatggtgacggtcagcgagctcgcggatcagctggacatacccgtaacgacgcttatcggggagctgtttaaaaacggcatagcggcgactctgaatcagcgtattgattttgaaacagcagaaattattattgatgagttggggctttctaatattaagcttgagaagaaggaaattagcagcaatccgaccaagagcgaacgtgtgagcagcggtaaaattgtgccgcggccgcctattgtggcggtcatgggccacgttgatcacggtaaaactacgctgctagataaggttttgggcatgagcaaagccgatcatgaagcgggcggtatcacccagcatatttcggcttatcaaactgagcaaaacggtcaaaagatcacttttttggatacgcctgggcacgaaacttttgccgccattcgacagcacggtgcgattttgactgacgtggttgtggtggtggtcgcggctgatgacggtgttaagcctcagacgatagagtcgattaagtttgctaaggacgctgacgcgaagattgtggtagcgattaataaaattgacaaaacaggggccaatatcaacatggtgatgtcgcaattggcgactgagcatgacttgaatccagaggagtggggcggcgataccataatggtgccggtcagcgcggtaactggcgaaggcgtggataaattacttgatacggtgctgttggttgcggacatggaggaattgactgcggattcagagggcgtagctgaaggtttgattatcgaggcgcgacgcgacgccgggcacggttcgatggcgcgcgtgctggtacaacacggcaaattgaaaatcggcgactattttgtggcgggcagtgtttacggacgcgtgcgtacaattagtgattggagtggcaacgcgctaaaatctgcgggtccttcgacgccagtttcggtaactggttttaaagatgtgccgcagtttggcgaccaattgattcagacaaagaatgagcgcgaagctagagctcgagcagaaaaaaactatgacgagcaacagcaatttaccgccaatgcgaatataaccggcaacgatatgttgcgtatgatgaacaaggctgataatttggaagaaatcaacgttttggtgaaagctgatgtgcagggctcgctagcttctgtggttgattcgttgaaattgctcaacacccaggaagtggcggtgaaaattattgcttctggagttggtaatattactgagggtgatgtgcgacaggcagaagcatcaggcgcaatcatttacggtttcaatgtgggtattgacaataatatcaagcagaacgctgcaagggcacgcgttgacgttaggtcttacaaggtgatttatgagttgattgatgatgttaaaaatgaaatgagcgagaagctgtcgccagaagtgattgagacggaaatgggagcgttggaggtcaaaggcgtttttcgcaccacgcgtgatgaggtaatctgcggtggtttagtaactcggggcaagattctcaaagacctacaggtgcgcatattgcgtaaaaaagagcaaattggcagcgccctagtaatatcggtgcaaaaaaataaagatgaagtcaaagagcttatcgaaggcgatgttggcgggttggatttgaaaactgaacacaaaactgtggtcgagattggcgacaaactcgaattctttagtcgtgagacgaagaaaaggacgatttagcaatgaatgcggagcgcgttaatggccaaatatgttcctaaaattcgtcaagtacgtctagaaagtgacccggttcttcgcgaaaagactcttaggctaacgcgtgaagaaattttgtcgccaaaaatgcagcagcttgtcaaagacataaaatttacttgtgacaaaaagagttatggtgtgggcatgtctgcttgtcaggttggcgagccagtagctttgtcggttattgcgataaagccgactccgtctaaaccaaatatcgtaccgtttgacgaagtctgttttaacctagagattattgaaactctgggcgataaaattcctctttgggagggctgctgcagtatacttggtgaggatagattaccagtatatgcacaggtgccgaggcacaaaagagtgcgcgttaagtttttggacggcaatgctcaaccgcaaacaagaacagtcagcggttttgtggcacacgttgttcagcatgaagccgatcatatcaacggcatattgtttacggattatgtcaacagaggtgatttaatatctacgaaagaatatttgaagcgagccaaaaagtccgccagctgaatttcgcatgaattatttgaggccgttgagataatctttgacgagcatggttttgccggactttgggttgatgagttcgatgatttgtagggccgtgtcgttagtacaaataactacatcgggccaattatcgcccggattgtagtcgagggattttgctttggtgatgatggtgctttggccacgaaagggcaggcgcgactttggccagtcaatgaacgcgcgaattttgcgctcgcactcaatagcctctagggtagtcgggtcaagattgccgtcctctttggtaattttgcgcgaatatgaaacatcgcgttcgacgtgtgattgacgccgcggcctgattttgccatgggcgtattttgggatatattcaaccagcagcttattgctcagatttaccaatttttcagtcaaactaggcgttgtctcatcgctgttgatttttagcgatttttggacgataattttgccggcatcaagttctggttcaattaacatcaagctaacggcagtggacgactgtcccgagagaacggcaaaagtaattgggtcagcgccacgccattgcggcaatcgcgaaaaatgactgttgacgataccgagaggaaaataatcaatactttcctgagatattatcactccgtagtccaccaccacaccgaggcgactttttggcgaattctgacgaatggcattgtctagttctgcgcgagtattcgcaaacaaaattggcaggtttttggcttgagcaaattcttccacaggcgctgcgcctcgaaagccatcaggcatttttttagtgatgacaaattcaatatcaaaattttgcgctagaccctcaagcgatttctgggcgactggtcctgtaccaaaaaaaactatcttcatattaccaaaaactaaatagcgtttcgttaagtcctaaccagctgtagagcaaaattaccacagttacgaagggcagaaccagcagcaaggttttaatgccgtgcgggatttttttgccgaacagggctgttaaaattgttaagactacaaaagctatcacacaaagtgctgatacgccatatagccagttgatatatagtggtagtgacatgttattcctcctttaaatttaatatacccatttttacaactttttcatactcaacaggttctaactcgccgtttttggtcaatatcgagaaagccttttcgtcgcgcgtgatgtgatcgacgaaacatttgccgttggtatgatcgacttcgtgctgcaatatgcgagcaataaacggcgacgggcttttgatacgaatttcatgcccgtctattgacacggctttgacgcgcactttttcatagcgaggaacaaggccgtaaacatctttgaccgataggcaaccttcttgatccgtcacgatatcgccttcgtatttggtaacttcggggttaattagaacaatgaatctctggttttccttgtcgtcaaaatcttcgcgaataataaccacgcgctctaaagcgtcaatctgcactgccgctagggccaccgcgacttcgttcggccgactgtcttcccagtcaagcgccgccgctttcatgttctctactaactgcagggtttcttcggtaatcacgtgaaccttgaccgacttttttcttaagttggggtgtggcagaaccaggatattttttttggtatattcggatttcatagactaattgtagcatatttatcttggctaaaatatgttatgattaagaaattaataagcgtggaacaacaagaagggggaagcacaatcatggcaaaaccgacaacaaaatcagagctaatactagcgggcgacaaacaatttacgaagttttgggaaattctcgattccatgagcgagcaagggcgcgacatagaatttcatttcggtagcgacgctggtaaagaagcgcactggcaaagagataaaaatgtgcgagacgtatttgtgcatctgtacgaatggcatgaattattgctaaattgggccggtgcaaaccggggcggcgatgaacaatcttttttacctgagccatataattggaggacttacggcgacatgaacgttgagttttggaaaaaacatcaggatacgtcgtatgatcaagccagaaaaatgctaaaagacagccacgaaaaagttattaagctgattgaagttttctctgacgacgagctattttcgagagggcgtttttcttgggtcggcggctctactctggggcaatattgtacgtcggtaacctcaagtcattacgactgggctatcaagaaattaaaagcgtatatgaaaattttgtgatggtgtaaaccaaacctcgccagctttggggttcaggttgcgtatgattcatgttcacagcagcgagttcggatcaagttctgtctgccagtaagtggtgggcggaacttttttgacgatttcttctagggttttgcgatttttggcacgaacgacaatttgccagcggtattggtcgcgttgacgttcgtaaaaggcgggggcggggccaagcacaaaaacatcgggaaaatcggagattatttcttgggctagttttttcgccgttgatatggcagttttttctgttttgtatgaatttgttaatttaagcaaataggagaacggcggaaagtgcccgcgcttgcgttcttgaatttctgactcataaaacccgtggtaatcttgattgatgccaaacttcaccactggagaatttgcttgaaaactctgtaccaccacttcggtttgatgttgattgcgtccaactcgtccgaccgcttgcgaaatcaactgaaaagtacgctctcgcgcagaaaagtctggcagactcaacccggtgtcggcttgtggaatgccgaccagtcgcaagttgggcaagtctaaacctttagcgatagtttgcgtcccaactataatgtcaaccgtgccatcatagagcgcctgatatttctcatgcacgccatcgttcttcttattatcgccgtcaaaacgcgctatgtgagcgtcagggaaaaggcgctttagctcttcctctatgcgtttggtaccgacccccttatggatgatgccggtggaattgcaggtggggcaattagtgggagttttctcttgataaccgcaaaggtggcacttggaaacaaagttatcagcgtggagcgtgagtggcaaaaagcaacgcgagcaggtagcactccatccgcaattttcacagagcgtcgagctggcagagccgcgacgattatggaagattaaaacttggtgcttggcttttagcgtatcagttattttttttagcaaaattggcgaaaaaacactgtcgccgcgacgattctctcgcttagtcatatcgagcaaggtgatttttggcttaatagcgtttttggcggctaatttgttgagctctatcaccgcaccctgctgttttgccaaataaaaatcggcaactagcggagtcgctgaacctaagatcagtcgcgaatcggtctctttggcgagcactgccgcggcgcgcaaagcgttatatttgggcgagagcccctgtttatagccaggctcgtgacactcgtcaatgactatcagccctaaatttttaactggcaaaaaaagagcagaacgcggcccaataacaacgagcggtttttcggcttcgagcacgcctttccaaacgacgaatctttcgacagaggtcatttttgaatgggtaacgacaaccgtgttgaactcgtttttaaattctgctacaacttgggaggtcagcgagatttctggcactaatatgatagagctaaggtcgcgctctatagtgtcgcacacaagatttttgtaaatctcggtcttgccagagccagtgataccgtgcaatagagaggtcttattttgacgatttagaatttggcggagagctgattgctggtcgttattgagtaaaatatgtgttcgtttgcgtgccgctttcgtatctgttatttttttatcacggtgatttttagacaagccagatgggagcatggtttgccaaactatgccagcaccggttgaatagtaggttgaaagccagctgtgaagttttactaggtgttctggcagcgacgtatcgaatagaactttgagtatttttttacattcaaaacctggtttct

SEQ ID NO: 975 - DNA, 19974 bp, synthetic construct
  source 1..19974: mol_type = other DNA
  misc_feature 1..19974: note = Synthetic
aaactgcaatgcttgcccgaaatgctttcgaaactacagttttgcgaggcttgaaagcttcaattttggacgaagaagtaaaacttggtaagcgtgaagaaggcttaaatgatactgaaattgaaactttggttgcgcgagaagtaaaaaaacgcaaagaagctgctaatttactagatgccgaacgtgctgaaaatgaactgaaagaagctgaaattatttcaaaatatttgccagaaatggcgagcgaagatgaaattcgtgcgtctgtgaaagacgaaatttcaacaatgggagaagtttcgattaaacaaatgggcgcaattatcggtaaaatgaaagcaaaatttggtaattctgccgatggtgccgttctggcaaaaatcgtaaaagaggaactttcgtaagtagtaagtaattattgtgatcacaacgtggtttcattttataatagtgttataaaatataggtttaacttcttaaaatatcagctctacgatagaataatcaaaatattactttttagccaagatttttaatttttaatttttaatttttttatgctataatataaaggaatataattttaaaaacaaaaggaatttaatgattgtattttttggcccagcaggtgctggtaaaagcgttcaaggaaatttattagcggcgcgaaatgattggcgctggcttggtgcagggcagcttttgcgtgatagcaaagatcccgaacttcttgcgcgaatgagcacggggaaactagtcgacccagaaattgttaatcgcgttatgggtgaggctcttgatcgtgcaaacagtaaaaatgttaaacaggttattcttgatggttacccacgccagcttgctcaggcaaaatggctgattgaaaataagcaaaatcatggtcgaaatgttgatttagtgattgttctggaagtgccacgaagtgaattgatgcgtcggcttgaaattcgtggtcgacttgatgacacgccagaagttattgatgaacgacttagaatttatcgccaagaaatgtacccagttttaaattattttaatgaaaacggtgtgagaattgctcatattgatggaaccggtacggttggtcaagttcatgatcgtattatggaggaaattgaatcgtgcggaatttaattactggcaataaaactgaagcacagattcaggcgatgcgtgagggcggaaaaatcctcgcgcgaattttgcgtgaacttacggaattttcgaaagttggcacgactggccttgaagttgatgcttttgcgcgaaaaaaaattaaagaatatggcggaaaatctgcatatttaacaccagatgtgaattttcctggtgtggtttgtatctcggtgaatgattgcgttgttcacggcgcaccaaatgatatccctttcgaaaaaggtgatgtggtaaaatttgacatggtaattgagtttaagggaatgatgaccgattctgccacaacaaccgtgattggtgaagagccaaaaggagcagttaagcatctcttgaacgatactaaaaaagcgctttcagctggaatcgctgttgttaagcctggtgtgaaaactggcgatattggtgcggcagttgaaaaatcgctaaaaaaatcaaaacttggtaatgttcgagaattggttggtcatggtgttggcttaaaaatgcatatggcgccagaagttccaaattacggcaaagctggtacgggtgtagtttttcaagagggtgacactttttgcattgagccaatgacttcactgggtaagggtgatgtaattttcaatggaacagatagcgaatgggatgttttaatgagagacggatcactttcagcgcattttgagcacaccattttggttacgaaagatggagcagaaattcttactttagaataaaatttcgaaaaatgggagggaaagttaaattttctaaagagaaaaatgcttgcaaacaagtgcacgctcattttggaatagcacataatcataaaaaatcaagtaatcttccgctggctattggtttaaatttgggtttttcgattgcggaatttttctttggtacactttttagttcggcggcgatttcggctgatgctgttcacgatttgggtgatgcaattttgcttacgattacattaattttaaataaactaagcaagaaaaaaccaacttccgcaatgagctatggctataaacgatttgcggcgcttggagctcttttaaatgctggtgtaattttgtggctctcatacacaatggcgatttctgtatattatgaatttacttttccgcatgttcatccatatgtgaatgttccagggttgatgattgtttcaattgcggggattttagtgaatttattcgctgcagcacgcttatatggttcgaaaaatattcttgaccgaacagtttcacttcatttaattgaagatttacttggttggattttaacatttattacctctgttttaatttcattttcaggacttcatatactcgatcgcgtggcgagtttatgtattttattatttatttcttggggagcagtttcgaatgcttggggcgttttaaaaatcttaactcaacgtgcaccaagtataaaaaatttgaacaaaattaaaaagcaaattttagcggttgaaggtgttttgaaaattgaaaatattcatttttggagccttgacggagcggaacatatttttacagcaagaattttcgtgagcgatatttcaagagctactgagattcgcaaaaaaatctcccattttttaccagattttcagattgtagattcgacgattgagattttagaaaaataatcaaaaaagtgcttgcaattttgaaaaggctcgtgtataattgttaatgtacttggttgtgccaccttagctcagctggttagagcagctgttttgtaaacagcaggccttcggttcgaatccgaaaggtggctccaagtattttttaatacaagagttgaatgctgggatagtgaagcggtcaaacacaacagactgtaaatctgtcggcagatgccttcgaaagttcgaatctttctcccagcaccagaaattattttttaaaaaacacccatctactgcgagggtgcttttttatttttatattctgctttgaaataaaaatataaattttgttggttttattatttttactcttgctaaaaattagcattaacggtataatagaactatgaatgagaattctcgatatgcggtaggaatagatattggaacaagcaaggttcgcgtgcttattgcgaactttgatagagatggttcgccaaatattttggggcttggatcggctgaaaattctggacttaaaaaaggtgttatcacgcatccagaaaatgtttatcgtgcgattgataaagctcttgctgaagctgaacgcatgagcggctataaaacggaaagagcagctgtgagcgttaatggcgtgcaaattttgagtacaaaagtagacggaatggttgcagtgaactcggaaaaaggcttggttggtgatgaggatattgaccgagttgaagatgttgcattgatcggcaaaatcccagaaaatcgagaaatcttgaagtttataccttattattataatgttgataatcaagaagggattgctgatcctttcgaaatggttggaacacggcttgaggtttacggaaacgcaatctctgcaccaagaatacaagttgaaaatgttgaaaatattctggagcggcttgatatttcttcgaatttatacattccaagtgtggtagcttcagctcgggctgtactaactgaaaaccaaaaagaaaatggcgttgttgttattgatttgggggcttcaacaaccggtgttgtgattttcgaagacggcaatttgcaattcattgaaaatattccgctcggaggaataaatattactaacgaccttgcgattgggctaaaagtttctccagaagttgctgaagaaattaaaattaagcacggttttgccttcgaaagagaagataatagtgatattgtcgtaaaacatggtcgtgaacattacagctttaatacgcaagaaattgatgaaattattgaggcgagagttgaagaaatttttgaggaggttcgaaaggttcttcgaaagtctggccttgaaaatcaattacctggtggcgctgtactaactgggggtggagcagctcttaaaggaattgatacatttgcaaaaaaatatcttcagcttgcagtgcagattagtaaaaatggaattgacaatacggtttctgaaaaggttaaaacgctcgagtattctgctgcagtcggtttgttgatcgaaatgcgtgataatacttcgagatataatagttatagagatgaagaaccagcgaaaatcggatttttcgcaaaattattcaagaaaaaacaataaagtgatataatgggagtagattaaggagaagaaatgccagaaattataccaaatgaagttcaaacttttgctaaaattaaagttgtaggtatcggtggtgccggtggaagcgccgttaatcgaatgaaagatgttggtttgaacaacatcgagtttattgcgatgaacactgatgctcaagctttatataaatcaaaggctgacaagaaaatccaccttggtcgtgaaactacaaacggtttaggtgctggtgctgatccgattgttggtgagagcgccgctcttgaatctcgagaagaaattcgcgaggctcttgatggcgccgatatggtatttattgccattggcgctggtggtggaactggttctggcgctggtcatgttgtggctgaagttgctcgtgaaatgggaattttggttatcggtgtttcaacacgtccattcactttcgaaggagcaaagcgcaaaactaatgctgattgggcaattgaaaagcttgccgctgcggttgatactttaataacaatcccaaatgatcgtcttcttcaaactgttgataggaatttaccacttcttgaaacttttaaaattgctgacgatgttcttcgacaaggtgttcagggtatttccgaacttattactgagcatggattaataaaccttgacttcgcagatgttaagtcaattatgagtaatgctggttctgctttgatgggaattggccgtgcgagtggtgataatcgtgctcaaaaagccgccgaacaagctatcgaaagcccaatgattgaggtttctattgatggcgcacgtggtgttctattcaacgttgctggtggttatgatatgagtatgagcgagattcaagaggcagctgagattattactggtgctgttgctccagatgcaaatatcatttttggtgcaacacttaaacctgagcttgaagatgaattgattatcacggttgttgcaaccggttttgaccgtgattataatgaacctgtaataaattcgctcgaaagtgctgtttcgaaaacttttaatctcgaagacgaacatgctgaagcgcaagaaatcaaccatacaatttcgaacgcaattgatatggaattaaataatgaagaaaaaacttcagccgaagattttgctagtgatatcgaaactaaaaatatttgggctcaagacgaagaagaaaaagacgaaagcgatattcctgcatttttgcgacgccgcaaacgtaataaaaaggaagattaatggaatttaaacttgacgaaacaaaagttttggaaagtagaatgccggttgacggccaatccattcgccgtcgccgagttgcgccagatggtactcgtttcaccacctatgagcggatcgaaaaaccacgaattgttgtgatgaagtcgcacggtggtcgtgaggattttagccgcgaaaagcttaagagctcaattattcgttcgattggtaagttcatttctgatcttcaagttgaagaaattatcaatcgtgttgagaatgaacttcttcaaaaatcaagtaaagtttcttcacaccagattggtgaaacggttctttcggtcttatttgagatgaataaagttgcgtacattcgtttcgcaagtgtttttaatggttttgaaacagttgaagatttcgaagagattttattgaaggttagagaagaaaatgagaattgtagtagtttatagagatgccagcgatcatggccgtgaagttcgaggatatattgatgatttcaaaaggcaaactgggctcgaaattgagcaaataaacccagatgatggtaggaatcaatttttcttgcaagcttatgatattgttgaatatccgacaatcttagcaatcgccgatgatggccgacttttacagatgtggtgcgggcgacctttaccgttaattgatgaagttacatattatgcacgctaagctaaaaaaagcgtgtttttgtattgacaataattttatttagatgtatactgtataaggacagtcccttaagtaaggattgtatcatattctaaatcgttaggtttctataataatcttagcaactaagagcggcagtttcacactgtgcagctacggttgagagttctattatccgaacctaaggcaaagctctaatccatccttaaatcttaaagggtggattatctttatgttgaataaaaaaacttattatcttataatagagttatgaagtactcaataggtttagatataggtacgacctcaattggttgggctataatcgatgaagataataaaagaatcgaaaaagttggcgttcggattttcgaaaaaccagaaaacccgaaagatggtaaaagtctgtctgaagctcggcgaacggctcgctcagcaagaagaaggctaaaacgtcgccgtcagcggttaaattttattaaaagattcttcagagataataatctattaactaaagagcaaattgaagagcttttaaaaccagaaaataaacttgatccatataaaattcgagaaaaggcgttgaatgagaagatctcgaacgaggaactctttattggtttatatcacattgctaaacgccgtggatataaaagcaatcgaaaatctgccgaagaaaacgataaggaaaattcgaaagttctttcagcgatttcaaaaaacgagaagttactcaaagagtataaaactgttgctagtgcattaaattcgaatgaaaaatttatagctcacaaaaggaataaagctgaagattacagcaattctttcgtgcgggcgaatttcgaagatgaggtgaaacttattttaaaaattcaggaagaatttggcttgaatctttcagatgaaaagattaattttctcctttttggaaatgagaaggaaggtaactttaacggaattttttcacaacgtccatttatgactagtgaattaattatgaaaatgcgcggaaaatgtaatctcgagaaatctgaatctcgtgcaccaaaagcgagctatagttttgagatgtttcgtttggcggaaaacttatcacacttaagagttgtgataaacaaagaggaacgcggtctaacggaagaagaaatttcaaaagttattgaaaaagctaaggatattaaagtgctgaaatatcaacacatccgtgaagttttgggctataaaaaagatgaaaactttagctttccaataaatatgatccggggcgagattaaaaaagatagcaaaaataatggtgaagaaaataaatttggtgaactttctttttatcataaggttaaagctgctctttcaaacactccagaagattggcaaaaagtttgtgacaataattatagaatgctagatgaacttggcgaaattctttcatgtaataaagatgatgaaaatttgcgaaaagagatctcgaagtttaatttaagcgaagatgcagttgaagcattgatgatgattaatgttagcggttttggccatttgtcatttaaggcgcttagaaaaatcttgccatttttattgaaaggtaatatatactctgatgcgttaaaaaatgtaggctataatacaaaacaacagctttctggggataaaaataagcttcctccactttcaaaagaagaatcagctcaaattacaaatcctgttgtcaaaagagcagtttcgcagactattaaagttgtaaacgccattattagagaatacggtgcaccatatcaaattaaaattgaagccgcaagtgatttagctaaaaacttcaaagaacgcaataaaattaaaaaaactcaagatgaaaatgccagttataacgaaagcattaaagagcgactcaaaaacgagtttaatgttctttcgccaaccggcctacaaattaccaagtttaaactttatgaacaacaaaatggaaaatgcgtttattctggaaaaagtcttgttttagaaaatctattttctaatgagcattatgccgaaattgaccacattattccattttctcgctgtggaaatgatagcttaatgaataaagttttagttttcactgaagaaaatcgacaaaaaggtaatttaatacctttcgaagcttggggtactaatgaaagccgatgggctgattttgaagcacgcataaattcaatgaatcttccttttcgaaagaaagaacgattgcttgcgaaagtttcaccaaaagaagattggaatagccgtgcgttaaatgatacgcgatatatttcaaagttcttaagccgatatcttcgtaagaatttgaaatttgctaaatttgagaatgaaaatcccgctcagcgagtgattgttccaaatggttcaataacttcttatttgcgtcgtatttggcgtgtgggctcaaaggatcgcgaagaaaacaaccttcatcacgctacggatgcctgcataattgctgcaatcgaccaaagtgttattcaaaaaatttcacgcttgaacaaatattttgaactctttaaatattcggcggaagatgaagttattgataaaataacgggtgaaatttttagtcgagcagatttcgaacaaacttttgaagatattgagccgtggaaagattttggaaaagaagttcgaaaaagaaccgctcattatgaatcaccaatggagcttcgcaacgaactaattggccttgaaaattatgatgaagaatttcgaaacaaaacgacgcctatttttgtttcgagaatgccaaaacgttcaggaaagggtaatattaataaggaaacaattcgttcaccgaaaattgttaaaggatatgtagattcgaaaggaaagctggctatagcgcgaaagcaacgagttcgattaataaatgtagatttaaaaacacttcacaattcgccagttcgcgaaacagatccagccttgtatgagatcttaaaagcacgattaaatgagtttgataataaaccagaaaaagcttttggcgacccaagtaacccagtttataaaccaacaaaaaatagtggttgcggtaatattgttcgctcaattaaggtttatgacacgcaaaattcaaaaagtggtttcttaattaataaaggtaaggcttttgttaataatggtgacacgattcgattagatgtgtttaaacgcaaaaattataagggcgagtttgagtactatttttcgccaatttatgcgcatctgttgaatgctaaaaaagttgaaattttaccaacaccaaatgggcgaagcacggcagaaaaagccgatttcaataaaatccgtgatgaaaacggtaagatttttgcgactgaagaaaatggatttgttaagcaattttcgttgtatccaaatgattatgtgcggatttatacagggaataagattgttgaggggtattacgttaaatacggtatagcggatggaaccttaaacctaatgaaccatgatcaaacatccaaagataacttatcgcttaaacatattggtcgcggtacaataacctttatagaacgctatgatatctccgttcttggcgataactacaggtggatttaatggcgtggcgcattatttctatcgaaaatcccgctcgactaagtgttaaaaacaaccaactcttaatttcgcaagaagaagacgtttcgattccgattgaagatattgactcgttaataattgataattattgcgtaaacttaaccacgaatttgttaaatgagctctcttctcgagcagtgagcgttgtaatttgtgatcagaaacatcttcctgcaaccatagttttgccatattctcaacattcgcggcaagctaaaacatctcgcatgcaaattgagatgaagattccactcaaaaaacagatttggcagaataatattattcgaaaaatttctaatcaggctgacgttttaaaatattttggcttaaatgatgaatatcttcaaaaatgtgcaaatgaagttaaatctggagattccactaatcgtgagtctttagccgcacgcgactacttttcacagcttcttgatgatgcaactcgtcgtcgaccaatgtggtataattcggcgttgaattacagctatgcacttgttcgcacggggttggcgcggcatttggcggctcgtgggctggtagtttcgcaaggtatttttcatcataatgaactaaatagctttaatctagcggacgacctgattgaagcgtatcgcccgctaattgatctattcgtgcttaaaaaatttggtttgcgtgggttcgaaaaagaagattcggctctttcaaaagaagaacgccaaatcttacttgaggttttggaatttcgagttgaaattaagggtaaaaaatttgcaattaaaaatgcaatcgagattacggttgaaagttttattgattgcatttcgaagaaatattcaaacaatttagagttaccaaaaatataaaaataaaacaaaaaataaaaataaaaagaggaaagatggcatataaatttatgagagtagcggtattttttgatctacctacgggtagtaaaaaagaaagaagagtggcaacacgttttcgaaacttcttactaaaagatggttttaatatgttgcagtatagtgtttacacgaggctttgcccgaatagggatgttgctgaaaaacatatgaatcgtgttaagagaaatgcgccagatgttggttcaattcgtctgatttatttaacagagcatcaatttacgaatatgtatgtgattgctggtaaaaaaaccgtgcaggaaaggtgtgtttcaaacgatcaactttcatttttttaaactaaaaaccccatcgcaacagatggggtttttagtaagtattatatcatattctaaattgttagggaactataacgcttatttacaaggcttttacgctcgttttattatatcatattctaaattgttagggaactataacgaacaagtgctggaacttctcgtgtttataattatatcatattctaaattgttagggaactataacgagtagttctcgcatctttgcttgaacttaattatatcatattctaaattgttagggaactataacccttctggtgtttcggtttatgtaggctggattatatcatattctaaattgttagggaactataacgtgttgttcttgcctcattgcttgaacttaattatatcatattctaaattgttagggaactataacacaaagattttaatactcgatgcgacggtgattatatcatattctaaattgttagggaactataacaatggctttaatcttattgtcatctgttttattatatcatattctaaattgttagggaactataactgttggagttaaacgatgacttatgcagatattatatcatattctaaattgttagggaactataaccaagttacggatggaactgttgcggcttatattatatcatattctaaattgttagggaactataacctttcaacccagactttaaagtatttaatgattatatcatattctaaattgttagggaactataaccttatgtttgtgaagaaaataataacggagattatatcatattctaaattgttagggaactataactattatatgtctggggtctctgccccctcgattatatcatattctaaattgttagggaactataacaaaaattacgtaatatgtacgatactttacattatatcatattctaaattgttagggaactataacacaaatatgcttatcgcaacagtctgtgtaattatatcatattctaaattgttagggaactataactcatcaagagaatttacacgtgatgaaatcattatatcatattctaaattgttagggaactataactaatgaaagttcttgtataaaatcttctccattatatcatattctaaattgttagggaactataacaatagcccctattaaagacaaaacgaagaattatatcatattctaaattgttagggaactataacctttaaaatcaatgtttaattttgataaaaattatatcatattctaaattgttagggaactataactgttaagtgataaactcgtaggacttcctaattatatcatattctaaattgttagggaactataacctcgagctttctgcgcaattcggatgattgattatatcatattctaaattgttagggaactataacagagttgccgttgatagttataccagattgattatatcatattctaaattgttagggaactataactgcggtttagtcatcaatataaacttaaaaattatatcatattctaaattgttagggaactataacttactattctgacgctgactttacctacatattatatcatattctaaattgttagggaactataaccttcttctaaatcattcaattgttcaatgtattatatcatattctaaattgttagggaactataactaacgcttaaagcataaaaaacttttttgtattatatcatattctaaattgttagggaactataactttataattacctaattcaaaagctaattcattatatcatattctaaattgttagggaactataactttgagacacatcaggtttatttaggatttattatatcatattctaaattgttagggaactataactattactattcaattataacatattacagaattatatcatattctaaattgttagggaactataacacgatcagctcgagattatcgcagggctttattatatcatattctaaattgttagggaactataacatttattgaaataagcttatccttaatatataataagattatggataagaaaacaatagagccactaaatagtaatattgagattgaagaaaataaaagctttgcttcaagagaaattcagcaaaaagcttcagatgtatattaagaaaacacccaaaaagaagctttagccattgaaacgagaaatcttttaagacaacgacttaagcacgatatacgccaagaaatttctaaaatgcgaaaatatgttttatggctatctttcttttttatacttatgttttttatgtataattcacaaaaaaacagttcttcatttgtttggcttttctttattgccctacagatcccttactattatttcagaaaatcacgtataattatatcttatactgatgattcaaaatatagaaatttaatggagttgttcatgcaagaagaaagtgaatttactgaaaaaagactatttagaagctcaatacaaaattcaacgaaacattcaagctaatgttaatgttataacatttattgttgttactcaattcctaatcaccattataggagctattattgtgtatttttctatatcttccataccatctcttgtttctcaaagtttaaaatagtgtaaatattacactatttttattatgtccatctgtaattatgtcatattctaaattattaagggatatggcaactaattaagctttaaaggtgagatactcggaaggtttacaggtgacaatcgcagtctaaggcattaaaaagttcacagatgaaatgttggaaatttctaaaagtggtaaataatagtgtcgtgtcggctttacttagctgtccgaaggatagtaataaataaaacacttaaaagcttgaaaatatctttaaattttgataaaataaaatcataaaagcgttttattttgatgaatgagcggctatcaaccgcgaagctcccagaagaaaggtttcaaaaaactgattagaactgggcgggaaagctccgtgaaagctaaaattaagggctaaaagaatcacttcttttggaatcgagatggtatcgccgagcttgcttggttctcgaatctaaaagaggtgattttaatttaggagaggagttttagtatgaatattcccatagagtggatttctgttgcgataggattcgcaacttcaatagttgctattttgaagcaacttgggctatttgataggaagaacaagcagattgataatatttcgaaactagtagcaacttatggggatctaagtgatgagtctaaagataacatgagagtaatattgaaatacgaaacaagaaagttgagagataaatatacccgaaagctagatataggttcactcgtggcgtatgtgattttagctataattattggcatacttacatatctatctataatttggtttagctctactattgctggaagtgatcttgcgggatggtttttaaaaataattagtggagcatctgtatttattatgtttattatggacatcgcactaatatctgcagcaaatgaaaatatttataaaaataaggaggagaaatgaaatttcaagcaaattcaagaagacgagcaaaagaatacgaagccgatgttttggcgcgctggaaagcagaaaaaactttcgagcaatcagttgaaaaccgtagcgaagataacaccttcgtgttttatgacggccctccattcattactggtgtgccgcatcacggaactcttcttagctcaattgtaaaagatgctgttccacgctatcaaacaatgaaaggtaagcgagttgaacgccgttggggttgggatacgcacggtttgccggcagaaaattttgtcgaaaagaaactcggtattacttctcggcacgaagttggtgaaaaaatttcacttgccgaatatatcacaactgcgcgcgaaagcatggtttcgaatgcagcactttgggaaaatacgattgatcgcattggccgttgggttgaatttaaaaatgcttacaaaacgatggataaagatttcatggaaagtgtttggtgggcgtttaaaactctttatgaaaagggtaaaatttacgaaggtgaacgtgttttgatgtatgatacggcgtgggcaactccgctttcgaaaagcgaagtcacaatggataacgatgcctataaaaccgtaaccgacccaagcgtttttgtaaaattctggttaaaagatttcgaagacgcagaaggctcaaaagataaaactgcaatgctcgcttggacaacaactccttggactttgccggcaaatatggggttattcgttaatcctgaaattacctacgcaaaagtaaaagttggcgatgaattcttcattttggcaaaagatttgctcgaaaaagtttttgttgatgagaaaaagcaaccgattcctttcgaaattgtaaatttgattgatggtgcggaattagttggtttgaactacgaaccacttttcgaagattcgaaatattctggtgaaagtgaagagaatgcttataaagtttggggtgcagattatgtttctcttgaaagcggaacgggaattgttcactctgcgccagcatatggtgaagaagactttaactttggtaaaaaatatggaattccagtttttcacgttttggatgaatacggtaaatatattaatggtgaatttgctggtgaagatgtgtgggaattcaataagctactagctaaaattttgaaagagcgcggtgtagtttggaaaatcgattatattcgtcacgagtatccacacaatccgcgcactggtcagcgcttaatgtatcgagcccacccgagctggttctttgatattcaaggtcaaaaagaattaatgctcgagcagaatgaaaatatcaattggttcccagctcatttgaagcacggccgtttcgaaaaaaatcttgaagctgcaccagattggaatttatcgcgcgatcgtttttgggcaacggcaatgccagtttggaaatccgaaagtggcaagatccgcgtggttggttcttatgctgagcttaaagagttgagtggcgtggaacttaaagattatcaccgaccttgggttgatgatatcacttttgaaattgatggcgaaaaatacactcgaattgacaaagtacttgactgttggtttgaaagtggttcaatgccatttgcgcagtttcattatcctttcgaaaacaaagaaaagttcgaaaagaatttcccaggtgattttattgttgaatatatcggccaggttcgcgcgtggttctattatgttcatgctgtaaacactgctttgttcggtaaaaatgccttcaaaaacgtgatcacaaccggtgttgttgccggaaatgatggccgaaaaatgagcaaatcacttggtaattataccgatccaaacgagctaatggatcaatattcagccgacagtttgcgattcttgttgctaacgagcccacttttgaatggtgaagattttgcgcttcacgataaggacgtttcagatgttgcgcgcaaactttcaatgatctggaacatgtatgatttcttcacgatgtatgcgagtgttgatggttgggaatttaacggtgaacttaaagacccttcgaaaaatcttgaaaacccacttgataaatggatcgtgagccgtgttcatgaacttcgaaacgaaattactgaaaatatgaatgtgtataatattccgcgtgctcttgaagatgttttgccgtttctcgatgacgcttcaaactggtttgtacgccgttcgcgccgtcgtttctggaagagtgaaaatggtgccgataaacttcaggcctatcaaacgctccattatattttgagctatctcgcgctgattcttgcgccatttgtgcctttcttagcagaagaactttggggtaaaatggttggtgatggctcaattcatttgaaagattggccagaagcaggcgagattgatgagaacttacttgttgaaatggctgaagttcgtggctacgtgaatgaagctcttgcgcttcgagcaaaaaatggcgtaaaaattcgccaaccgttagctagcgtaaaagttccgcaaaatgcaaaatcttttgattttacgccaattttaatggaagaattaaacgttaaaaatgttgagtttggcgttgagggtgttgaatttgactttgagctaactcctgaactccgtgcggaaggcttaatgcgtgagattattcgccacattcaggccgcgcgcaaaaaagctggtctaaacgttgatgatcgaattgagcttaactttacatctgaaaatgctgaagttctcgatgcgttcaagaaatttgaacaagaaatttcgaaagaagttttggctacaaaggccgaaatttcagaagatgaacttgattttgttcagattgtaaaagttgaaggttcagaagtaaaaatttcactcaaaaaagcttaatcagaatattgacaattaaaataacttatgctataatacgagcataagttattttttaaacaaaaaacataaaaaatcaaaaggcaaaaatggaaaattttacgataaacgattacaatactaacgagcaagataaaaaatctcttgaacgaaagggtagctctgaagaatttcaagattttaaattagattctcctgaaagtttaagttcagaacagcaaacagaaattgaagaatctcgagagagttcgaaaaatgaagctcttgaaaacttgaacaatatttatgcgctagctgaacgatatgctaaccgcgaaagcagtagttttttcttgcgagatgatgaaaccctaagctcgaatattatatatttcaaaggttattacgcaggcttcgcaacttgcgaaggtcgtgaagacgaattcagcttgcgtgaaaatcagtttaaaacacaagaagaactcgttcaagaaattagtacaataaagtctattcctcgagaaatctcagcggggaaacgtttttcgaacattattcgagcaatttctggaaaaatcgcagcttaattattcagtaaaaagaagatcggtagaaatatcgattttctttttaaaaagtgttgactttttaatatgcttgtggtaaaatacggtagtaaaataaattaaaaataaacaaggacagaaatgaaaaacgggaaaaattttaattctgcgccagacccaaacaagtctttcgaagatatttacggcccttgggatacttcacaagaagagttagaccatcagaaacaagctaaagctgaagctgatgccgcaaaaaagcgcgaaatagaccttgcaaaaggtgcgagaaaattcgataaatctgttcgcgatgcgatttataaaggcgatgaagttgcttttaatgaaataatggagcgcgacgaacattaccgacaaatggaaacgggcgagaatcagattgaagaagaaccttatgaatcatcaattctttcgcaggaagagtttgcacaggcagtaaaatcgagcgatgaaattcaaaaaatggatttgcttgttcgtcgaatgcagagcgctacgagtgaagaagctaaggcgaagtttcagcaagagttaatccaactttcaaatgagttttcgaaaggtgaaggtgctgttgcggtgaaagattggcacgaccaagctcagtgggattttcgaaaagccagtgaggctgaaggattccgccaaaaagttcttgatacaatttgggaaaaagcaatggcaaaacctgaagctgaaaaatcaaatccagatgatggtgcaaaaaacgaagcattaaataacggtaataatgcagaaaatcaaaaaccagaagcagctgaactttcatatgccgagaagcaattccatgaactgtttttaaaaggtgcaagcgccgaagaactagcgcgatttcgccgacaagttcgttcggagttgattcaaaaagatgaattaactcccgagaatgaagcgatgcttgaacgaatgctagaaactagccttgcagttggcggccaagagcgagaactcaataaggctaattcttcaattgatactgattcgaatattgaagaaaaagcaggtagattccagagagttaaaaaattcattggaagtaaagttatgaaatggagcacactgggaatgcttggtatgacgattttcggagttggaagacaagcttcagaaggtcttaagtcgagtgacaattctcctcaaactgagcaaactttctctggtactgttcatgcagacagtctaaatgaagccgcaaacttcaatagtgatggctctgtaattgagagcgaaaagaactttaacaatggtaaatatgactctgaaaatgacgattataataagatcgatcaaaaagagaacaaatattctatcggaacggatacttcaaaactttcggatgaagaatatcaaaagaaaatgattaaatcgcacaacgaagatgatattgaatatatgggacaattcttcgtgaatgatgccgaatctgctcagaatctacttggaatttcgaataatgaggttgatgctttggttgatgctgctcgagatggcgatcagacggctttcaagaaattgaatgatgcatattcgaaatatatggaaggtgctaaagttgttggaaatcaaactttggatggtgattattactcgctatttgtgaattctaataaagactatgctcatgccgaaggtgcgtttggcggaacggctcgtgtggttgaattgaagaatgggcaacaaattttgattcg

SEQ ID NO: 976 - DNA, 16323 bp, synthetic construct
  misc_feature 1..16323: note = Synthetic
  source 1..16323: mol_type = other DNA
ggcgcttatccaccacctggttcaaaatcaccccaggcatattaatctcaatcgcttccaacgcgcgcttcgaattttgcaaatcttcaatcgtggtctcgttcgccgcacaaaccataatcactctatcagctcgcttcgccaaaatcagagaatccgaaattccctcaatcggtgtgccatcgattagtacataatcatagtgctttttcacctcaacaagcaacatttccatcttcttcgattccagaagttcacttggatttggcggcaccacgccacgcgtaatcacctcaagatttttcacatttgtcttcaatgcatattgacgtagttttttcaaatccccctccgccaaaatattcgacaaaccaaactgattactcagctcaaaaatttcatgttggcgccccaggcgcatatcacagtctatgagaagcactttcttgttcgtcttcgcaaaagccaccgccaggttcgcaatgataaaactcttgccttcgtgcgccctcgaactacaaaacagcaccgtattcgaattctgattatttaacgagaaatacaaactagtacgaatcgtacgaaaatcttccgccactgccatcttcggattgtcacgcaaaaccaattctgaatcttcattaatctctatcgcttccgcctcttccacattggcgatttccgcttctttttccgcagcaattttttcttgctccaaggcaatcttctcttgaatcgctttttcttcggcgataatcttgcgccccaccgccttaatttctacaaacggtctctcaggcgtacctttggctttttccgcctcttccgctgccttaactgccgcttcttccgccgctttttctgccgctatcctctcagcttccgcctgcagctcagcttctttttccgcttctttctgcttctgtttttcgagcctaagctgttctttttcttcctttttcagacgcttcgcctctaatttagccagcttcgcttccagttttttgcgttttttcttctgcttatttgtttctaatttatgtacctgaccaaaaatcggcagcttaaacatttcatcaatttgctccgtcgtcttaatcgtgcgatcaaagtaaaacaaaaccaaaataatcccaaaacccagcaccataccggccaccgtataaataatttcttgctttaccacatcaacattatatggactcctcggctccactgcatgatcgagaatattcacgctcgtatcgttgtagatctgcgaaatttcttccttaaaaacatctgccacccagttcgccaactcataacttcgataagcattcttatccaccaccgaaatactaataatctccgtatttttcaaagaagaaacattaatcttcgaaaccaaaccatcataagattccgtcaaattattttcctgaatcacccggtcgagcacacgatgcgatttcaccacctcagtataggtctcaatcaaattcttattcgccgtaatttcactctgcaccgtagtcttcgatttgtccgaactcaaaataatcgtcgctcgcgatttatattctggcttctgcactaaaatcgtatacgccgtacccgccgacacacaaagcactaccatcgcaaaaaacaacaccaggtgttttctaaagtaaattaacaagtctctcaagttaatctcttccatattaaatattataatatgggaagagccttccgtaaatagtctaaatatattttaccgcaaaacgcaaatgcttattttacaaaacaataaaaaacaacctcacggctgtttaatctggtggagcatatgagactcgaactcatgatctcttcaatgccattgaagcgctctagccaactgagctaatgccccaaacatcttgcgatagagtaattatatcaaacctctaacttttttgtcaattttaaggtataataaatagtagaattaaagggaattgatatctatgtactaattttttcagtttattaacgtgatttatttaatacacatctaatttaacatggagaaattatgtcagatatcgtcttttcacttatcgatcaagaaaaaatccgtcaatctaagggcctcgaactcatcccgagcgaaaattatgtttccgccgacgtcttaaaagctatgggcaccgttctcaccaataaatattctgagggctacccatccttccaagatttagaaaactataatccaaccgatgaatcaaatattgttgccgacctaccgaattatcgttactatggcggccaaaccaatattgataaaatcgaacgcctcgctatcgcccgcgcgatgaagctttttcacgccaatcacgccaacgtccagccccactctggtgccaatgctaatgaggcagtttattttgcctggtgtcagcctggtgacaagattctggccatgaatcttggccacggtggtcacctcactcatggttgcccagtcacccgttctgctaaaatttatcaatttattaattacggcgtcaccccagaaggcgacctcgattacgacgaaattgaacgcctcgccgaaactgaacgtccaaagattatcctcatcggctactctgctttcatgaaaattcctgattttgcccgcattgccagaattggccaaaaaatcggcgcccttctgatggctgatatggcgcatgtcgccggcctcatcgcaggcggtgtacacccgaatcctctagattttggctttcatgttatgactaccaccacccataaaactcttcgcggtccacgtggcggcctgattctatcgaaaggaaacgtcgcctctcctctgaaaaaacctgaacacactcttgaaaatattccaattctcatcgaccgtgcggtctttccgggcacccaaggtggtccgctcgaacatattattgccgctaaggctgtcgcttttaaggaagctctctccgatgatttcaagcaatattccgccaagatagtcgaaaacgccaaggctctcgccgccgcacttcaaaatcacggttttatcctccaaggtaacggcacagataaccacctcatcctcgtcaatgtcaaaaagaatttcggcatcgatggtaaattttatgagcgcgccctcgacctcgtcggcctcaccctaaacgctaacgctgtcccggaagacacttccgccgccttccgtccatccggcgtccgtctcggtacccccgccatcaccacccgcggtatgggtgtcactgaaatgcagcaaattgctgactggatgaagcaagtcatggatatctgtctatccgtaaaatccgaagaaaacctctctaccgccgaaccccagctggccgaaattcgtcgtcaagtcgaaactctcgccgcaaaattcccagtccccagcattaactaaacacgcgtcactgaattaataaaaaatcaccacgccaataatccgagctaaaaccgtctgaacaaaatcgcacaggtgtataatatatctaatcatggaggtaaaatgaaattagaagttaaaaatctcaccaaaaaatttggtgacaaaaaagtcctaaaagaccttagtttcaccgtcgaaagcggcaaggcttttggtttgctcggccgcaatggcgccggtaaaaccaccactatccgcattcttatgcaagtttttcagccaacttccggcaaggttttccttgacggcaagccaatcgattactccaaggttagtctcggttacctcccagaggaacgcggcctctacccgaacgacaaaatcgtcgaccaattaatctatttagccgctctcaaaggcgtcgataaaaaaaccgccaccgcatcgatcgattactggctagattttctccaaatgaccgattataaaaatgccaaacttaaaaccctttcgaagggtaatcagcaaaaaatccagctcatttcctgtattgtccacaacccagatattgtgattttcgatgaaccattttccggccttgaccctgtcaactctcagcttctggaagaggtggtgcgcgaacaaatcaaacgcggtaaaatcgtccttttctctagccaccaaatggattacgtttctgaattctgtgacgatattctgattctaaaggaaggtgaaattaagcttcaaggtaatctccgtcaaattctcaagaaccaccgcaaaaataaacttctcgtcaaatccgatgaggtcgaaaaaatccacgccgccctcccagaacaaactgaaattctgcgcgaaggcgaattggtttatcgcttgaaaaaagacgaagaccgtgccaaaaccatgagcgatctcatcaaaaaatatccgattgaccaaattggcgatctcgaatcaactctaaaagatatctttatcgaatacgcggaatagaaagggaagtatgcaacaatttttcacagttttcaaatatgaatttaagaaaatcgtgctcagcaagggttatctcatttccactggtatcatggccattattcttgccggtgtcttcttcttacctcaactgatttccgatctaaaactttttaaatccgatgacaataccccggtcgctctgattaaaaccaactataccaaatccgaaactctcatccagaccatccacgccgcactgccagattacgaagtcaagcttaccgacaaatctaccaatgaagccaagcaagaagtcatcgatgataaggccaaattctttatcgaagccaaccacgacctcaccgaggttaccgaatactccaagatcggttttagtgaagctagtactcgcgaggtccaatccatcgatgctattgtcaagaatctacgtcaatccgacctgctcgccgaacaaaatctcgctccttctgccatcgctaaggttttaaatcctgatgtcaaaatcaatctcgaaaccgtcaacaaaaacggcgccgcctctgtgatttatacttttgtcctcatctacgctctctacatggccattactttttatggttctcatgtcatgaacagtgtagtcaccgaaaaaacttctcgcgccatggaagttctcgccacttcagtcaagccaaatgccttactcttcggcaaaatcatttctaccagcctcgctggactcatccaaatcgccgccattatcattgaggctttcatttgcgtgaaaatttcctctgccaacaacccggactttcctgtaaatcaaattatctccaatattccgactcaaattctcgtctatatgctaattttcttcctgcttggcttcctaatttactccttcctctacggtgccttcgcttccaccgtctctaaaattgacgaactcagttctgcaattatgccggtccagattatcatcgtcttcactttcatcgccacaatgtccgccatcaattccggcaatgctgacaccccgttcaatgttttcctctcctacttcccattcactgcaccgatgatgatgttcactcgcgctattatttccaatgtttcgactctggaaattatcctttcaatcttagttttgatcgtcagtacctactttataggctggctttccgcccgcatttaccgcgtcggcatcctcatgtatggcgaaaaaccaaacctcttcaaactcatgagtgctattttcaagaaacaatagtataattaattggtcggggcattagctcagctgatagagcgcatcattcgcattgttgaggtcgggggtttgaatcccccatgctccaccaagattattacttgacattatttcattcacgatatataaaataaatataatcccttaagtaaggattatgtcactatcgaagttattaggtctctataataatatagatttctaataatctataagtaaagctctaaggtatttctacatgggataccttatcttttttgcttatgcatgacaaagctcaaacttgtgatataacataattatgaagtatagtattgggttagatattggcattacctcttgcgggtggtctgtcatcaatttagataaaaaacgtattgaagatcttggcgtacgcatatttaatgccgccgaggatccacagaaacatacctcgctcgccttaccgcgtcgcgaaaagcgtagcagtaggcgccgcttccatcgtcgaagggcccgcctgaattatctcaagcaattcttcatagaattaaatttattagacaaatctgaaatcacacaattattgactccgcacaaaggtcagttgaacccatatattctccgcgaaaaggcccttgaggaaaaactaagcaccgatgagcttctcattgctctctatcacatcgccaagcgtcgtggttataaatccaatcgccgcgcagaatccagtagcgatgaaaatgaaaacaagaaaactcttcacgctattagtgaaaatcaaaaattattaatcgattatcaaacagttgctaaagccctaaatcaaaacgaaaaatttgccgctcataaacgtaataaacccaatgactacagcaattcatttgccagagccgattttgaatccgaaattactactattttaaataaacaagccgaattttacccagaacttaccgaagaaaaaatcaatgatttactttatcgccagaactatggtctcttttttcagcgtccatttatgtcgccagaactaatcgccaaaatgcgcggtaactgtcaattcgaaaaagatacaccacgtgcacaaaaagcctctgtaagttttgaaatatttcgtctcgcctccgacttagctcatctcacctacaacaatggccaaaaacttacctcagaagaaattactacttgtatagaaaaagccaaggaggttgttacctttaaatattcccacattgataaaatattaaatcaaactcacccggaagaaattatttttgattacattcgtggattaaagaaaaaagacctaaatagcgacactgatgaagctaaaaagaaagccttaaatcaaaaatttagtgaattaaaattctaccatgccatcaaaaaagccctcgctaatctacctgaagaatggcaaaagcttgaaaaaaatctcaagctattcaacgaaattggctttattttaactgccaataaggaagacgaatccatcatcaaacatctcaaagaattaaatctctctaagcaggctatcgaaaatattacatcgatcaaacaaaatttcactgggttctgtcatctatcaattcttgctttagataaaattactccatatatcctagaaggtaacacctatgataaagcagtagttcttgcaggttataactttaacgataaattatccggcgaccaaaatcgtttaccagctctcactgaggaagaaagccaacaaatcaccaatccagtcaccaaacgcgccgtttctcaaaccataaaagttgttaatgctattatacataaatatggcgcaccgacacgtctccacatagaatgtgcctctgaacttgccaaaagctacgataaacgacgtcaaattgaagataatcaaaaagacaaccaagccactaatcagaaaattgtcgatattctcaaaaatgaataccacatcgtcacaccgaactatcttcaaattacaaagtataagctctaccttgagcaagacggaaaatgtctttattctaatcaaccaatcgacctagatcgactttttaccgatgagcattactgtgaaattgaccacatcattccgaaatctcgttgtggtaatgatagtttaattaataaagccctagtatttaatcgtgaaaaccaggaaaaacgcaaccaaaccccatttgaagcctggggtggagatactgagcgctggcaacaattcaaaaccaatgtgcaatcaaatcttaaaattcatccaagaaagaaacttcgactactcgctgaggtcccaccgaaagaagactggaattctcgtgcactcaacgacactcgatatattactcgtttcttatcaaattactttaaacaacatcttaaattctccgaggattctcacagcaaaaagaaggtcttcaccccgaccggtggcattacttcgtaccttcgtcgaatctggcacgtcggcagtaaggatcgctccggtaacctccatcacgccgtcgatgccaccattatcgctctagttaccgaagatattattaagcagtgtgcattgatgaataaatatattgaactaggggccaattatgctacgaagggaattaatctcagtaaatttcatcatgatattcactcagtcattgatcctgtcacaggagaaattattgatcttgctggatacgaaaaaattaaagaagaggttcttccgtggccgaattttgacaccgaattacgtttccgtgctaccccgcttgcgatttttgttaatgagttaccaaaaaataagaaagaaccaaaacccgagttagctgaatctgccaagctccaacagaaaaataaatccattaacaccctcgctgaatggcgtgaccaattccgcgaaatttacaatgaccaagatgagttgtttaagaattccattcatccaattttcgtctctcgcatgccaaaacgtaaaggtactggcagtttacatcaagatacagtccgttcacctaagggtattattgttgatcctaaaactcaaaaaattaccaccaatccgaaccgaagttcatatattcgtgctaacctcgaaaacattaagctcgccgacttagaaaactctatcataaagaccgacgataaatctctttaccaacaactaaagcaactcctcgaagaaaatgacaatgatccgaaaaaggccttcaaggaacctgtctataaaaataatattaaagtagataaaaacggcaaaccactttcaccggtaaggactattaagctgatcgatgataaaaatgtcaaatccggaatactcctaagtcgtggcacccaattcgttaataacggtagtatggtcagagtagatatttaccagaaagaagtaaaaggcaaaaaccaactattctacgtacccatctacacccatcaagttaaaaaaggttcgacccgtattcttccgaccacttgtggttatgactatgtagatgaaactttcaaaaaacttttctcactctacccaaatgactacattatcatgaaaaaagataataatacaatacaaggctactacataaaatacaacacatcaaattcagtcattacacacatatcaaatcttatgccaggtagcacgaactttaaagaaaccaccggtagaagcctgacagaaatttatcgtctcgatatttccatccttggcgacaactatccatgggaaaaactctattaaattatggcttggcgcactgtatacctcgaaaaacaaactaagctttggctaagccgcaataacctacacttttatcacgacgaagaagagctctccattcctattgaagatattgatactctaattatcgacaatcacggcaccacacttactactaatttaatagactctctcgctaatcaagaagtctccataattatctgcgattcctcacatctcccgagtactatcatcacaccctacgccaagcattctcgtcaagctaaaatttctcgcgaccaactcaacatgaagctacccatgaagaaacagctttggcaaattaatgtcactcaaaaaatccttaaccaggcagcagtactaaaatatttcggtctagataacaccgagttaattaaattatctaagttggtaaaatctggtgacacctcgaactgcgaagctatagccgctagattatacttcgaccagctccttagtgattctactcgtcgccaacccacctggtgcaactccgctcttgattacggatatagcatcgtaagaagcgccatcgccagaagcgtcgcctcacatgggctaatttcttcacttggaatttttcatcacaacgaactaaataatttcaatctagtcgacgaccttatcgagtgttatcgtccattcgtcgacctattcgtcatgaaacttttttatcaaaaattatttagtgacgaaaccgaatattttctatctaaggatgatcgatataagctcattcaagtgattaatgaaacggtttcgattcgcaacctaaaatattccatcaaaaatagcatagatatcattgtcgaaagtttcattgcttcattccaaacagaaaatattgaattgttcgaactacctaaacttatttcctaaaaattaatcgggtgggagaaagacctcatgagtagttataaatatatgcgcgcattagtattattcgatctacccaccgataccaaatttaaccgcagaagcgctacgcaattccgtaattatttattaaatgacggtttcacaatgttacaatacagcatctatagtcgcctatgtccagaccgcgataatgccgatactcatctgcaaagaattaaaaaacatgccccgaaggaaggctctattagaatattgatgctaaccgagaatcaattcaccaacatggaagtcatttgtggcgaaaaacctagccaagaaaaacatatcacagaaaatcaaatgttattattttaataactataagtattatctaaaactcaaaattgaagaaaaaatcacctacgacttccataaattttaaagtgcttaaaccaacaaaaaacctccgctaacaggggggattttttgtaagtaattgtgaatattatatcactatcgaatttattagaggactataactctattgagacagtggaagaatattacaaggattatatcactatcgaatttattagaggactataacatagcttttcattagtgaattgaggtcttgattatatcactatcgaatttattagaggactataacccgagaacttcaccgagtgggtactagggcattatatcactatcgaatttattagaggactataacttgttggatttcaaggttctggaaaaactaattatatcactatcgaatttattagaggactataacggtttctggcttagcttcagcttcaacttcattatatcactatcgaatttattagaggactataacttgcttgtggaaaactattattttacaaaaattatatcactatcgaatttattagaggactataacacacgaaccgaaaaggaacctggaacctttattatatcactatcgaatttattagaggactataactgattagtgctgctgcgttgtggcttactgattatatcactatcgaatttattagaggtctataacgcaaggaagcgcacctaaatgatattaaaattatatcactatcgaaattgttagagaacaacatcgtgttgccataaaaaattaaaaaattataaaaaccaaaaacctaaaacataccaataataacactatataaaaaatatagacctaacagatataaaacatacagaaacgcctagacaaaaatttaacaaatattgatatagaaaatttgaactataaaaacaaagtctaaatattttttaagacaactcattttgcatattatacaactaacgaaccctggtggtttttattgacaaactcccactctagccataatatataatcaaaagctcgaccatcgtatgttttgggcagggagctttttatctcccccccgatatgtttcgggactagggagattttttctacttcaaattccaatttacctatactacaatacatacatgaaccacaaactctttatcgcaaaacttgactttaatccagagctaaaacgtcaccaagttctttcaattttattgtcaaaagatcatcttcttcccacggcaaaatcgctcaccaaattccgtgaaatcttcaacaatcaacccaaactcggaaaaatttttttcgaaaccccagactccaaatattattttgcaatcatcaccccaaatcagattcccaaaaattattcttacataaaattctcaaacctttccgaaagttccaccccggattacaaaatcattcttaaggccattaaaatcctcggctacgaattttagttataagataatcacttaaattcagataaagacttataatatgaccatgatattctacaccaaatcacaaaaagccaactatacccatattcatgcttatgctttttatgatttatttttaagtgaactaaaaagacaaaatctgacggatcctaattttcaaattaacgtcgatgtcgatggcaatgtcgccacctggaccctcgatactacagatccaaaaatccaaaatatcttccaaaatctaaccatccaccaaatttttactgaccaccaaatcagtgacgctattgctaaaatttgccataagaataatctaagagcacaccttaagaatctcaatctcctaaaatccgagctaaatcgcatcgagttccagaccaaaaaacccgaaatctctgacgactccctaatttccgaagctatagacttcatcaaacctcgtccttaacccagaaaatcctgctataatagatttatgaaaacaatcttgaccggtattcgcattaactccgacctcaccctcggcaattttcttggcgccatgcttccgatggttcgcctcgccaatcaatactctagcactcatcacgtcaatatttttgtccccgatcttcattcgattattagtgaaaccgatggcgatcttcaatccaacatgctccgcaccatccgttattacctcgctgccggcctcgaactaaacgaaaatgtgcatttttatcgccaatcttacgtgccagcccacaccgaactcgcttggattttgaattgccacacctctatgggcgaagctctccgcatgactcaatacaaagacaaaagtcataacggcaatctttccaccaacgtcggaattttcgattatcccatcctcatggccgccgatattttgctttatagtgccaattacgtgccagtcggggaagatcaattccaacacatcgaactcacccgtaatattgccgaacgttttaaccataagtatggtgagatttttaccattcctgaaaacaccgagaatcaggttaaattcatgtacggcgatacccaatctttcgctttacgtattcgcgacttgatgaatccagagaaaaaaatgagcaaatctgccgaatccgagaatagcaaaattatgctcgccgatcttccagaacgcatccgcaaaaaaatcatgtccgccactaccgattcgcttgccgatattaattttgacttcaaaacccaaccaggtatttccaatctcttgcaaattctcgccgccattaccgacacccctcttcgcgatctcattgcttcttgggaacaccgctcgcagtacggtgaactcaaaaaactcgtcgccgaacgcctagtcgagcacatttcgaatttccaagccaaagttcaaaatatttcagatgaagaaatctaccaacttctcgaagagggtgaaaaatacgccaatcaaatcgccaaccaaaagctcctcgaagtccaaaaagccgtcggcctacgctaaatttttttaattcaaacacgccacatagggctaaattgttttaaattttacaaaatctcaacctgtattaattaaggagaaaaaatgagtcgagaactagaattagaacttaccttccttgccaaagaaatcccagagggaattaaagatatcattccgactcgtattaccgatgtttatattccagacactgctaagcactcacatctccgcctgagaaaacgcggtaatttatatgaaattactaagaaaactcccgtcaaaaatggcgatgcctctgagcaaatcgaacaaaccatacctcttacaaaagacgagttcgaagctctcattagctgtagccagaaacgcgtttctaaagatcgctacaatattacaatcgaaggccataatgctgaagtagatgtttttcaagaccaacttaaaggtttaatcctcattgattttgaattcaaaactatttccgaaaaatcctcattcaggacaccgagtatcgccttagctgacgtcactcaagaaaattttaccgccggcggcgtcttagctggtaaatcttaccaagacatcgaaccagaattagcgcgtttcaattaccaaaaattataaaaatctgatagatatatgtacttatcgaaatcagaacgagaaatgaatcaagtcttcaattttactaacagacccaagaacgattgatgtctctttttgttggttagtgttgcacttgagatgttaacttagggaaatcattgacatataaccataaatgttatataatgacagtagatttggtataccccgaataacttacacttgctattctggttataccggaatagctctttcagaaagaggtgaataatatggtaaaaaagaatcttgtagctatgttggctgtagcagttctatctttatcaactgtgaattcttttgccgccaaggctggtgttttaggtctgaagcccagcgccaatcaaggcgttactcaatctagtaccaatactagcacggcgaacacggatgttcaaaacgtgcagtatgatactagtaaataccagtaccctgcgcagcagctaatcgctgaaggtcgccagtttgataagtataactggagactcttccagcgcttcgacacgcaagagctcatgtataacgagtgggctgcggcaatgaacttcaatgccactgagtactcccaaaatgtttatcatgacaatgacgatggcaccactactcgtttcttcgactttagggaatcaagtcttaaatatttcgaagtcgaaatgattggaagtagtggaaaaaaaatttcagcttcagataataaactacgctttaggcgaaatgatgaggttaatacatatataccaatctcgttagaagttagcgtttacacaaggcctgaaaactgttttccatttggcacaataattaccttacccggatcacacgatcataactggaatattatcccatatagtcaatatcgagaaactttttgggttaatgttcttaatggttcgttaacccaggaagaaagcgctttgtacgacgctgaatacggtaaaactgtggaaccagttaaactctattacccaagtagaccgatctacgtctctgggtggtgtcttagtgatattgcgcagaaaattaagttaattaatggctgttttaaggatgagagtcctgaaaattgctctgcgtatgtatacgatacgcataaaatgtttcaaggtatgagtaatataaaaaagctccgttcatagcaatcaccatcttaaaccacccatcatttgggtggttttttatttagataaaaatattattcttatgttaatatatagatatgaggacaaagaaattttttgggattaaatctatttatcaaaaagtgttattttatgtaattatcactctagtcgctttggtttgcggtatacactttaatcaaaatatctttgccaaaaacccaccccaaaccgacaaacacgatggtggtggtggtcgcccagtagaagggtgtagcagtgatatttgttataccatacaccaaaactattcgggtgttacctggatttattatgattttgcggctatgggcataccagtaaataaacgcgataggattccttacagtacttttgttaatactcctgctgctggatatccaaagaagaatcaaatcctacctacggccaaaggcgataacgccgttactggttgcggcaagcagcctggcgtctatatttttggctataatcgctataaacgaaaaactttacaaccaaccggtggtgtagccgtaccattatcgtatagcgaatatctcacacagtcagagccaagaatagaaaatgctatggatggtggcggtagtcgtattaaaatagaagaagcgaagagtgaatacactggtgcaaagtaccttggctaccctgaccccgaaaagctcgccgactggaatcgcggaaatttttcctggttctgcgcctggcataacattccccctgacgataaaaaacatccaataataccatcaaacaccacctgttctcagctcccaggtaattttggcgcatattacaagggtagttctgctggcgattcaggtgttgtaaatcactcctactctggtactctcagccataattcttggcagaaaaactacgaaggaaaaaactatgtcttcgccaagccaggggatcgcgtccaattctatgaaactttttgtttcccggttcagcaagttggcatccaaactggaagtt

SEQ ID NO: 977 - DNA, 15311 bp, synthetic construct
  source 1..15311: mol_type = other DNA
  misc_feature 1..15311: note = Synthetic
gcaaggatttggactaccagaccatgcgcgaatacgatcgttttcagaaaggcgccgccaacagcaacaccagcactgccaagctgaccgcccagctaaagagcaaccagccggacaagaagctaattatcaccacgattcagaagctatccaatttcattaagcagaatccaggttccgaggtaatgggtaagcacatcgtgatgatcttcgatgaatgccaccgcagccaatttggcgacatggggcagatggtccgcaagcgctttaagaactattacatgttcggcttcaccggtacgccgatttttgcagcaaacgccagcacagcgggacagcctaacttcaaaaccaccgaacagacctttggtcgccgtctgcacacctataccatcgttgacgctattcgcgacaagaacgtcctgccgttcaagttcgactacgttggccaggctcgcatcgccgacaatgtggataatactccggtggctggcatcaacaaagagtcagctatgctagcgcctaagcggattagcgccatcgtacagtacatccgcaagaattttgacctaaagaccaagcgcaatatcggaacctatgaatttaacaagctaaccaacatcagccaagtggccaaagcacggggcagggatagccatgagcaaaagcaatccacccggctaaatggcttcaactccatcctagctactagctcgctaaccgccgctaaactgtactatcaagagttccagcaccagcaggccgatttaactgatacgcagcggctaaaggtcgccataatctatagctacgcccccaatagcgaagatcctagcgaggtacagatgggcttcggcgccgaggagaacagcgacagcaccgatggactgagccaaagcgaccgggactttctagaatcggcaatttttgactataaccagatgttcggtacgtcctacgacacttcggccgataagttccagagctattataaggacgttagcttacgcatgaagaaccgcgagctagacatactgattgtggttgatatgttcctgaccggtttcgacgccaccaccttgaatacgctgtgggtggataagaacttgcgcatgcacgggctgattcaggcctttagccgcactaatcgcatcttgaactctattaagacgtacggcaacatcgtatccttccgcaatttagagcaggctactaaggatgctttggcgctattcggcgacaaggacgccagtggcattgtattgctgcgctcattcaaagattacatggacggctataccgatgaccatggtcgccaccagaagggctataacgagctgattgccgagctgcgtggcaagtttccgctggatggcactataatcacaggcgaagaaaagcaaaaagaatttgtcaaactgtttggtaatattctgcgtgcccgcaacatcttgacggcttttgacgactttgccggactcgacactctatcgccgcgcgagctccaggatcaacagagccgttatatcggcatctatgacgaaatgcgtaatcacactaaggtaaagcaggtggatatttcagatgacgtagtatttgagatggaactggtcaagtcctttgatatcaatattgactatattctgtccctaatcgccgaatatcacgagagtagccaacaggataaggaaattaagatcaatatcgacaaagcaatcgagtctagcttagaactacgcgacaagcgcgacctgattgagaactttatcgccagtctaaacggcaacactagcgacgtctatgaggattggcaagatttcgtatctagcgccaaagcaagcgagctaaaccagattatcgccgacgagaatctgaaccgcgacgagacctacaggttcatgcgtaacgcttttattaacggtgaagttagcgaaaccggcacaggactgacgcgtattctgccgccagccgattactttagccccggcggcgagcgccaagcgctccgcgagcgagtgtatcagaagctccgccagttcttcgaccgcttctttagcatcagtactgaataataggatgtaaatcacattatatagtgtggtaaaataaaggtatgaacaagacaattctaattattaacagtggtagctcgagcttgaagttccagctactagatgccgacagctacaaggaagtagccagcggcaaggctgagcatctaaacagtggtcgcgccacctttaccattgaggctaacgattccaaagagaaggacaacctcgacggcaagggtactcacgttgacgccattcagcgcctgttcgacgaactagaagagcgcggcctcaggaagaccgtgaaggcagttggtcaccgcgtagtgaacggcaccaacgtctttactgagccagtgttgctagaagaccaaatcatcgatgaaattgaagcactgaagccgtttgcaccgctacataaccccgctgccgtggccggtatgcgcgccatccaaaaagttatgccgagcttgccacaggtcgccgtatttgatacgtcgttccatcagaccctacctgagcaggcttaccgttacgccgtgccagatagctggtatgagaagtatggtgtccgccgctacggcttccacggcattagctacaagtacgtcagccaccgtgccgctgaactattgaatattccacttgagaagagtgacttcgtggttgctcacatcggtggtggtgcgtcggtagccgctattcataacggcaagtcagttgatacttcgatgggcttcacgccactgcaaggtctagtcatgggtacccgttcaggcgatatcgacccagccgtcgtttcgtatatggccgataagcagggcaagagtgctgatgaaatcttggacgagctaaatcaccagagcggcgtgtatgctttgtctggcggctttagctctgaccagcgcgaactagaagagggcgcaaaagaaggccacaagggtgctaagctagccctgaaagtcatggcttacagtattgctaaatacatagctggtatgatggttgctctaccaaaggttgacgccattgtctttaccgctggcatcggcgagaacagctcggtcttgcgtaagaagatttgcgatcacctagctgtctttggctatgatattgatgaggaacgcaaccacgaaatagtcggtcgcaatggtgttgacggcgtgatttccgttaaggattccccgaagattatgatggtccgtactaacgaagagctaatgatcgccgaggaaaccgaaaacgttatccgcgacattaacgaagccaagcgcaagatggctaagactgccaaagaggccgccgagaaggaagccaagcagctttaggccatgcacgagaacagcgaggcgaaagaaaaattacgtagcaacatcctaaaactgctaccaaaattagacgtaaataatggcaagtaccagctaatatttacccagggttatttgctagtctggaagtacatcaaggattacgccaaggccattggtgtcgacggtagcaaaatctatcgtcagggtaagctcgacccagtatttacctacctgaacacctatatgtacccacttaagaatgaccagcccacgtgcgaggaaaccgccgacctaatcattaaaaccgccgacgattacattgccaaggtagttgctaaggaacgggcgaccgcacaataaggacagccatataggtgcgtagccctgcacaataaccaaaactagccctgataacagggctagtttaataatttcatggcttgggcggagggattcgaacccccgaatgccaggaccaaaacctggtgccttaccacttggcgacgcccaaatatacatatattatacaccaaatctacactaccacgaatagctaaacgccagaaaactaatcgacattagccgtaggtgagagtataatgcagggtatgagctatcagtttggtaactcaagcggttcacacctccaatgaaagtaggttactatgaaccagaaattccagctgttagacagtgaaagtacgcacaatcgtcgtacttgcatcggcaaggtcataggcattgccggcatcattttatttggtgctgtggcactgggcgtgatattgacggcctttgccatcattagtccactggccgccgacgttctgagcagcgacgacggcgaagaggattacaatgacgaacgtcatcatcccatatatatgaccaccagctaacagcttagccccgcacatgcggggctttactttgctaactactattttttattattctgcgttacgctcggcgtcaatttgtgcattattttccatatcctcagtagtccatttacgcatctgttcctcgtcatcgctggggtattgctccgcatactgttcggggtatttctgtctcatcaaatcatcaatggcttgcgctgccaagctacgacgatttagaatcccatatagcattactttctgcatgtccactagcgtgttaggtttgtataggctgcctgattccttgtgtctagcatcttcggcaatttgttcgttcagctcaatcacgcgattttccgccgccgaggcctgttcagtgtaatgctgcttcttagccgccagctcgtcgtaactagcattctctagattatttatgattaaatccacccatagtttatctggtgccgagttagctctttcgcccgtcgaaacctctgttaactcttctgtatttgaattactcgctagctgtcgctgttccgcctcgctaccgaacgtttcgatttcttcgtctgacatcacggcgttctcattaaagacctcagcttcctcacgataaaccgaatagtgttgtttatgttccactctcattctccctatttaaattaccctagtaccaattatacgctatggctagcgtcctgttaattgtaaaatacgctacatgtttgcatctgttaattttacaaattgtgtaggttatattataatatattagtaattcgcaccttcctagttgagaggagctagtatgttacacgctaccaagccgttgattaatcccataggattcacttatgattccgatcggcgattaattaccatgcccaataacgttaagttctatcacgacccaaagcatcccgacgaatatcattggggtgacgccatcgaggttttggatgacctatatctagccattaagcatgagcccgacgggcagctatcgttcaccttaccaccacagtggcaagtgcgtccatatcgctacgactcaaacaaaacgtcggtttgcgacacaagtggacatagccaactaattctagggcccagccgcaagactggcaagttcattgcaagagtagtcacctgggtgatgttcagcctatccgacgccgcacaagcgtacaatcagcagcatctagaagacaccgaggcaactggtatgttccaattcttcactagcatgcgtcaccccgagcagttggcccactcagtgcttaaggcgtacaagggtagcagtcccgatgactatccccactttatgactgacaagtatatttaccgtttggacagccaagacgatcgtcatcgggcacgcaagaccgccgtacaagatgccttcaatttctggaacgacttgccttatctaggtactgacgatgaacaggacaacgaagactagctctgatcaattttctatttagccccggctgaccgtcggggcttttctttaccaagtagagctagcagggggggtacaatataagcatgactaaaatccaaggattaaacacaaatgaagctcaaaaacgattaaaacaatacggctacaacgaggccgtcaaacgtagccacgattcacccctaaaagtttacatttctaagttcaagagcccgctagtaatcttgttggcctttgctgccgccttggccgtaggcatgacaccggaattattgccgctaatcgtgacactaaatttgactcgcgggtcgctacgcatggcaaagaagagtgtcatcgtcaagcaccaatccgccatccataattttggcagtatggacatcttgtgtaccgataaaactggtaccctgactgagaataagatcactgttgccaaaactatcgattataaccacacggagtccactaaagtgttagagctcgctgctgtcgcctgccagttcaccactagctacgccagccccttgataccgccattaagaaggcttacgggtacaaagtaagatcgtataaacggcatgtagagattccctatgactttcagcgcaagcgcgaaagcgtggttgtaaagagtgagcaggaaatgctaatgatcaccaagggcgcgcctcgatagtatgtttagcctactaacacattacgtagacaagaacggcgtcactcgcaaattaagcgccgcagggctaaaacaactcaaacgtgattacactgagctcagtcgcaaggactaccgtgcactaatggttacgcagaagatagtaaccgaagagcgtgattatgcaccaagcgacgaaaccgatttagcctttacgggctacgtcgcttttattgacccaccgaaagctagcgccaaggaatctctagacaaactcagccgcaacggcattgaaatcaaaatcatcagtggcgatgatccgctggttggccaaaaggtggtcagtgaattgggcttgccgattaagggtatattaacaggcgaccgcatcgccaaaatgagccgcctacagctacgtcacgccgttgagaataccactatctttgcccgcgtcaacccatcacagaagatgtccattattgaagagttaaggaggctcggtcacgttgttggctatacaggcgatggtatcaatgtcgattgccagcttcatcctgccgtttccgccaatgactgtcacccagctactaatcaataacctactgtatgacgcctcgcagttcgccatcccatcagataacgtggatgcgccagagctacgacatccccacaagtttgatattagcgccatgaagaagtttatggtggcgttcggcctacttagcactagctccgacctggttacattctacattatgattaacttcttccacgtcgataccgcccacttccagactggttggttcatcgaatcgctaatcacccaaattaccgtggtctttattgtgcgcaccaagctgattccgtttattcagtcacgaccgagtcgcaacctagtcctatcggttgtcgccgtcatcgtactcgctggactattcctgttcagcgacctaggtgccaaatacttcagcctagccattccagattggtcatttatcggtatcatcgctatcctagctgccatctatctgctagtcgtagaaggcgtcaagcacctgttctaccacgcggtaggggataagctgtagaatacccagctcagattcaaaaacagccccacgtaagggctgttttgattttgctatcagttagctgttatcttagcgccaacgccacattgcggcgccaatcggcaaacgaggtagcagccgtgcggccacgcgcctcatcaaccactttgtcgtagccgtagctgcagtttagattcttctgttctagattgtagtgcatcttagtctcagtcggcactggctgaccccacttcacataaactgcccgcagcttcttactatccgaaacacctagctttagcaatttaatgcgaatcgccttattgctctgggcgtcgctaagagtaaccagcttattggcacggctatagaaggtgttataggatatcaggttaccctccatcatcaagtaaacatagacgtcggacgggctactctgctttactgcttctaacgccagggacactaggtcagcttgagcgttgcgcacctctttggtgaagcgcttcttctctgtaaaggatagctcacgcgcaggacgctctggttctaagctctcaccagattctgactcctcggcttcggtctgttctgactcgtctgcgccagacatcaacttcgatgagtccacggcaatattctgcgtcaagtcgcccattagcttccgatagcccgcatcctcagcaatcgagtccttagcacccttcatggtgtcgaaaattgtatagactagttcgtcgggattatcagttgatagtaccacgcggttgttgcctggttcacgataggacagcttgtacaagactttgttatcagtatcgttcttggcttcgaatagataactaccactagcgccactgcctgtaaagtagacgtagggtaccatacgaccatcgctagcattaaccgataataagtcgctatccaccgtggcaatattcttgatctggttagctgcgcctctaatctcgtcaatcacatccgcctcagcaaaactagcgtcgtcgtaggggtattcagctagcactgcgtcaatacgacccgtcgcataagcgccgtagtcagatgaaatctcgtccattagtttctgtagccgttcgaacactacacggcgtgtatcctgatatttaatgcggtgcttaatctcgtaattcaccgccttcttataattgtcgctataggcgtcacggaaatcaggtgcatcaggcgtcaggtcgcttagctcagcattcttaccaaaccgcttagaaatcttgtacagaatctcgatcttgcgcttagtgatgtcttcttcgctaattttaccatcggcggccgagtggttagatatttcgtaatccactgccatatagtaggcaattttatcgaacaccacctgcaagcagcgttgactatcattgtatttcaatagcttcagacacttgccgtcacgccaagtgtccacattgtaaattgccttaccgccatactcgctagtaatataaatcgaatgacgatcgcgatggctcttgccattcttcataaaacgaaagttcgtataatatttatcagtattcgcccgacgaatcgctagctccaccgcgtccttcgtgtcaataaacttcactaaattacgtagtccacgggcgtagttacgcaccgtcaacatcaaatcctcgaaggtacgcggtggtagtgccgacgcgctaccgttagccttctttaccccagtctcctcactcatatatcctttattataccataactgtcaatccgccaagagaaaagtaaatcaccccggcgaagcggggtgatgtagataagagggcgatgctagttggccgtatcggacatatcctgcacgggcctgagttcgtccaagtcccgcggctggtgcgatagctcacggtcagacgcaggatattcctgttgcagcttactactgtcgatcacaacatcatactcaaattcatgatcatgcggtaactcattgacacactttgactcgacacacaagcagccctcggccagctgcgcctctggccacttagggtcgtaccctgacagttgagtcaagatttcctgcttaatttcgtcgaacgtctcggcggtcgagtagaactcgatcactgggcgcaagaaataatgcaacactcgatggccgctacccgatgaaacacgtttatataggcgttccaccgacagtaaatcaataatgtaaacctgcgtccgattctgatcattcatgatgcacaccttggcgatatagcggtcacccgtgaacatctcctctagaacatgtcggtacagcgcatgatcagtaggcttgattgactcaacgctagtttccattatagcctctttctctagtaggaatattgcgaaccaccaacgttggcggattaaatgtataatatcacattatagaggttttgtacagattgcagagcaggggggcttaggctatactaatagtgcagttccttaagtaagaattgtatcattatctgatttgcacaggtttctataataagtagtctgcggttctacgcaaagcactgactcttagtcatcttgtacagattgtacaccaaccgcaatacgagtttagaaaacttgcaacataatatagtcggcgacggccggctatatttttggtataatgtcagtatgaaatacgctttaggtttagacctcggcacgacatcaatcggctggtcagtagttaacttggacaaaaatcgcatagaggacttaggcgtccgcatcttcgagaagcccgaagatccacaggatggtaaatcgttagccgtaccacgacgtaccgctcgtagcgcacgccgacgcctgaagcgccgtcgccagcgtctgaattacctaaagcaattctttgttaagaatagcctattgaccgatcaacagatcgagcaacttcttacgccacatgcaggacagctcgatccatatgtcatacgacagaaaggccttactgagcggctatcgcccgaagagctcttcgtcgcacttcatcacattgccaagcgacgtggctataaatccaatcgcaaagcggttgaagaaaacgatactaaaggcgacggcaagaaagtactcactgccattaatgagaacaaggtcttgctaaattcttataagaccgtcggctctgcactattaaacgacccaaagtttagcacacacaaacgcaacaaaggtacaagctatcagaactcctttatccgtgctaattttgaggccgagattcgccaaattttaaccgagcagcaacagttctatccagctctaaccgaccagaacatccaactattactgttgggtgacgtagagcagggcaataagaatggattgttctatcaacgcccatttatgacgccagctctaattaagaagatgcgcggcaagtgcccctacgagaagggacagcctcgcatccagaaagccagctacacctttgaactgtttcgcttggctcaggacttatcacatttgacttatagccaccgcgacgaggacggcgccataaaggaaaagattcagctcacgcccgaacagattcaagcctgcatcgataaatgcaaggcgacgcgcaaagtaacatatcgcgccattcgcgaagttttaggacataaagacgataacaactttagctttgactacattcgcggcaaagagcccaagcgcgaggagtacgagaaagaccataacgcgaaagagaagaacactttcgccgagctaaagttctatcacgatgttaagaaggcagccaaggatacgcctgcggattggactaagattgaggctgacatcgacctatttgactatattggcgaagcactgaccgtcaacaaggatgatgctactatcgagaaagagctaagaggcctgataacctttggtggagcgcccgtcaatctatccgacacaactatctctaatctaatgcagctatcatattctggctttgcccatctatccgctaaagctatccgcaagatcacgccgtttatattacagggcaatacttacgataaagctgtaatacttgcgggctatgagttcaaccagcagctatctggtaatagcttaaagctaccaccgcttaacgaggacgagcagaatcagattactaacccgattgtaaagcgcgctattagccagactattaaggtgattaacgccattattcataaatacggttcacccatgcgtattggcgttgagagtgcaggggaactggctaagaatttcaaagatcgccagaggatcaagaaagagcaagacgacaacgctgccgtcaacgagaaaatcgttacgcggctgaaagaagagtttcatgttgtcaacccaacgggtctacagatttccaagttcaagttttacctagagcaggacggcaagtgtctatactctggcgagcccattgatttaaatcgcctctttgatgacagcagttactgtgaaatcgaccatatcattccgttcagccgctgtggcaacgatagccgcgccaataaggcactggttctaaatcacgaaaaccaggataagcgcaacatgacgccgttcgaggcttggggacacaccgaccgttggcccgaattctgcactcgagtcaacaccaaccctaagctatctccgtacaagaagaagcgtctactcgccgaaacgctgcccaaggaagattggaatgttcgtgcacttaacgacacacgttatgtcgaaaaatttttagcgcaatatctccgtcgacacctgaagttcgagaagtatgacgatagcgatcccgacgacaagcgccgccaacatattgtcactccagcaggccaggtgactaccttcttccgccgtgcttggggcataccccataaagaccgtgatgccgattgtctgcaccacagcgtcgacgccaccattgttgcactaactacgcaaggtacgattgctcgactgtcccggctcaaccagtggcgtgaggtctccaaatacctacccatcgacactaaaaccgccgtggacaagactactggcgaagtcgtagaatacatttccagcaaagacatcttaccgtggcccgagttcaccaaggagctagacttgcgcgagagtcaaccgaaggaaggtgacagcctggctacctggcgcgaccagttccgcgacatctacaaggaccaagacgaagaatttaagaactctatccaccccatctttgtcagccgtatgcctaagcgcagaggtaagggctcggtgaacaaagacacagttcgctcgccaaagtccaaaaatggcatgcgcaccgtccgtactgaattaaataaagtaaacctaaagaccttagatagctccgtgctacccgaaagtgatttagccctatacaaccagctgaagaaacgtctagcagaaaacggcaacgacccggccaaggcttttgccgagccggtttataagaacaacaaaaagttcgacaaaaatggccggccgctatcgcctgtatccaccattaaggtctacagcaaaaatcccgatactagcggcttcctagtcaataatggcaaggcatacgttaacaacggtagcatgattcgcctagatgtttacaaacgcataaacgagaagggcaagactgagcatttcttcgtgccaatttacgcacatcaggtcaaaacgggatcaaaacgcatcctgcccgaacctaagaggggcccaaagtttattgacgacagctttgataaagtgtgcgaactatttccaaatgattatatgagactagaatacatagataagaacggatgcaaaaaattagagcaaggttactatatggcatatgatatttcaggatgcaaaatatggctaaagccacatctatcctcgggcaatgctatgtcgtacagagtagcgccgcgatcagctactacaatccagcgtctcgacattaacgtcctaggcgacaactacaagtgggaataggttatggcctggcgttcagtgtatatcggcaatcctgctgaattatcccttgcggacagcaagctagttatccagcaggatcaagaggttcgaatcccgctcgaggatatcgacactttaattcttgataactatgccgtgactacaacgctgaatctgctgggggagctagccagcaataatatcgccactgttgtctgcgatagccatcacctaccttgcggcgaactgctacctctatcacagcattcacgccaagccaaaatttccaagcagcagatcgaaatgagtagcaccttacgtaagcaactatggcgtcgcatcgttatccaaaagattatcaatcaagccgaagcactgcggcatttccatcacgacgaagctgcagggcaactagacgatctgtcccatcaagttaaaagtggcgatactgataaccgcgagtccatcgccgcccgtatttactttgctaggctactcgatgacagcacgcgtcgcaaacccatgtggtacaactcagcgctaaattattgttacgccattgttcgcagtgccgtagcgcgtagcattgccgcccgcggcctgataccatcacaggggttattccatcatagtgagctcaacagcttcaacctcgccgacgatctaatcgaaccgtttcgtgcgatctgtgatatttacgttctagacaacgtctacactagccatatcggcgacgaagccgacgccaatctgtcgattgacgatcgccacgctatacttgacattataaataaatatgttattattaatggcaagaggtttgaggtgcggcgcgccgttgaagtagtcgtcgatagtctaatcgatgctatcaataccgacgatgctggtaaattgattctaccgaaaatctcctaattgataatttaatatgaattaccgttatatgagagttttggtattatttgatttgccaacgttcacaaagagcgatcggcgtgaagctacgcgctttcgtaactttctactaaatgacggctacgatatgctacagtatagcgtctacgcccgtttgtgccccaatcgcgataatgccgaggtgcatctaaccagatgtcgcaaagctgcacccgatacaggatcagtacgctttctaatggtaaccgagaatcaatacgctaacatgaaggtgctagttggcgagaagactgcgcaagagcaggcaagtcagtgtcaacagctatcgttcttctaaacattgacttcactatgctttttgatacaatacagataagcgaattgtaacttcgaccaaaaatccctaccagctaagactacgtggtagggaatttttggtggctcaacggaaagccgtttgcgattggatcgaaatcaattcgcttgccacggttacttgcgtgtaatcacgataagcatacctagcagacgaaatttgactacaaattgtaacttcttcataggcattctcctttccgctcaaacgttactgtccaccgaatgagctagagcgcttatgctttacgccgatgatattatatcatgcatattacttctattcaggttaagctattgcctctcatgataaaattcgtcagactaagcgctgctttagtaaaaaataaagcaaaagcaccccgtttaacaggggtgcttttagctaagtattataccattatctgatttgtcagggagctataacaggtttggcaaacaatcagcgtagttatgaattataccattatctgatttgtcagggagctataacactaaacaacaatcctagacaaagccgaggattataccattatctgatttgtcagggagctataactggcgcaagttcagaattggagttaatttaattataccattatctgatttgtcagggagctataacccctccagt

SEQ ID NO: 978 - DNA, 13238 bp, synthetic construct
  misc_feature 1..13238: note = Synthetic
  source 1..13238: mol_type = other DNA
cggaattagtctagcaaaaggagaatggattacctttattgatgcggacgatactgtaaacagtaattttagtaaagttgtgagcttggtggaaaatagtagatctttattcattatctttagcaactatgatatagagactactgataaaaaaatactgactacccaaacattacaatcatcaatgtatttatctggtccttggtcgaaaatatataataggcaatttctagtaaagcataaaatacttttcgagaaagacatcttgatgggcgaggatatgttgtttaatcttgaagtaattcaaaatagtgatgctatagaatcatataaaatgggtttctataattatagacaaaacaataactcggcaactaggcgttttaatcaaaaaatcatcgagtctgataaaaacttttacaaaaaattggaaaaaatattaattaagccacatgccccacaagaagaaatgattcaactcattcaaaatgaaaaaagtagggccgtattatcactactaactaggatttcttattcaaagaatattgacgaggcaatatccttttataagaagatcgatgtagattattatgatccgcacctaagtatgtttagcggagcgaaaaagatagtagtgtatctatttctcaagaaaagatataatcttatctatatattcatgagtcttagactgtcattaggaagaataaggaacaaaaaggaaaggtttatagaagtatgaaaaaaaataaaaaaatcgggataattacatttcataactcgaataattgtggctctatgctggaatcttttgccatgaatagaattgttgactctattggatttaattcagaaattatcaactatagttcagaaggtcaacagcaattatatgagtctctatttccatggaatagtccaaaaaatattattaaaaatatcctcctcttaccacataagaagaggttggatcgtaataatagaaaatatcaagaatttaaacagaagtatatgggtttgaattctcaggacatccaaactgaagcacaagttcgtaaattaaaatatgatgcagttattgcaggtagtgatcaaatatggaacgtgacgattgaagattataatgatgtatattttttgccatgggttcagggtggattaaaaatagcatatgcgccaagtttcggagcaaaaaatcctgctaaatatgatccaagtaggatcacaaaatatagtgattttctaaacggttttgattatctatcggttagggaaaataatggacagaaatggattaaagaaattagcgggagagacgccaaagttgttctagatccaacattgctattgcctatagatgaatatcaaaggctagagcgtgagaatatgaagctaccagaaaaatatatttttttctatagtccaggttttaacttagacatctgtaaatttgtcaaacaggtaagtaagaaatataacctccccgttattacttggagtgctaagccatattatgtaaaaaatgtttggaagtatggatttcaattgccagattatgaggatccgtccacatatttaaccttaattaagaatgcaacattagtatttactacttctttccatggtacaattttttcaagtttgtatcataaaaaattctttgttcttaaaaacggtgggatgtacggcactgatgatcgtgtgattactctagtagataaattaaaactaggcaaacatcttatcgagtataaatttaatgaaaaatttgattacctagcaaaacctgattatgtcgagtttgataaaacactggaggaagagaagaaaaaatctatagacttcttaaaaagtagcctatctcaaatagaggggaaaaatgaaaaatctaagtaagaatcttacatataatattatctaccaggttctactatatattattccgttcatattgactccatatctttctcgtactcttggcgcaacacagattggcgaatattcatacacatactctattgtctattactttatgatgtttacacttctaggaataaataattatggtgtaagaaaaatatcgaagacaaaacgcgagaaagatgcactgggagaaactttttcctctatatatggaatgcaactatttctcggattaatttcattaatcatatataacctagtatcagtagtgcttttaagtacgcatcatactatattattaatacataatttattccttatctctgcagtggtcgacattaattggtttttctttggtatcgaaaaatttgatattacagttaccagaaatgcaatcattaaagtattgtcaacgcttctgattttcatgttagtcaaaagcccggattcaattcttatttacactataatcatggctggaagtacattattgagtcaattatatctagttgcaatattacataaatatattaatttttaccctttgaatatccctaagtcgattaaactccactttacaaaatgtctagtattatttataccagtgatcgcctacagtatctatcgagttatggataagacaatgattggaggtattgtttcaactacagaacttgggtattatgagaatgctgagaaaataataaatattccaattggaatccttacagcaataggaacggttatgcttccgtttatgtctaagcaagcaaaaaaagatcagtcgactataggtgacgaaaaaaatgatattctatatagaatgtttcaggtatgttttttgattatgatccccatggcttttatactttttgtagtagcaaaagacttcacttctatatattttggtccaggctttgaaaaaagtggcgatattcttatgctgttatcgtcgactctaatttttgctacggttgctaatgtcatcagaacaaactatttaattcctaatgaaaaagataagatttatgtcacctcaacaatagtgggagcagttatgaatctgattctgaaccttatttttataaagagtttaggagcaattggtgcctgcattggaacaattgccgcagaagcttcagtgatgttttaccagattatcgctaccaggaaagctatagattataaaaaagtttttctatcaatttttgcgctaataataaaatgcgcaatagctgcttcgatttgtgtagtattggtaaatttacttaaagtccaaggggtccttaagataacacttactagtatagtatttattatcctttacatgctcgctaatattggaatattaaaaagatatctaaaattaatgagaaaataaaaagatgactgcactaagtaaacagacaatagaattcaataaaatagaaaataggaatatttttgctccggaatatgaaaacttcgtagagaataatacaatagagttttcggctcagaatatagcagtagtatatggaccaaatggtacaggtaaaacgagcctaatccgagctattttgggagaaaaagatacttctattaaatatcaatttaataacacagaatacagtgacggttcgcaattttttgtaattcaagatcaaaacaatcgtaatattatccagggtaaggtggaggactttttgcttggtgataaaatcaaacaagagactgagttacatgagcaaattcaaaatgaatatagtcaaatatgcaaagaaagcacggagatattaagagataaatacaaaattacgacgacgaaagataaaataattagctggattgatacccagctggaaggttttagctcgctagttaaggatttggtaaataggcagtcaaagggcagtaaatttggcgtagataactatataagtttacttgaagaatacaaaacaaaacatacccaaggctatgaagaagataagttttattttattatcaatgattttggtagtaaagactccgtcatagagaaaatagaaaagctaaagttagataaaatcatttgcaatcctcgcgttaggaaagttgaagaaaatgaggatgccttaagtattctcaataaattcaagaatagaagtcagtgtattgtatgtgataccgacaatatagactcggaatctctcatagagaaaaagacaaaaagcagagatgatattttaagtaaactagatgatcagacgaggggactagttgaagaaacaaatcgcaaacttcaagttgacgatccatttcttattaagaaaagtatatttgatgctattgagactaataatattgaattagtaaaaagtttaaatattgcaataaaagcatataaggaaattatctgtagtaatattattgctgattttgtagagatatataagaattcacaaattaaagataggtatgataaatatacgaaactaataaatgaaaaaatagaaatttcagaagaggatgtattgtttatccaaagtatcataaattacagtatgaataagaaacttcatatcgagagaggagatgacaaaaatattaaaatcacacttgataatagtgaattcataggacgcgatcgtaatactcttccattaagtactggtgaacaaaattttttatcattaacctttgagtttcttaaagcaaaaaaatcacaacaaccaatcgtgatcttagatgatccaatttcgagctttgattcaatctataaaaataaaatcacatacgcaattgtaaagatactagggggcaaaaaaagaattatattaactcataatacagacttactcagacttctagacggacaatataaaaattgttataacctatatctattcaataatactgaaggtggcgttaatggcttcattcgcttgaataagcaagagagtaggatgactattgatatcactgagctattagacttcttaaggggaaaatcttttcacgggaagcataatgatattgattctgttaaagataaatatttatttcagttagcattaattccttttatgcgaggatatgcatcttttattgatgatacttattgtaaacagaatctaactaatttaatgcatggatataaaacagaagaagttgatatttctgacatatataacaaactgtttggaaatcaaaattttgaatcaacaataatctctgtgaatgatatcctaaaaataaaaatagatagtaaaaccgaaatagtcgataaagaggaatacccaatccttaatcgtacattgattcataccttaacatacttatatttaagactaactgtcgagaaaggactaatagataagtatggtattgatatagacccctcttcaccattacaattgggcatgataattgataaggcttttccagagaaaaatgcgaatacgatacaaaagagggttgagcttactactaaaaagactctacttaatgaatttaatcactttgagggaaatatgaatctgtttcagccagcaatagatatcactgatacgatgctagagaaagaaggagaagaaataatccagtttctcaataatctagattagttcacaaaaacgttaattgtttaattaaagaaatttatggtaaaatatcaccacaaaacctcaaaaggaaaacattatgaataaacaaaaaatcaacactattgtcggatcaatcggggcgtttattggagtttttgtctttataacctacattccacaaatcctcgctaatctcgccggcaacaaggcccaaccatggcagccactcaccgcttcaatatcatgtctcatctgggttatttatggatggacaaaggagccaaaaaaggattacattctcatcatcccaaatcttgccggtgtcgtgctcggattccttgcatttgtaactgctctctagtcgttacggatattaatattcttccggagatcaatatcctcatacgaattataaaatcagcagtcaccacacttaatttcctacttgacactcatatatccaagtgataatatataagcattaaaacctccccccgatattgtttcgggactaggaggttttatttttttactaaaacatgatagatttataccagagccggggctagattccggcatctccattttaagattctaagaacctcccccctcttgacatatccaagcaactggtatatataatacccataatcccttaagtaaggattatgctactatcgaagtttattaggtctctataataatatagatttctaataatctatgtaaagctctaaggtatttcctcgtgaaataccttatcttattttctagctatccttgacaaaacactccatcccctccattccgcttctgcatgacaaaacaagaagttgtgatataacatagatatgaactactctttaggactggatatcggcaccacatcctgtggttggtctgttattaatttagataaaaaacgtattgaagatctcggagtccgtatctttgagggcgcagaaaaccctaaaaatggccattctcttgccgagccacgccgtgaaaaacgcggcatgcgaaaacgtcttcataggcgccgcatccgtctcaacttcctcaaacaattctttattcagcaaaaaattctaagtagtcagcaaattgaatctctcctcgcgccacacaagaaccaaattaatccatataccgttcgtgaaaaagctctctcagaaaaacttactcctgaagaattatttattgcactgtatcatattgctaagcgccgcggttataagtctaacagccgcgcagaatcaagcggcgatgctgatgaaaacaagaagacgcttagcgcaatcactgccaatcaggtatttctaaaagaataccagaccgttggcgaagctctcaaccatgctgaaaaatttaagtcccataagcgaaataagccaaacgattatagcaactccttcgccagggcagactttgaggatgaaattaagaaaatcctcaataaacaatctgaattttatccagttcttaatgaagaaaaaattcaggaattattatatagtgaaaatttcggcgtcttattccaacgccgttttatgaccccagaattaattgaaaagatgcgcggcaagtgtcaatttgaaaaagaaaaaccacgcgcgcaaagagcctcctattcatttgaactcttccgacttgcttcagacctcgttcatctgacctataatatgggcaataagctaactattgatgaaatcgcgtcctgtattgaaaaagccaaagagctttccgtattaaaatattcccatattcaaaaaattctagccgaagacatggaggacgaaattaattttgactatattcgtggtttaaaaagaaaggatcttcttaaggatgaggctgaggtaaagaagaaagcccttgaacaaaaattcggagaattaaaattctatcacgctatcaaaaaagccttaaaagatcagtctacggaatgggctgaaatcgagtcaaatattgaactattcgacaatattggttttgtgctcaccgccaataaagaagatgattcagtcaggaaggaacttgagaaattaggactaaaacctcaggttattgatagtatttccaatattaagcaatcattctctggttttggccacctctctctcgaggcactccgaaaaatcactccatttattttacaaggtgaaacttatgacaaggctgtcgttgatgctggctatgtatttaaggccaaacttgcttgcggcctcaatcgtctaccggctctctcgaaagaggaaaataatcaaatcactaatccagttgtaaagcgtgcaattttacaaagtattaaagtagtaaatgcaattatcttaaagtatggcacccccactaggcttcacattgagtgtgcttctgaacttgctaaaagttttgataaacgtaatgatattataaagattcaagacgagaatcgagaaaataatgaaaagcttgtggtaagactcaaggaggaattccatatattatctccgaccgcactgcaaattactaaattcaagctttacgagcaacaggatggtaagtgtctctattctggaaaacaaatcgatcttaatcgacttttctctgatgaacattactgtgaaatcgaccacattattccaaggtctcgttgcggtaatgatagtatgatcaataaggctcttgtattaaatcaagaaaatcaggaaaaacgcaatcagaccccgtttgaggcatggggaagcgatgaaaaacgttggcaaaactttattgctcgtgttgagtcaaatcctaagattgatgcgaaaaagcgtgcaaggcttttggctaaaaccccgccaaaagaagattggaatgcccgagctctaaacgacactcgttatatcacaagattcctctcgaactattttaagcagaaccttaaatttgccgagcatatggcaggtaagaaggtggtttatactccaaccggaaatattacttcttatctccgaagggtctggcatattggcacaaaggaccgctcagaaaatctccatcatgccgtggacgcagtaattacggccttagttaccgatgaagtagttaggcaatgtgctttgatgaataaaatgattgaattgggtgccaaatataaaaccaagggtatcaatcttgcggattatcaaaatggtatgcttgctactactgacccggttactggcgaagttgttgatctcgcgaaatatgaagaagtccgcgagtctgtccttccttggccaaattttgaccgagaggttcgtttccgtgccactccactcgcttgttttatggttgaagacaaagagaataagaagaaagccgaagagaagaaggcgcaattgtctgatgatgcaaaagctcgtctccaaaatgtctcaattaacacccttgccgaatggcgcgatcagttcagggatatttataaagaccaagacgagaaatttaagaactctattcatccgattttcgtctctcgtatgccaaagcgtaaaggtacgggtagtttacatgatgatacgattcgctcgccaaaaggtattttaatcgacgaaaagactggtattatttcggctaatccaaaccgtagttcattcatccgcaagaaaatccaagacattaagctcactgatctcgaaaattcaatcttaaagcagagtgacactgtattgtatcagcagttaaagagctttcttgaggcgaatggcgatgatcctaaaaaagccttcaaggatccagtctataagaacaacgtgcgatttgataagaatggccgaccactatccccagttactacaatcaagattaatgacgataaaaatgtgaaatctggtatctcgctcaaccatgggacccagtttgtgaataatggatcaatggcaaggctggatgtctaccaaaaagagattaaaggagagaagaagctcttctacgtcccaatttatacacatcaagtccgtagaggttcaaaccgtattatcccaaccacctgtggttatgattttgtggacgaaactttcaagaaactttgctctgtttatcctaacgattacctaatcatgaaaaaaggtgatgaagtgttacaggggtattatattaaatactgtatcaataattcagctatatcgtatatatcaaatataaaagagggccgatctgattttgttaatgcgacgggtcgcgcactttctgaactatatcgtctcgacatttcagtcctcggcgataattatccttgggaaagaatgtattaaaatattatggcttggcgtacggtttacctagagcagcaaacaaaactttggttaagccggaataatctgtgtttttatcatgacgaggcggagttatcgattccaattgaagatatagataccttgataattgataatcatgggacaaaaatcaccacaaatctcattgatactcttgcgagtcaagatgttgcgataataatatgcgattcttcacatctacctagcaccgtgattttgccatacgcaaaacattcacgccaggccaaaatctctagcgatcaactcaatatgcgtcagccaatcaggaaacaactttggcagaagaatattattcagaaaatccttaatcaatcggaagtcttaaggagatttaaccttgaatactcggaactaattaggctatctggacttgttaaatctggcgatacctcaaattgtgaggcacttgccgcgagaatttattttaatcaacttctcagtgactcgacgcgtcgccagccaacctggtataattccgccctcgattatggttacagtatagtgcgaagttgtattgccaggagtgtggcgtcgcatggcttaattgcttcgctaggcatttttcatcacaatgaactaaataattttaacttagtcgacgatcttattgaatgttatcgtccatttgttgatttttatgttttgaagacagtccacttacggcatattggtgaagaatccgacgagaatttatcgaaagaagatcgaattttacttacacaagttattaatgagaatattaaaattcgcaatttgtcctattctataaaacacggaattgatattacggtcgaaagttttattgccgcgttccaaaatgaggatgtcagcatatttgagcttccggaattttgttgattaataatttttgagtgggagaaagaaagcatgagtagttataattttatgcgagccctagttttatttgatctaccaactgacactaaaattaatcgtggaaacgctacgcggtttcgcaactatttgctacatgatggttttacaatgttgcaatttagtatttatagtcgactttgtcccgatcgtgataacgcaaatactcaccttgagagggtgaagaagcatgctccacaggagggctcaatccgtatgttgatgttgacggaaaaccagtttgccaacatggaggtaatttgtggcgagaaaactgaacaagaaaaatgtattggcgaggagcagatgctgttattttgaattagagaataagtataagtataataaaaaactattcttaaaaaatagtctcctgagaaaagagatagaaaaccaaaatgcttacccaacaaaaaatcttccattaacagggaagattttctgtaagtaaatttgtagtattatactactatcgaaattattaggggactataacgatggtactttatatgtcttttggtaaaaaattatactactatcgaaattattaggggactataactatggtgaatattcagggagattatctgcaattatactactatcgaaattattaggggactataacaatagacacactagtccataaacggtgtgtattatactactatcgaaattattaggggactataactaatctttgcgtagacaattcgacttcccaattatactactatcgaaattattaggggactataacaataaatgaattattcatgttttactcctctattatactactatcgaaattattaggggactataacccaatctggataatcgatttgtttatccttattatactactatcgaaattattaggggactataaccgacgatgcgatacggcgaagctcggcgaattatactactatcgaaattattaggggactataactttttagaagtttagttgctcgattaagtaattatactactatcgaaattattaggggactataacttgaggggtgttggtgtatgcaatgtcagcattatactactatcgaaattattaggggactataacctctcgccagtagattggtcgatataatcaattatactactatcgaaattattaggggactataaccctgaggtcgagcttgtagtgatacaagttattatactactatcgaaattattaggggactataacaatttcagcgttcttgttgatcgtgacactattatactactatcgaaattattaggggactataactttatataaagttgaagttcgcacttcttgattatactactatcgaaattattaggggactataacacttgggtgttgctaatttttattagcataattatactactatcgaaattattaggggactataacctttaccttagccgacctttggactagtagattatactactatcgaaattattaggggactataacaagattgctaaagaggcaggaaagcgtggaattatactactatcgaaattattaggggactataacttgcagaagcttgtagttgagcacttccaattatactactatcgaaattattaggtggctataacttcttcttcggcatacttctttccttaatcttaaattgctcgaacaggctattgatgaactcatctgccatttcattcttatactcgatgttaccaataattcccaagaataattttcggatttgtagtgaatactggtctttatcctgcttaatttgcgctctcttcctgcttgctaatgcatgacggacatgcagactcttcttgtactttgccacctcctcatcattagtgaagcctttgttctgccagtaactagaaactgttatattacccaattttcctccttaaaatctttcttagattatactactataaaattgttatgggagtatagcaacaggaagttgctttatataataaataacatcaaagaaagctccctagtcaagccgaatggcctgagtcggtgggagctttatgacccaatataagacaagactccgacaatgtcaagatgattgttaaggtccaggacctttgcaacaaaaaggcaataagtattgccaataaaaataggtagatccatacttaagaataacaacaaacgtaaataggagatctacctatggcatattgtatagccaaatctatagaaattcaacgcagtaaggcactaaaagagatttttcttgaaggcagaagcgtcgcgcaagtggcgagacgcttcggaagagatagaagcaccctgtatcgatggattaaaagatggagagaaattaataattatccagattttagaaattatggtagaccaaatagagctcctggaaagaagtttcgcttagagtttctcaagtggcacatattaacgcgttcatccgctcctaggattcatccaaatgctttagatgaaaaaatagtggcatatattgttagttcttattagggaaccataactacagcagagaacccagaaaagggtcaggcacccaataaatcg

SEQ ID NO: 979 - DNA, 5359 bp, synthetic construct
  misc_feature 1..5359: note = Synthetic
  source 1..5359: mol_type = other DNA
agtaaacccagcagcccagctgatgtgttagctaagctagccgactatgacaaaacatgactgcgcatctttttgcctggacagcagagcatcatgcatcccgctgggtgctgggcaagcccggcatgataccgataagcaccgaccaacccgagaagacactcggctattgcaatccggccttgatactctataatgaaaatgtacactcatgggagcatgattgtacaactatctgaattgcttaggtttctataataatttagtagaaatactaaagcaaagctctaatccgtctctttatgagacggattatctttgtctataggctacttgacccaaagaggctataatagaggcatggacgatggtataaagtattccctagggctcgacatcggcacgacatcagtcggttgggcggtagttaatctagataaagaacgaatcgaagatctgggtgtccgtatttttgagcgtccggagaaccccaagaatggcaaatcattagctgaacctcgacgtactgctcgtagtacacgacgccgcttgcgtaggcgtcgccagagactcaattatctaaagcagttctttattaaccagggattactgacaaagcaagaagtcgacgacatcatcggctctgcccacactaaagcctggcatcaggcacatgacccctatcagctaagagtcaaggggctgaccgaaaaactatcaccggatgaactcctaattgccctctatcatattgctaagagacgtggctacaaatctaaccgtaagtctattgagcaaagcgataccaccggtgatggtaaaaaggtaaatagcgccatcagcaaaaacgaccggatattatctgagatgaaatacagttcggtcagccaagcactcctaactgatgatcgattcagagagcgcaaacgtaataccattgacgattatcgttactctttctctcgagtagattttctcgacgaaataagacatatccttgaccgacagaaagacttttaccctaacgaattcagcatagaccacataaatcagctgcttggcatagatgtatatcatgacgaaaaaggtcagccgattccgatagatcacaagctaaccaataacgatatcaatcgactaactaagcacggtcaaaccacgctaaatggcatcttctaccagcgtccattcatgaccagtgaactaattaaccgcatgcggggcaagtgtcctctggaaaaagatcagcctcgtgcacccaaagccagctattcattcgaacttttccgcctagccgaggacttgtcgcacttacagtatacactcgacttcgttgagaccggtacggactggcaagtgcgcaaagaacgcaagcgccaggctcagttcttgaccgccgaccagattaagacatgtgtcgataagtgtcttaaaactcaaactgtcaagtatagcgctatcagagagatactaggctttaaggacgataatagctttcaatttacctacattagaggtaagagccctgacgaaaagactctagccaaagatcctttagccaaggagaagaatacctttgctcagctcaggttttatcatggcgtcaaatcggtactgaaagatctgcccaatgactggcaagacgtctctagcgaccaagacttatttgataagattggcgaagtattaacctgcaacaaagatgactatagcatcagggaaggcttgatagaggtcaataaagaccggtccgcccggggcaaagctgaattatcagacgaagcgatcaacgctatcgtcaacagcaagcttagcttcgccggctttggacacttatcactggtagcattacgcaagattacaccatatctactaaaaggtaatggcatgacatacgataaggcagttgaggaggccggctatcaattcaacgccaggctgtcagggcacaagaacctcttgcccccgctcagtgaggaagagtcgcaccagataactaacccggtggtcaagcgtgccgttagtcagaccatcaaagtagtcaacgccatcatccataaatacggtgcgccgtaccgcatcggaatagagtgcgccggtgaattagctaagagctttaaggagcgtgaagatattaagaagcgtcaggataagaacgccgagaacaatcaagagacagtcaaggaattacggtcaggcaagctggttttcgatggagagcagtttgaagcacaggttgcgccaacaggcaccagcataaccaagctaaacttttataaacaacaagattgtaaatgtccttattgcggtgagccgctaaatcttagcaagatctttagtgacgataactacgctgaaattgatcacatcattccattctctatttgcggcaacgacaccaaggctaataaagtcttagttcataccacctgcaatcagatcaagggaaatcagacgccataccagacttggggcaataaccccgaaaggtggaggatcatcgaagctaccgcccgagccaaccataagctaggtgctgccaaacaaaagcgactactaacgcagactctgcccgacgaggattggtcgcttcatgctatcaatgacactcgttatatctccaagttcatctccaggtatatcaagtcaaatctaaagtttcgaccgatggacgacgcagaagacgatggccatacccaacgacaacgagtaattatgcctgcaggagcgatcaccagctatctacgtcgtatgtggcacatcggacataaagaccgtgaagaggattgtctacatcactcagtcgatgctgtaattgtcgccttaaccactcaagcaattatccaggattgttcaatctatagcgcctatatcgatgatcataccaagatgcagtttagcgataacgcatcacaggccggaagtgctaagctagtcagagcccttcggcaaataacggatccagctaccggtgaggtaaaagaagctgattacaagaaattaatgcaagatatgctaccatggccgagatttgacgaagaactccgcaagcgggaggaacagccggatccggtcaacgacaccttggcaatttggcgtaataagtttagcgatttatacaaagaccaagacagtgacttcattaaccggattcaccccatatttgtatctcgtatgcccaaacgccagggaaccggcgcagcgaacaaagaaacggtgcgctctaacaagacgaaagacgatgatggcaagaccagatcggctaaagtcaaattgcgtggcttaaccctaaagcaacttaacaactcggccatcagcagcaacgaaggagtgtacgagcagatcaaacagtacattatagatcgtgataaatggaaagatgagataaaagcttggcgtaaggctaagaaggccagtaaacaaacatcgaatactgacgaagctaatgacgataaaaacgagccatcagtgccgacagagccccaggagcctaaagtatacaagtctaatagacgattcgatcgcaacggcaatcctatctcaccgatcaaatcaatcaaagtctacgacccccacccaatgacgagtggctttctggtcaataacgacactgcttatgtcaacaacggtagtatggtcagactggacgtatataagcaccctaataagaaagggaagattgagcatttcttcgtgccggtttatgcccatatgatcaagaaggggcatcctgagattaagccaactaagatattgcctgagcctaagaagggtactccaaaagagattgacagcagttttagcttcgtctgtagcctatttccgaatgattatgtacgcattcatttgatgggcgaagtacgagaagggtactatgtgaaatataatattgcaaatggagcgatgcagctactaccgcattatgcatcagggaaaagtaccaataatctcatacaagtttacggtaagaatgcacccaaaatagagcgcctcgacatcaacgtcctgggcgataactataagtgggattaggttagaaactatggggtggcgagttgtagctatagagagccaggctcatctaagcctggaacaggggagtttggtcatcaagggtgacaagagtgctaagctaccgatagaagatatcgatacgctacttatcgatagctacgccgtgaccatgaccgccaatctcctcggcgaacttgccacacataatgtcacgaccatcatttgcgaccaccagcatacgccctgctcagtaatcgaaccattgtcacagcactctcgccaagccaaagtatcccgcatgcagctagagatgtctcagccactgcgtaagaatctatggcaggctatcgtcaagcagaagatcattaaccaagcccaggtcctgaccgcatttagacatactgagcaagctggacagctcatcaagctagccaccgaggttcgcagtggtgataccactaatcgagagtctatcgctgcccgtatatatttcgatactctactggcggatgccaccagacgccagccgacctggtataattcagcgctcaactattcgtacgctatcgtccgcagcttagttgccagacatatcgctagccggggactcatcccgtcgctaggtctctttcaccatagcgagctgaacagctttaacttagccgatgatctgattgagccctatagagcaatagtcgatcacttcgtcctgtcaaaattagctgatcagcacttagacttaagtgacagtagactaactaaagaagatcggcggttgtcccttgacattcttaattattatgctattatcaaagataagcagtttacagtgcgagacgccatagacttaactgtcagcagcctagtgcaggctattggtgacaagtcacccgactcgcttcaattgcccaagtttaatcgctaagttaatcttaatcatgagctaccgttatatgcgtgtgttggtactattcgatttgcccacaggaacgaaagctgagcgcaagcaggctagtcaattccgcaactttttagttggggatggctttgatatgctacaattcagcgtctatagcaggctgtgtcctaatcgagacgtagccatgaagcatctcgccagagtcaccaagaatacgccagcggataccaaaggctccatccgagcgcttctcgtcaccgagcgtcagttcgctactatgttcatcatcctaggtgaaaaaactgaccaagaagagctggttaaaaccgatcaattatcatttttctaaactaaaatcccctctgtaacagaggggattttgagtgagtattatacaactatctgaattgttagagaactataact

SEQ ID NO: 980 - DNA, 5283 bp, synthetic construct
  misc_feature 1..5283: note = Synthetic
  source 1..5283: mol_type = other DNA
ccagagtttacgatcataggcaggacaggcaggactcgcactcaggacagtgctggtgaagatcaacaggaggatagtcagcaggattcgcatcattggtctcaccagtgtaggtgtggaatctatgcctctgcgctttgtatgacaggttcggcaacaagcttggcagcggtaacgttgagttgctcgattctacccaaagcggatgtagtctagatgggcacagagaaaacattggatcgttagatccacaaatctcggagatttcttcatttacctaaactacacaattgttccaacaccaaaacattcaaacaagcatcagcaaactataataaattacaaaatgtgattttgaacggatgatatatgtgtttgctgcgaggaaaataaaaaagaggtcagctacaaaagaaaacagtcccttgcgttaatcgttcaagaattgtatttcgagtgttatcaacgtctttggaattgtttgaaaaagcgaggggggaggtaggcagatgtgtctcgggatgcctagcccgcacgaattgacaccgttttgtctgaaacaaacgatcaatccggatgatgttggtctgtgcaatttaattcttcagaaaattttgtcaaggggtcatatggaaactatctggggtctggatctgggaaccacttcgattggtttttctgttgtaagaatggacatcaagaaagagcagggtgaaatcatcaagacgggtgtcaggatttttccagaaggattgaataatgaccatgaaccgaggaataaacgcagaagagatatgcgcttgcacagaagacaactgcgcaggagaagaattcgaaggattgaactgtctagaaaatttaaggaaatggatctgctacctgaattttcctccgattgctggaataaactgatggaacaggatccatatgttctcagaaacaaaggtgtaagcgaaagacttgagttacatcaatttggaagagccatttaccacttggttcaacgtcgtgggtttttgagtaaccgaagaagtaccggttccgaagaaggaaaagaggaggaaggaatcgtaaaatcggctcttcaggatttggatcaggaactcggtgaatcaaccttaggtcagtatctttcagaacaggaaatcaagcgtggaagatatctggatcgcaacagagtaattgaggaattcaaaagattgtggcaatgccagcgggcttatcacgcggaaatactaactgaaaagattgaaaaggaactttacgaattcatctttcatcagcgacccgtgttttggaggatttcgacgttggggaattgtcgcctattgcctgattcaagattgtgtctcaagggttcgtggcttggtcagcagtatctgttgtttcaggaactgaatagtctcaggttggacggtagtaatgaaccattaccaaacgaggaaagacaacagctcatcgatgcactattggatgagggtgaactttcatgggcagcgtgtcggaaaattctgaaaacttcctggcaaaaaagaggaatacctttaaagacgaaattcaatctggaatttgggggtaagagtaaattggcaggtaaccgtgtcgtctcttcaattcggtctgtgctgaaggaaaattctattgaagtcaaagaaatagaaaaactctatcagttacttccccagtggcatttcgaaattctttacaaagaggttggagaaggaagaaacgccagaatcgtaatgcggaacaaccaagaaatagaacaaaaagagcgattctttgtgaaccagttgatgtctgagataaagcttgaagaaaagattgccaaaaaactggtttccttagattttcctgcgggttggctatcacattcgacggatgcgattgaacggttgatgccgtatttagagcagggatttgtttattcagatgcatgcgatcgtgcgttcccctcccaccgggtagtggaaggagaaggactcgagttccttccaagcgatcagtcctatcttaaggaagtaagaaatccaactgtgaagcgtgcattgaacgaattgaggaaggtagtgaataatttaattcgaacctatgggaaaccagacagaatccgtgtcgaactagccagagaacttaagcttccatcaacaaagcgccgggattatcaaaagaaaaccaaacaaagagaaaatgaacgtacgcaagcaagagatgcgatccgtaaagcaaatttccgaggaaattcacttgaaatcgagaaatatctgctctggaaggaatcggatgaaaagtgcctctataccaaccaatcaattagtttcagcgcacttttcgaggagggaaaatatgagattgagcatatccttccatactcagtgacactggataacggcttcatgaataagacgttgtgtgagacgaacttcaacgggtttaaaagtaacagaattccctttgaggcattcaagaacagtggtggtgaagaagaatggaaaaaatttgtggagcgcgtcaagaaatcaaaacttcctgacccgaaaaaacgacggttgcttgcccagaagattgaagacctggttggagacgatccagctgagagacaactcagagatactgcatttatcgcaagggaagcgagagactttttgatgaaactctttacaaagaaagaagataaagccattccggtcgaaaccagcaacgggatgattactgcgcaactccgtcaactttgggggatgaatcaacttttagcagagggagacaagaagaaccgagatgatcaccgccatcatgctgtagatgctgttgttgtggcaatggtacatccaggcaccgtccgacatatgagttttttgagtaaaaactggttacgaggtgagcggacgcaattccctgctccgtggcaaaatttctaccaggatgttcagaaatccatcgagagcattattgtttcacacaaagtgaggtcgaaggtgaatggaaagcttcacgatgagttggtttatgggaagaggaaagaccagactggcagcaaaaaaggcagcagtgtttataagcgcagggttaatcttcagtcactcagcaaatcccaattgcagaagttgaaagatggaactcttgaagccgcatgggatggtggaggtaatgttcagcagatccttcgtaaccacctagaacacaataaagattttagtacgctcccgttctttaatcttgagcacggtgagaagcgctttatcaagagcatatcattgctttacaacaagaaagatcacctagttgaagatctgcatggtaagcagagcaccttcgttgacaagaatgagaatcaccacgttgctgtctatgaaaatggcgatggcgagatccgttttgaagtcatcagtcggatggatgctgcaaagaacctatcacaacttgggtctcctgttatcagagaaatcagggggggcttccgcttcaaattctctctggtaataaatgatgcggtcattagctacgatgaagagaatcggccaaatgtgctgatcgtccaaagcatctgggattcggggaatgttgtgtttcgagaccacagagatgctggaaataaggatagaggtatcaataaatcaataagtactctgatcagtgaaggatgggagaagtgtgctgttgatccaattggaagattggcgaagaagaatgactaaaagagtgatcgagatctcaagtggtccgctcagaatcagtgtgaagcatcaccaattgattcttacctatcccgatgatcagcagaagcaaatcaatacggaggacatcgggatgctgattttggatcatccaggagtaacctttaatgtggcggtcgttaatcaactcttagattgtggggtttcttttctgatctgtggagcaggacatttgcctgtgacctggttttttccagtggctgaccatgctcttcaaacagagaggttccggattcagcagggtataactctgccacttcaaaagaatctctggaagcacatcatccaatcaaaaatttggaatcaatctctatgtttggaggcctgcaaaaaatcgccaacagatctacgacttttgcggaagcatgtgagatcgggagacaccagcaatcttgaagggcaagctgcaagaatttactggaaggaattatttggtagtaacttcaggagagatcgtgatggggattctccgaatgctctgctcaattatggctatgccattttaagatcagccattgctagaaagatttgttctactggacttcatccgacctttggaatccaccaccgtaatcgaaataacccctttgtacttgcagacgatctaattgaacctttacgaccacttgtagatatagttgtctacaacctttgggagagcgaacttgatgagattaaccggtcgtcaaaaggaaaaattcttggattgatgaatcagtttgtgtggatcgatgaaaaaaatcagtcattacagaatgcaattgagatctacgtcaatagttatcttgaatctattcgagagaaaaaactgcttttgaaatttcctgagagtttggcctatgaaattcccgaaagcgaggagtagattaggaaatccagttgggtggagaagtatgtggattttcgcaatgtttgatttgccaactggtactgacaaacagaagaaagcctacacaagatacaggaaggtattgctcaacgatgggttctcaatgatgcagtattccgtctactatcgtcattgcgccagtcaagatctggcgcagacacacatcaaaaaggtctcggctgaagtgccacccgaaggcgaagttcgtttcctaatgattacggataaacagttcggaaatatgcagatcttccagggaaaatcgcgtgaagaaacacctgccgcaccagcacaacttgagtttttctagcaagatcaccaaaattaacctgcaaaaacagggttttgggtcggacagataccaacatcatccgaattgaccggaaatctcaacgcactagcgaggtcactgggaccaatacaaataccaacatcatccgaattgaccggaaatctcaactaatcgttgtgatacatgcacaccaaaaggataccaacatcatccgaattgaccggaagtctcaaccagcacaagacacgattgcgacttcgctgaataccaacatcatccgaattgaccggaagtctcaaccagcacaagacacgattgcgacttcgctgaataccaacatcatccgaattgaccggaagtctcaacca

SEQ ID NO: 981 - DNA, 23267 bp, synthetic construct
  misc_feature 1..23267: note = Synthetic
  source 1..23267: mol_type = other DNA
ttctgcgagttatccctcggcgtactataagcttaacgacagctatttttacgtaagacgtcagcttatctacgcggtaatcggacttgcggcgatgataggaatatcgttttttaattataataaactgcataaggtcgcgcctctgattttggggtttgcgtatcttactttggttgttgtactattcctgcccggaaacgtacacagatggattgaagtcgggcctattaatatccaggcttccgagattatgaaattcgcgcttattcttttcttcgcgcattggggaagtctttattacgataaaatgcagtacgctaaatacagtgtccttccgggtattctgattttcggaagcacggcggcgcttctgcttttagaaccgcactattcgggtattgtaattaccgctatcctcaccgtagttatgctttatatcggcggaatgagggttcagtaccttatcgccggcggaatcttacttttagtcgcgattttcggcgcgtgggtaaccggagttctgacttacgctatgcagcgtatggacggctggggccaggcgcttgtatatactaccgaagaaatgtggcagactacctggcaaacgagaaactcgctctactcaatcggttcgggaggacttttcggcctcggtctcggccagtcaagacagaaatatttgtatctccccgaacctcaaaacgactttatcttcgcgattgtgtgcgaagagctcggctttatcggagcgtttattatacttctgattttcgcgcttttggtatggcgcggaataacgcttagcctaaggtcgaaagaccgtttcggaagactgctcggaatcggactttcttcccagatcggaatacaggttatacttaatatcttagttattaccgactggctgccgaatacgggtatcagccttccgttcttcagttacggcggaagttcgctgattatgcttttaatgcagatgggacttattctctcgatttcaagaacagcgaatatcgaaaaacagtagccgaaagccgaatccgcttttgaaaagtaatttcattcggaaagaatgattaacggcggggttgaagtttagttaatagtaaatagttggaaattgtatagatgaacttttcccaagcctcaaaaacttatggaaagttaaaggtacgggatataaattttcagaaaggaacgtccgcgtttgacgcgggcagataaaaatatgaagattgtatttgcgggcggaggaaccgcgggacatattaatcccgcgcttgctattgcgggttttgtacgcagtaaagataaaaacgctgaaattctgtttgtcggaaataaaggcggaatggaagaaactcttgtacctaaagcgggatttgatattgagtcaattacaataagcggattccagcgcaagctcactcccgccgctttaaagcagaatgttcttaccgtaaaaagaacttttacttcctcgagagaagctaaaaaaatactcgaaaaatttaaacccgatatctgtgtgggcacaggcggttacgtaagcggtcccgttttaagaactgccgcgaagatgggtatccccacaataatccacgagcaaaacgcctacccgggcgttacaaataaaatgctcgccaaatccgcgaaacgagttatgcttgccgtaaaagacgcggaaaaatattttgataaaaacagcaactgcgttgtaacgggaaaccccgttcgccgtgaaattatcgaagccgataagtataacgcgcgcagggaattaggacttgacgaaagacctttggtgctttctttcggaggctcgctcggagcccgtaaaataaacgagggtgttgcgggacttattgcccgcagcggtaaagacggacagtatcagcatatccacggctacggaagaaacggactctggttccccgatcttattaaggaaaagggtgtggacattcgtaaatgctctaaccttgatgtgcgtgaatatatagacaatatggcgacttgtatggcggcggctgatttggtaatttcgagagcgggcgcaattacgctttccgagattcaggctctcggaaaacccgcgattcttattccgtcaccgaacgttgccgaaaatcaccagtaccacaacgctatggcgcttgttaataataaagcggctgagattatcgaggaaaaggatttaaccgaagaactcttaattgaaaaagccgacagcctgcttcaggacagcgaaaaacttaaagagtattccgctaattcccgaaaaatggctatactcgatacaaacgagcgaatctattcgattataaaacatattacaggcacaatttagtaacataaactcaaagtatccataaaatataactggtattatgttttaaggggtgctttcggtgtcagggtttgtgataaacggcggtaaaaagctttacggagaggttgaactgcagggcgctaaaaacagcgcgcttccgattctttcggcaactattcttacgaaaggcgataatatactttacaactgccctgaacttacggacgttgacgcttgtctgaggattctgcgttatttaggctgcgaggcaaaggagcaaaacggcgcgctcgttcttaactgcggcggactttgcgaaaatgaaattcccgacagccttatgcgtgaaatgcgcagctcaattgtatttttgggagcgatacttgcccgtacaggatacgctaagctgagcttccccgggggatgtgagttaggccccagaccgattgatctgcatttaaaagcgcttaaaaaaatgggcgcgaaaatttttgaacgccacggctcaattgtgtgcaaagccgaaaaaggactaaaaggcgctaaaatcgacctttcttttccgagcgtaggcgctacggaaaatattattttggcggcggtgctcgccgaaggaaccacaacaatagttaacgccgcgagagagcccgaaatctgcgatttgtgcgattatctaattgacgcgggcgcggagatttacggctcgggcgaaggcgtaattgtaatagacggggttcgggagctctacggggtttcccacagtattatccccgaccgtatagtcgcttccactcttatgtcggcggcggcggttacgaaaagcagtatcaccgtaaacggtgtaatacgaaatcatttaagttcggtaattcccgttttcgaggaaacaggatgtaaagtgagttttaaagacggaaatatgaacttttccgctcccgaaaaattaaaagctatgcctcttgtgaggactatgccttatcccggctttcccacagacgcccaggctccgcttatggcggcggcgtcggtatgcgacggaacttcggtttttgtggagaatatttttgaaaaccgttttaagcatgtcggcgagcttacaaggctcggagccgatataaatgtccagggcaaagtagctgttgtaaacggcgtaaaaactctttacggagcgaaagttgaggctcaggatttaagaggagcggcttcgcttattgtcgcggctctctcagccgaaggcgaaacacaggtaagcgggattgaatttctcgaacgaggatatgaaaattttgaagtaatattatgctcgctcggagcagatgtaaaaaagatatagaaggaataataaaaccaaggaaaggggtgataatatggacgaaagaagacctcggcgcagaagacaactgagcccgaaggagattaaagcgcttgaaaaacagcgtaaaaagcaacagaagatatacgaaaaacgccgtaaaaaagcttctaaaagcagagaagccgcgcgtaagcaggctcgtaaaaacggcagcgtccatatgaatccgcaaccgccccgaaatcccgaaaaccgcagaccgataagcgaagaagaatacagacgcagggctcaggcggaacgtatgcgcagagcttccgaagacaggaacgtaagggttcagaatatcgaggtcgaaagcgagaggtatattgacgaaaacggccgtcccgctttcgaaagacgagtccgccccgttgataataaaaaagcccaaaaagctcagaatcagaataaacagcgccggagcaaaaaaacaatgcccgacgtaatcgaaaaagaaaccgcgaagcgtgtgcgcaatcttgaatctaaagaccacaaagacggtttttacgccgatgaggttgccgtaagaaaagctcaggcaagaaaagaacgccgcaagcgcgaaaagaaaatgcctaagccgatttcgccgaaaaagcggagagcgcgcagaattttcgcgtatgttacgataattacaaccgttattgttgtcggagttgtactttcgcttaccgtgctttttaaggcggaaaacatctacgtaaacggtaataaatattatcccgaagatactataataagacttgccggggtaagagaaggcgataacatttttatggcgtcaatgttcggtaataaaaatgccgtaagggataatctgccttatattaaatccgcgggtatctctttccagcttccgaactctatcgttattgatattgaaaacgcgaaagaagcccaatgcgttaagaccggcggaatgtattttaaggtgagcgacgaaaacaggattttggagcagatacctaaaaaatccaaaaagcttacttcgcttgtagcgcccgctttaaagtcgactgaagtcggcgataaagttgagtttaaggataattcctatacaaaggcgcttaacagtcttacggagtgtataaagaagaataaatactcgaaaattaccgaaattaatataaggaaaatttccgatatttcaattacatacgataagcgtattaaaatccggatcggggttcccgaggctctggactataagctgaaaaccgctttcgctattatcggtgaaaagcttgacccgaaccatacgggtaaaattaaaggaattcttaatgtttccaaatgtgacaaaaccaaaaaatcatactttaaagagggaagcataaaagaaaaggacgaggacgaaaccgttcctacggcttcaaccaccgcggaaactaccgtcaggtcgacgtttgtcgctgttaaaaccgaagaaagcaccgtggaagaaaatgacgaagaagataacggcggtgacgaaaacagcggcgagcagtatcctaccgaccccgaggagtaacaaaaatgctaataaatggctttaaatatgatgatttttagtcttttggttaaaattttttaatttatatttacttttaagaaaaaatatgttagtcttagagtgttgatttgtgttataaattaatggaatatatctgtaatttggatgaaattgcaaggaggaagttaaaatggcttttgctttagaaatggaaagtgagtatatgcctgtaataaaggttatcggcgtcggcggaggcggcggaaacgccatcaaccgcatggtaactatggaggtaaagaatgttgaatttatcgccgtaaataccgatgaccacgtattaagattatccaaagcttcgcagaccgtacagatcggcgaaaagcttacaaaaggtaagggcgcgggctcaatgcccgaaatcggccagaaagccgctgaggagagcaaggaagaaatcgccgctctcttaaaggataccgatatggtattcgtaacagccggtatgggcggcggcacaggtacaggagccgctcccgtagtagctaaaatcgctaaggatatgggaattttaacagcagctgttgttacaaagcccttcgcttttgagggtaagagaagaatggctcaggctgagcagggtattcaggaactcgccgcctgcgttgactcgcttatcatcgttcccaacgaaagattaaaatatgtttccgaggctccgattactctgcagaacgctttcgctatcgcggacgacgtactccgtcagggtgtacagagcatctcagaccttatcttagttcccggtatggttaacctcgacttcgcggatgttacttccgtaatgaaagacgcgggttacgctcatatgggtatgggacttgccacaggtaaggacaaggctatcgaagctgccgacgcggctatctcaagcccgcttcttgagacttctatcgacggagctaagggtgttattatcaacatcacagcttcacccgacatcagcctcgaggatatcgacgccgcttctactatgattaaggacaaggtatccgacgacgcgaatattatctggggtgcggtaatagacgagaatatggacgacgcaatcagcgtaaccgtaatcgctacaggctttaacggcgacggtaaagctgctcccgctattcccgccgcggctgacgacgataacgtaatcatcgaaaacgacgacgatcccaaggataaggataataccgacgacgatgacgacgatacattctacgatattatgtcaatctttaataaataattaataaattaaaaaagacggcttcctttcggaggccgtttttctatgctatgtgtacaaaagtgactttaaaattttgtgaaataaagccgatgaaaaaaagagtttaatttgatataatatgattataggaggtcatcaatatgaaaaaaactattaaattatttttaacgttctgtataatgcttacttcaataagtgctttttctgcatgtgcaaaagaaagactctattcttataacaataaaaccaagacgctcaccataaacattaaaggtaaaatgaaatataattgtgaaaatgcgccgtggaaagacgttgaacaacccgaacatattgtactaaaaaaaggagttacaagtatttcatcttggggatttggatgtaaaatcggagaagaaagcgctcctctgaattataattgtttaataaaatccgtgaaaattcctaatactgttaaaactattggagcagacgcgttttggcattgtacaagcataaaaaaaataagtattcctaacagcgtaaaatctatagctagtgatgcttttggagaatgtaaaaacctttccaaagtaaagctctcacgtaaattaaaaactatcaaaagttttgttttcagtgattgcccaaaacttaaaaagataacaatacctaaaagtgtaaaaaaaatcggcaaaaaagcttttgggtataaatcttatagcaagaaaataaagtgtttcacaatcaaaggctataaaggcaccgccgccgagaaatacgctaagaaaaacgggtttaaatttgttgcgctaaataaatagcaaaagtaatgcgctgtataaatatctcatttcttctgacggcagctttctcagagtagttgaggcgataccgagaccacagttgacgatacggtaaagttcagctacaacgccgacggactgcgtacgagtaaagaaaattctgagggtacttcatattactattatgataacaataataatatgattaaaaacggcttcctttcggaggccgttttcttatgccgattctgttgtgaaaattgcacaaatgcagggttggaattttgtgcagtaaatcaagttaaataaaagctgaaatgtgatagaatatattttgtaagaatataatcatcccgtcagaattccggaattattaacgggctataaaaaaggaggatttttaatgaaaaaactattatcaatcattttaacactaactatgcttttcagcgtagcaactgttcttgccgttcctactacagtgagtgcggcttcaaaaacaggaaaaaaatatgttaaatataaaaaaataaataaaaatctaaaaaaagaaggaacattaatatttaagagtaaagctaaatatccacagttaaaatcaaagtccaaagccgcgaaaaaggttaataactatataaaaaaggaagtaaaaaaacatactgataatatagaaaaaatggcaaaatccgattattcaaataatggcctatcattttttaaaaacttatcttccttccaaactgtctgttattatgtatgtgaagtggacgtaaaatttgtatataacgcaaaaggtaagtatagttttaaaatgtctgaatatacttacgcgttaggtccgcacggagaaagaagtgtaaaaggatataatttcagcaaaaaaacaggcaaaaaaatatcaaattcgaaactgacaaagtacagcggcaaaaaactcaaacaaaaaatagtaagtgctgttaagaaaaaaataaacgcaaatccgcagaattattataacgatgcattgcagatagttaaaaacacaaaaattaacaagttcaatatttggcttaaaggcaaatacatatatgtgtatttcagtcaatacgagttatctgtatatgccgtagggcctacccagataaaaattaaataaggaggattttttatgaaaaaactattatcaatcattttaacactaactatgcttttcagcgtaacaactgttcttgcaactcccgcaaccgcgagcgctaaaagcaatgttacacgcagtatgtctaaaaacaaaaacttcaaaaagctggttaaaaggatttctacttattgtataggtgaatctttcgggaaaaaaggaacaacaaccataaaaaataataacaaaacaagattatctatcgccgcgtttgtgcgctatcatattgacagagattttgactacacaaaagctgaacttaaaaagactgttaaagacttgtttggaaaaaatgttaagaaaattcaatgctctggcttcctgatgaaaagcacgacgggttatgcttatgcgggcggcgatttcggaacaatggtgcctaagtataaaataagcaaggttgtaaaaagcaaaaagaaatatactgccacaattatcggcaagatatatgagaatattgagaagaaaacaactaagcagtgtaagattactttaaccgttaaaaaaagttccaaatccaaatttaaatttgcggcaacaaaaatcaagtataaaaactattaataaacttaattatatctttacaaaaacggctgactcgttttgagtcagccgtttattcagccttccatctgtttacctaaaaactcggcggcgctctgggcgagtttgagttcggtttcagaggggtttcggttgttttcgcttttgagcaaaactaccgctccggcgatgtcgcccgccgcgataatcggataaataaccgcggctctgtgctccagcccttcaacgggctgaacgtcggaaatatcattcgcgctcgcctgatagcttttcctgttctccatatagttttcgagcgcgcttgtgattctgcgttccaggaattcgcgcctggaaactcccgatgccgctataacgtggtcgcggtcgcagataatcgtcggcagatttgtgattctcgacagcacatccgcgtactgcgaagcgaacgtcgacatctccccgataggcgaatacttcttaaaaataacctcgccgtcggtcgcggtgtaaatctcgagcgggtctccctcgcggattcgcagagttctgcggatttccttggggataaccactctcccgaggtcgtcaatccgccttacaattcctgttgccttcatatctaaaatctcccttatctatcaaattaattaaatcacttgcccctttatcttttgcaatttcaggcagaaaatacaatttgttgaatggaagattttgctttgctgaaagttttaattttttaaaaaaataaagtgattttctattgcaatttttttaatttgttgtataatataattaaattgtatcataccaagaacaattaggttactatgataaggtagtataccgcaaagctctaacaccctgctttttggcagggtgttatcttttattcttttttataaatatattgacattatttgagcaaatatatataatttaagataaacggaaatattttttatgcagtatttataatcgttaataatcagaggtgagattatgaaatatataatcggattggatatcggaatagcgtccatagggtatgctgtaatgcttttaaatgaaaaggatgaatttcataaaatactcaaaatgggttcaagaattttcgaagctgcggaacatccaaaggacggctcgtctttagctgcaccgaggcgtattaatcgcggaatgcgccgcagattaaggagaaaacgtttccgcaaggaacagataaaagagttaatagtaagaaaaggcattatgccgtacgaagaaattgataatatatataacagcagaaaagagctctcggatatttacgaaataagggctgacgctcttgataaaaaactcacaaaagaagaatttgtacgtttgcttatacatctttcccagcgccgaggctttaaatccaacagaaaagttgacgctgcggattcaaaatccgaggcgggtaaacttttaaatgcggtaaaatcaaacaaggcgttaatggatgagaaaggttaccgtacaattggagaaatgctgtacaaagatgaacatttttccaagaataaacgaaacaaagccgacgattattcaaacacttttgcgcgctcggagtacgaggctgaaataaatacaatctttgactgccaaaaaactttcggcaatcagtacgcaagtgatgaattaaaagaagaatatcttaaaatctacctctctcagcgttcgtttgacgaaggcccgggcggcgacagtccttacggcggaaatcagattgaaaaaatgctcggtaaatgcacattagagcccgaggagttccgcgccgtaaaagcttcttattcattcgagtattttacgttgctctcgaaagttaacagcattaaattaaaaacacccgacgaaaaacgcttccttacaaaatcggagcgtgaagcggttgttgctttagcgtttaataaaaagtcaatcacctacgcttccgtacgaaaagagcttaaaattccggagaatacatattttaatatttcctacggtaacggagaaaaaacacccgaagatatagaaaagaaaaccaagttaacatatcttaacgcctaccatacttttaaaaaagcttacggtgatgtatatacaaaatggagtacggagaagaagaattatttaggttacgctatcgccgtatttaagaatgataaaaagattatagaatatcttaccgagcacaatttcgataaatcggaaattgaaatagcgttaactttaccttcaataagcaaaacgggaaatctctcgattaaagctatggataagattattccgtatttggaagaaggtatgctttataacgaagcctgcgaggccgcgggttataattttaaagcggatgaaaccgataagcgtatgtatcttcctgccaacgaaaaagacgctcctgaacttgaggatatacgcaaccccgtagtacgtcgtacagtttcgcagacaataaaagttattaacgcaataatccgcgaatacggcgaaagcccctgttttgtaaatgtcgagcttgcaagggaactgtctaaagatagaaaagaaagaaatgaaattgaaaaacgacagttagataataaaaagcgtaatgacgaggttgttgaggaattaaagtcaacattcggacttattcagccgacaggtcaggatattgtgaagtacaagctctggaaagagcaggacggaatctgtccttattccttaaaacctatttctatagaaaagctttttgacgtcggttatacggacgtggaccatattatcccttattcaataagtttcgacgatacatataacaataaagtccttgttctttcgtctgaaaacagacagaaaggcaaccgccttcctatgcagtatttaagcggaaagaagaaagacgagttctatctttgggttgacagctcaaatctcagaaaccgtaaaaagaaaaatcttcttaaagaagagatttccgaggatgatatttcaggttttaagaaaaggaatttacaggatacacagtatatttcccgatttatgcttaattaccttaaaaaatatcttgcgctgcaacctaacgccgcgaaaagcaaacatactataaaagcggttaacggcgccgctacggcgtatatccgaaagcgctggggaattaataaaatccgcgaggacggcgatacccaccacgcggttgacgctgttgtaatcgcctgcgctaccgattcgatgatacaaactatttcaaagtattcaaaataccgtgaagaaagattcgtgcatcccgaaatcggaaaagaaattgattttgaaacaggcgaaataatcgacaaattcccgatgccgtataaatggttcagggatgagcttttgatgcgcacttctaacaatccgtcaagaatactccacgaaaagcccctgccgaattacggaattgacgaagaagttgagccgattttcgtatcccgtatgcctaaccataaggtaaagggcgcggctcatatggaaactatccgtaaaaagtacgaagaggacggtaagagttactcggtagcaaaagttccgctttcgtcgcttaagcttaaaaacggagaaatcgagggttactttaatcccgcgagcgatatgcttctttataacgccttaaaagaacgcctcgctgagttcggcggcgacggtaagaaagctttcgcggattccgaagaacctttctataagcctaagagcgacggaacccccggcccgattgtaaagaaagtaaaaattataaataaatccacgctttccgttcccgtacttaaaggtaccgctatagccgataacggctcaatggtaagggttgatgtcttttatgttgagggcgagggttattatttagttccgatttacgtttcggatacggtaaaacccgagttgccgaataaggcgataatcgcatataaatcttatgaagattggaaagaaatgaaagaggaagattttgtcttttctctttatccaaatgatttaatacatataaagtttaagaaagagatgaaactatcacttacacagaaagaaagcactctttccaagaatctcttactaaaagaaggatatttttattataaacaaactggtatttccgtagcgtcaattaaaatcattaatcacgataacacatataaagttgacaatctgggagtaaaaactattccgattatagaaaagtatcaggttgatgttttaggaaatataagaaaagcgggaaaagaaaaacgtatgaggtttaagtaatgggttatcgtgttcttttcttagctaatcccgtaaagcttagtgtaaaaaacgaacagcttttaattgataacggagaggttacaaaaatcccgctcgaggatattgagtgcgttgtcgcggatacgcttcaacttaatttcaattcttatcttttatctaaattttccgaatacaatacgagcttttttattaccgataggtcccaccgcccctgcggagtatttcttccgctttccgcgaagcacagccgccacacctcggttttaaaaagccagatagagatgacgctgccgacgaagaaaaaactctggaaacagattattgtccgaaagattgaaaaccaggcggcggtactaaaacttcggggaaatgaaggctggaaagaaattgataaccttaaattaaaggtaaaatcgggcgacagcgaaaatatggaggccgtagccgcatctaagtattttaagctccttttcggaaagaattttacccgcgcgggtgaatgcggtaccaacgccgcgcttaactacggctacgctatattacgcggaacaattgaaaaataccttatggcgtatggttacgaaccgtcgctcggacttttccacaaaagctccttaaacagttttaaccttgccgacgatttaatcgagccgtaccgtccgattgtcgacttattcgccgccgagtttattgacgacgaagaaagcttatcgaccgcgaaaaaagcgggactcgtaaaccttcttaataatgacgtagtaatcgacgaaaagtttttcgcctgcgcgcgggctattgaaaaaaccgtaagcagccttacgggttttatacaaagcagccgcaatgatttactgcttcctgaaataattgatttagaacagcacagctatgaataaatttatgagaatgatagttttctttgatttacccgtaaaaacaaaaactcagcggaaagtcgcgacgaggtttcgcaacttcctgctgaaagacggtttctttatggttcagttttcggtttattgcagggtttgcaacggttacgacgatgttgaaaaacataaatcccgaataaaaaacaaccgtcccgataacggttcggtaaggcttcttataataaccgaaaagcaatacgaaaaaatggagctgattataggaaaccttgtaaaagaagaggagcacgcggtttttgaacagctttcaattttttaaaaacccgagtaatactccttaattttaaaatattcacaaagatttttaacgacaaaaatcccgacaggctactgcctatcggggttttcgcgtccctattataccataccaagaaaaattagggaactacaactttctgtttatcaacattttcgtgccctcgattataccataccaagaaaaattagggaactacaactgagcattaatttcgaagtgcattattccgattataccataccaagaaaaattagggaactacaacatagcatcggcgataaatgtatcaaccacaattataccataccaagaaaaattagggaactacaactttctgctcaaccttgcaatcgcttatccaattataccataccaagaaaaattagggaactacaacactttcctcaaaaatttttaattcatcttgattataccataccaagaaaaattagggaactacaacatattcccttatatatagtatattatgttcattataccataccaagaaaaattagggaactacaaccctgaatatcttgtacaaccgttggcaattattataccataccaagaaaaattagggaactacaactcaacttctgttaacggctgattttgacttattataccataccaagaaaaattagggaactacaacctctctccgagctttattgttttagtcattattataccataccaagaaaaattagggaactacaactgtgcctgccttttcgttgaggtaggctatattataccataccaagaaaaattagggaactacaacctctgatttcggtgccctttgccgagataaattataccataccaagaaaaattagggaactacaacaatatagttcgtgttttaggtttcttcattattataccataccaagaaaaattagggaactacaactctaagacctcaactactgaaaacgcttgcattataccataccaagaaaaattagggaactacaacccgtcatcgtcaataattcccgcgacttttattataccataccaagaaaaattagggaactacaactttaactgcggtttaacctgtaacagcctaattataccataccaagaaaaattagggaactacaacttaatagcaagagctgaaaaacttataggaattataccataccaagaaaaattagggaactacaacgttacgcacatcctgactgttaaacctcgcattataccataccaagaaaaattagggaactacaactgaaaccgtcggacagctaaggggaaaactattataccataccaagaaaaattagggaactacaacactgtcggatttggcacaaatttaccgttaattataccataccaagaaaaattagggaactacaacttatccggctgcgcccataatcgcgtaaatattataccataccaagaaaaattagggaactacaacttatcactcggacacgattctgattctaaattataccataccaagaaaaattagggaactacaacatagcgccggatgttaagccaatcactccgattataccataccaagaaaaattagggaactacaaccgctgttgtgcttatagctttatgcgaagtattataccataccaagaaaaattagggaattttcttttccccctgatttattctaattataccaaatttgaatcattaagtaaagattataaattaatgttttcggaaataatgacaaaaatttcagcgatactatttcattattgtagttaatatgttataataacttagttataaattttgatttttcggagattggtatgcagtatatttcattcaacgtaccgccttatacgggcggcgaggaaaattatataaaacaggcgatacaggcgaaaaaaatcagcggcggcggcgaatttacgaagaagtgcgccgaccggcttgagaagatgacaggttgtgagaatgtgcttattacaacttcgggtacagccgcgctcgagatgtctgcaatcttagcggagataaaacccggcgacgaggttattatgccgtcttatacctttgtatcaaccgctaacgctttcgcgctgagaggagcgaaaattgtttttgtcgatatacgccccgatactatgaatattgacgagaagctgattgaaaacgccgttaccgaaaaaacaaaggcgattgttcccgtgcattacggcggagttgcctgcgagatggacgttatccgcgatatcgcgaaacggaagaatatctgcgtaattgaggacgcggctcagggcgttaacgctttttataaaggaaaagccctcggctcaatcggagatttcggatgtttcagcttccacgaaaccaagaactacagcagcggagagggcggagctgttcttataaacaacgaaaaggatgttgagcgcgccgagattattattgaaaaaggtaccaaccgctcaaagttcttccgcggtcaggtcgataagtacacctgggtggatataggttcttcgtatctccaaagcgagattaactgcgcttatctttacgcccagattgaaaaccccgaaattataaacaacgaccgtatgcgttcgtggaatctctataatgagcttttgaaaccgcttgcggataaaggtgtaattgagttgccgtatattcccgaagaatgtacgcacaacgcccatatatattatattaagactaaagatttagccgagcgcacaaagctgattgaacatatgaaagcgaataatattttagcggtattccattatattccgcttcacagttcgcccgcaggtaaaaagttcggaagatttttcggcgaagataaatatacaacaaaagagagcgaaagattactgagacttccgatgtattacggtcttaaggaaaatgagataaagtacatagttaaaatgatttacagattttttgatttatgataaagaaaaaatactccgcaattttattcgatgttgacggcacgctgcttgatacatcggagggaataattaaaagcgttgaatacacagtagataatcttaacttaaggccgttaagcgaagaagaaaagaagtcgtttatcggtcctaagatttttgactcattaaagaatgtttatcccgaattgagcgaatccgaagtaaaagacgccgcgaagattttcagggacagatacagtacggttgatttgctgaaagcaaagccgtatgacggtgtaacggagcttttaaaaaagctgaagaaaaataactatttagtcggaatcgctacttataaaagagaggattacgctcttgaaatagtaaagtatttcggaatagccgattactgcgattgtattgagggctcggattttgacggcaagcttactaagcaggatattattaataaatgtattgataaacttaataccgataaatctaaaattcttatggtaggcgataccgataatgataaaatcggagccgaaaacgcgggcgtggattttttagctgtgacgttcggcttcggctataagcccggtaataaatcagattgctttacggcggattcgtgccgtgaaatagaaaaaatcatttttgagggttaaatgaaaaaattacttattttgaacggcagctttagcgaggctacgttaattgaaaaagcgaaagaactcgggtattacgttataacaagcggcaacaatccgtcgttaatgggacacgctttcgctgatgaatatatagagtgcgattattcggataaggagtctgtgcttgaattagtaaagaaaaataagattgaaaggattgtttcctgcgccaatgatttcggagttataacagcttcttatgtcgcggaaaaacttggcttgcccgggcatgatacatacaagaacacagtcctgcttcatcagaaagatttgtttaaagcttttattcagaagctgggtataagaaatcctgcttcaaccgcatttgataatatagaaaaagcatacggttatttacagagcgttgaatatcccgtaattgtaaaagcgaccgatttaacgggcggtaaagggatattaaaagcaaacaacaaaaacgaagcattattcgcgattgacaacgcatttgaaaaatcaagagttaagcatatagtaattgagccgtttgttgagggtgttcagcagtcgctggatacatttataataaataaaaaagttgccgcgtcggttagcaacgatgtattctgtccgataaatccctaccttattcagtccgagcttttacccgcgaacggaattgagaagtataaggatgagcttgtcggatttattgaaaagatttgtaaagagctcaatttagtggacggaatgttgactatacagtatatcgttaaagacggaaagccgtatattattgagcttatgcgcagagctttaggcaatcagttccttactgtcgcgggggctgttacgggctttccgtgggaagaagctttaatacgcgcggaaacaggtatggatttaagcggtttaaaatccgaaaagcctatgtcgaaatacgcgggacatcacggaattatggcaacacgaaacggcgttgtaaaaggttatacaatcgctcccgaacttaaaaaacatatctttaaaaagattgaaataataccgaacggcggcagaattaatgattatcttaacgagagaatagcatatatctattataaatacgacaattacgatgaggcttattctaccgtatcgcgtatcaatgatttgattaaaatagatttggaataaaagaaggtgagctttttgaatattcttgtaacaggctctaacggctttataggcgggcatatttgtaattacctgtcagctaaaggagaatacgttatcgggcttgatttgcacgatgatatgagaaagagctgtgacaaatacataaaatgcaacttagcttatgatgaccttaacagcgcattaggtgagaataaaattgattcggtagttcatctcgcttccgatatgcgccatgagccgtatgctgttgatgttgtaacgaacaattgccggggcgctgaaagactgttggaatattgtgagaagaaaaatatttcttcatttgtacagctttcgagtctgcccgtgatcggttatccgagagaagttccgattactgaggaacattcattaagaccgccgactgtctaccacgtaactaaacatacacaggaacttttggcgaattacgcttattatacatttggtttaagaactgtcagcttcaggatttgttctcccgtgggcgagggtgttaatcctaaaactattttcccgacatttgtaagaaaagcggtaaataacgaaaccatttctttgattggaaagggtacgagaaaacagacctacatccacgttaaggatatagctcaggcaatttataaagcgattaatacagatacagcacaaggtgtgtataacctggcgagctataatcttatttcaaattacgaactcgcgcaaaagtgtgtagagcttaccgcttcggattctgaaatagtatttctcgacaagcccgatccaatggacgaatatgtttgggatatttctatagaaaagataaaaaaagatttgggatacgaacccgaaatatcaatagatgaggcgattgttgaattcgccgggatagtaaaaaatgaggaatagttatgaatagaaccgaaaggaaaatgctcgatatccttaaatgccttaaagaggattatgatatcgttgcggttaaagctgagtttgaagccgagggaagccgtacggacgagctcgttatgcttaacgaggtaatatttaaggcagaccttgatttgtatataaaaatcggcggctgcgaagcggtacgcgatttggaccagtgcaggcttttaggcgcgtcgggaataatggctccgatgattgaatctccgtttgccatgagtaaatttgtaaacgccgcaaaaaaggtatacggcagcgaatgggaagatattgagtggataatcaatgccgagaccgttacctgccataataatcttgacgatattctgagcacaggcaaaggctttctttcaaccgtttccataggacgagtagatttatcggcttcgatggggcttacccgcgcggaaataaacggcgaaaaggtgtttgaagcgacaaaagatatagcgaagcgcagcaaagactatggctatactgttaatttcggcggcggtatatcatttgatgcggtagattttattcgtaatctatatccgcttaatgatcgttttgaaacacgcaaagtggtgttccgatcgtctgataatacggaacacattaaatcaggattattaaaagctatggagtttgaaactctttacttaaagaataaatgtgagttttatgacagaatgtcaaaggaagatcagtcaaggcttgaaatgatggctgaaaggcttgaaatcgcaagctctgatttatcagtttaatttggaaacgagtgtatatgatgagtaagaaaatatcttttgtaattccctgctacggctctgaaaaatccatcacgggtgtagtaggtgagattgacaacttaatgcgaaaccacgatgattacgactatgaggtagttttggtcaatgactgttctcccgataatgtctgggaaaagatttccgggttaaccgaaaacagaaaagatataaaagctttatccttagcaaaaaacttcggtcagcattcggcgttaatggcgggttacggagtagccgacggcgatataattgtatcgcttgacgatgacggacagtcgccggttgatgaaacttttaagctgatagaaaaaatggatgaaggttttgacgtcgtttacgcgcgctattataagcttaaagaaacctttgtgagaagagtcggaagctggcttagcaacaagatggctgaggtgttaatcgaaaaaccgaaagggatacttggcagcagtttttacgtgatgaaaagatttatcgctgaagaaatgctgaaatacaggaattcctacccctttgttggagggcttgttttccgttcgacaaagtcaattgccaatgtttatgttgagcaccgcgaccgcgttgacggcacctcgggatatacattttttaagcttctcaaattatggctaaacggctttacggcattttcggtcaagccgttgagagtatcgtcgcttatcggcgttttatgcgcgattatcggttttatattcggaattgtatcggtaataagaaagcttattatacccgatattaacgtcggctggacttcgacaatctcggttatgctgtttataggcggacttataatgcttatgctcggaatgataggcgagtatataggaagaatatatataagtcttaataacgctccgcagtacgtaatcagagatacaattaatattgatgaggacgaagatgatagaaacagctgataaaaaatcaaggattaaatatttagtcgctttacattttgagctgctgattttatcgctgagcggagtatgttccaagttagcggcgcaaaatgagtttttctcgtctatgtggctgttctggtacgcgctggtgcttcttaaccttgcgttttacgctatagtatggcagcagattataaaacaccttccgcttactacctcttacgccaataaggcgatttgcattgtttggggaatactgtgggggatagttttcttcggcgagcagattaagtggaatatgattgtcggcgcggtaattgtaatcgcgggcgtaataatggtggtgaagtcggatgaatgagaagatccttttttcgctgatattcgtcgcgggcgtttttatctcgtcaatttcgcagataatcctaaaaaaatccgccgaaaaatcttacccgaataaaatccgcgagtaccttaatttcagggtgattttcgcgtacataattttcttcgccgcgacgctttgctcaattttagcgtacacaaaaatcccgctttccttaggtccgatacttgagtcgagcggttacttcttcgtagctgtactcagctatctgtttttgaaagaaaaaatatccgtaaaaaagatgttcggccttgcggtaattataataggaattataatttacgctgtttagttaccgtatcttcataagctcgttaatatcataacttgattttcgtttttttgaattattataattattattatatttattattataattattattatatgtagacattttgtctttagagtaagacattttgtcttgggggtcggacaaattgtctgaccttttacttattttgtcagggatatccggagataaaatattatcgttaatcagtttttcgaaatcaataattatttcacgatgatagttttcttttactttgtaatgtatgtagccgaaatctgaaagcgtgcggattgaacgggataccgttcgttcgctgaaaccgagcctttcggataagaacacatttgaggcacagcattttccgttgagtttagacaggctgattaattgagctaataccgttttttccgtgattttcagttctttgttaaacagaattgagtagggcagtattaaataaccgttttttaccataaaaaacctccttttacctatatatacaaaaaaggagaaaattgcatatttttatgcaattttatttaattttcttcgtcaggcgtggaagttcctatcgtgtatgtgatgtccccgaacgataatttcctgtcaggttttggaggcttggggaacgttctt

SEQ ID NO: 982 - DNA, 23261 bp, synthetic construct
  source 1..23261: mol_type = other DNA
  misc_feature 1..23261: note = Synthetic
aatgaaaaagatattgtgatgcatatacaaggaaattcgcctaatattaagccattcccatatgtttatatacaaaagtacaatataccatatttgaatgaggaatatgttgcaaatgttcattgtaatggcagacaacaactgttaacaataggacgtgccaaaattttaaaatatacatacttttggcaagaacgattagataatataactgactgtcaaaaagcagatgtggtggatttaaagggtaataattttgttgaaggaactcatgaagctttacctattaataagttattaaatattacaattccatatgatggtcatattaatattaaaaggaatggcatattggttgaaagacgaaatttatatgcagatactcaatctgaaatatttgatatttcttggaatactgaaattgaggtgtatgtaggtttagataaagtatggcaagcatccttttttaagagaaaagatcatgataatacttttgatgaaaatattatgctgaaaaagttagaatcatattatggagaacaaattgaattaccacatactattggttctttagtaaaaaaacttaataaatatactgctatccaaagatggatatataagtgtattagaaatggacatatgagtagaaaagcttatcgtactctagtaaagtggtcaacaagtgggaaaatataaataaattgagagaggatatgactatgaattacatttcaaaattaaatgatacagaaaagaaaaatttttgtaatattatttctggcgatgcttttaaggattattttaagaaaaatcaaaaagaatataataaaataaaaagttggtatcgtgcagaaaaaatacctaagaacaaggctgtgtcactagcaatagagaatattaataaatcttttattagtgactttatggataattttgcaaatttatttttaacagatattaaaaaacaactaaaagaagaagaaataaatgttcttgcaaaaattttgagagactcaccgtttaaggataatattgcattgtattttaaattgaatggtgacgatgtagataatttgtatttggaaaaaatacagaatactatgtcaaatataacaaataaaaatgatgaaaatgtacaaacaattaatgaaaattcaaaaattgaaattgagaacttaaaaaaacagttagaaaatataaagaaaaattacttgaatcagaaaagaaatataaaattgattttcaagactgtcagaagaagcaagatgaattggaaaagtcattgtctaatatgaaagaaagattacataaagcacttgatgaaaaatcacaattgcaagtaaatcttgaacaatttaacaagctgagaaaatttgatgatacaggcaattttactgatactatttcaagtttgacagatgattatgtttcgatatgtcaagttattgctcctgagttaatcggaaaagttaaatataaagcactacgtttagctgatatagatagagaaggtaacttaatttcttttcagcaaagtaatgatgaacccccttattttgaaaaccgtaaaataatattcatcaacgatggacctaaagataaagtggggaaacttgcaacttggagttggactgctaaaccaaataataatgattattctaaagattatgttgaatctaagattaatggtcgtattgagccggtagagatagttacgttttatgcatgtaaaagtaaagatgaaattattaataaattaaagaccggaattagtttagatattactacttctagaataatggttgcttttcttgaagataaaagcaattattggggacttttgtgtagaaatgatgattttgaaaaaactaacaatgaattatttatgttgaaaaataatactattcaattgccttgttatgaattttctaagaatgatattgtatgtttatctaataataaaaagtatcttaaaactgtaaatattggaattccttctatgattgtcaatgtaaagggttctacggaggtaattaatgatattttacttgaaagaagttcatggcgagaatttaaaaaattaggaaaacaaaaaagtgattggaaattagtacgcgattttctaacaaatgtggatttgaaatcggtgacagaggaagttgaagaaaaattaaattgtagttctgtagaagcacagaaaatgcttgaggattatcttgaaaatattaattgctacattgacggaaatacaattgaggatcaagttatattgtcagcattatattccaatgaggaattaatgaagagatgcaagtctttaattatggttgattggaaagcagaaaataagaatcttatagataaacgcgaagatttacaaaacgaaatagaaaagaaaagaaaaactgcaaaaaacgaattagagaaactgcagaatcgagaaattgagttggcagaaaagctagaagctcttaataaagatattgaggataaaaaggaatttgctaataatgttgatgctgcggtgaatgataagattaaacaagctcagcaaaatgcagcaaattttgtagctaattttgcttttttaccaaaagctacaacagttaatcctggaaaaaattcttatacagaattaattgatgaaagttgtaattattataaaggcaaacctttagattcaaatgatatagaaattaacgatactatagaaaatgtgctagatacaattaagtgtgggttgttggatgctggtgtaattgagaagtattgtcatccacttgcgacgtatatgtatattgcatatcttgataattgtccattgttgttaattggacctaatgcaactgctattgtcgatgctttttcaggagctatatttggaaaaaaagccggaattttagaatgtaatggaaagtataattctaaaattgttgaattgtgtaatagtagtgatgataatattattagagttgttaacccatttaatggtaattggatttcaaggttaccggatattatttctaatgataacaaattttttatttcagtctatccttattctgaggatatgcagatagaaccagcaagtttatttaactatatgttgccagttcttacggaaccacttattgaaaatccaccaacaggtgaagtaataagaggagttttttcagatgatcatgaagaatataaattagttgggccatcaagaacatatgagaaaattctaaagaagtttcacgcaccattattaataagaaatagaatcaaaacattgattactaacatgcatgaattattgggaaatgatgctgttgattatgatgttttgtttgcattattaccatatgcctttacaactatgcaaatgcctattttgttggatatgattcaaaatacaacagatcgacatattacaatttcaaaagaattagaggatattataaatactttgtttggagaagacgatgaataagtatcaaaatttgttaagtcgtatttctaaggaattttcaatttataaaggtgataatgaagaaattaataaatggaagtctagaataatttatagtcttttaggaagaatggcactagcttcattatttgacacagactatggcacggaagaggaagaagattcttcaattacccatatgaaaagacgaataaacaaagtatttgctagttatcaagatatgtatccggaattaaaaactttgttgccgatggattctactgaattagcagaagaagtgtatgatatttttttaaatactggtgtgatttatcataggcccaatagagttgttatgtcatcaaaatcagattcaattgttaatgaaataaaatttacaagaggatatgaactagatagtaaacagaaaattagtggccttggtacctatgaacaatttccaggacaagaaaataaagatcaatttattaatatgtttcaacttgaaaatattatgttatcccagttatgggatatatatacaaaaaaagcaaaatgggataccatagatataaatgcggatattgaatatttgcgtacaaaaccaccatataataaaggttattggactaataatattgataaaacaggtgagatatcaatattgaaaattaagacaaaaggaacttatttgtattatctttataaatatgaaaataagttatatgctagtgagttacctcaatggttagttgaaaataataacaaaagactattgacaaatgcttgcctacggaaaagagatgtattaccaccaactaaatataaaattgacggagatttagtgtatattgaatttcaatatttaccacctcagtcagtactatatttatggaaattgtatagttggcctcgacttatgaaaaaattgccatatgattttaaaagaatatgtgatagaaaggtatttgaatcaattaaaactgtaatgatacagttaggatataaatttattgaggaatgataagatgtcaaatggtgcgaattatgtacacaaacagttgtgtaaagaactagaaaattatataaaatctcagtattttggaaagacacctttattgctttcagctgtaactgaaaaaataaataaagaaggcgttttatatcaaaaaccatatattgaatcatcaccagcctataaaagtaagaaaaatggcatacagttttctaatatacctgattggttgaaaaaatattttgatagattatcagaagctaaattgggcgtgtatcctacaccttttttacaccaactatcagcgttagaagcgtcaattaaaggtgatgacctatttgttgccacaggtactggttcaggtaaaacagaatgctttatgtggcccttaatggcaaaattagtaacagaggcaaaagaaactccaagcagttggagtaatcgcggaataagatctattattatgtatccgatgaatgcgcttgtttctgatcaggtaagtcgtttacgtagattaataggtgatcccgaaaataaatttgtaaaaatttttcgtgatacttgtttgtatcattctagaagacctcaatttggaatgtatacaggtcgtacaccttatccaggaattgaatcggagcaaaatcaggatcgacttttagaaaaaaatttagcaagaatgtcttttccaaaaacagaatcagaagaacgatttttaaaacaattattgaatgagggaagaataccggcaaagtatgatatgaaaggtttcctcaaaggattacataatggtaatcatattccaaatgaggaagatgcagagttaattaccaggtttgaaatgcaacaattttgtccagatattctaattacaaattattcaatgttggaatatatgcttttacgacctagagaagaaaaaatttggaaagatacaaaaaaatggttaaattgtagtgaggataataaattattatttgttattgatgaagcacatatgtatagaggttcatccggcggtgaggtatcacttctattaagaagacttttctataaacttggaattactcgtagtaaagtccagtttattttaaccactgccagtatgcctgatagggatgaagaagatagaaatgctattatgaaatttgccaatgaacttacggcaagtgattcgaataaggaattttgttatttaactggcgaaagagaggatatttccggacttgcaaaatataatataccatttgaaaaatttaaaaattgtaatccatctgattttgaagataaagaagacattcaatttgttgcgttaaagaaattttggaatggtataagtaatgagacttttagtaatttacagcaagtatatgattggatgtataatcatttgattgaatataaacaatttcataaattatttaataagtgccgtggaaatgcagtatcattaaacgagttatctaatgaaatttttccggaaacatgcaggacagaaggtctaaaagcagtgagtgtgctattggctattgcaccattggcaaaaaattatgaaggaacaatattgtttccagcacgtatgcatatgtttttcagaggtatcaatggagtgtatgcttgtgtaaatccaaattgtgataattcccatagtgatgaaacacttactttaggtgaaatttatttatctgatggtaactttatatgccctaaatgcaaaagtgttgtatatgaactttataatgatcgtcgttgtggtgccttgttttataaaggttttattttaaaagaaaataatgaaattagtaatagtacgtatttatggcattatccgggtcagttactggatagacgagtgaaagaaattcatttatttattccaacagatgattttgaattaagtaaaggtcgtaaaaagtatccaataaaagcttgttatctagatattaaaagtggatttattaattttaaagatgactctcaatctaataattcaaattatagaaaattgtattattgcgattattctgccaaaggtcgtcctcaagttattacctttccaacttgtccgcattgtaggcaccaattgtcttcatcgcaattaacatcttttagtacaagaggtaatcaatccttctttaacttaattaaatcacagtttcaagtgcaacctgctgttccaggtaaagataacgatccagaccgattacctaatgagggaagaaaagttttaatattttctgatagtagacaaagagctgcaaaacttgcgcgtgatatgtctgaagcttcagatattatggctgtacatcaattatttgcattagcaattaatatgatggaaaaatctaataaagagtattctatggaatatttatatgattatttttgtattgttgcagcgcagaataaaataaagatatttaatgaacctgaaagggaatggtttatagaaaattgtgatagtgctcttaataaatataatagatcattaagaagaaaacgcgagtattcacctgaattgataatatctaatgcacctatacagatgcaaaagtatttattaagattatatgcgggtggttataatacactttatgattctgctataagttggattgaaccaacggatgaggcaatgttttattctcttgatgaacttgaggaaaatggtatcattgtaacggaaaatgaattcttggaactcttcaatgcttggatgataaatatttgcgattcaagtactgccttaggacagtcaatttctgatgatactagaagtgaggtaagatctagttatgacggatatggattgaaaaaagattggtcattttcaaaagcaatcgctagtgttatggattggaaaaatgattctgaagtgttaagtatatggaagaggacattaattaataactttttagatatgtctcaatttgatcatggaaaatactacgtatctttatcaaaaattaaaccgagatttgatttgaaacataaatggtataggtgtgagtgctgttcagaaataactccttatctattaaaaaagtgttgtccaagttgtggaactactaaaatccattatatggatgataatgaaattaagtctcttgaattttggagaaagcctatagatgatgcaattagtggtaaaaaaatttatgttattgatacagaggaacatactgcacaggtatctcataaggatcaaagagatgctatttggagtaaaactgaaaagtatgaactaagatttcaggatttacttcaaaataatgaaactcctgttgatattttaagtagtactacaacaatggaagttggaatagatattggttcattagtagcagttggccttagaaatattccaccattacgtgaaaattatcagcaaagagcaggtagagcaggtcgaaggggttcaagtttatctactattgttacattttgtgaggatggacctcatgacacattatattttaaagatcctgttccaatgcttaggggagatccaagaaaaccttggatagatactaaaagtaacaaattgattcaacgccatttggctatggttattttttgtgaatatcttagcaagaataataatagcttagatttcattagtgcagctgagtttcttgattatcacttgtttgaatttagtaattacttaaagaaatatgcgattagaagaaaacttataccaaataatattgaatttgattattcaaagttttgtcattggcttaataatgagttaattaaaatgaaaaatagaagagatgaacatcctgagttgtttggtgttgaaagctctaataatgagaacactaaatctttactagatgctttatacgaggaaggtattatacctacatattctttccccaaaaatgttgttagtacctatattacagatgaaaatggcagagtacgctatgaaataagtagaggccttgatgttgcgattggggaatatgcaccaggacgagcgattgttgttgataaacaaacttaccaaataggtggcttgtattttccaaatagcgataaaagaaaaggtttgactaagataccagctcgtgcatatgtggaggatccaaattatttgaaagaaattttatcttgcccaaaatgtgggtggtttggtttaaaagaagaaagcctaacattgtgtccgttttgcagtagcaaaagtataatatcaagtaaaccattattgagaccgtggggatttgccccaaaggatggaaaaagtatttcagaagcacaattaatagaacaatatacatcagttcaacaaccactatattcaactttacctaattcttctgatatgataagtgtctctaattgtgataatataagaatagcttcaaggactaatcaaagaattattatgatgaataaaggtgttcaggattgtgggtttatggtatgcaaagattgtggtgcttcaatgccaggtgatgatgagcgtgttttaaatagtatatatcgaccgtacaataataaatatgctggaaaaaaatgtaatcatttaaatactgtaaatgtaaacttaggatttgattttattactgatatgttagtgttagagttttttcttgatagtaactatattaatgtagatagaaatgaaaacctttggcttgaacgtgctggtcaatcattggctgaagcaatgaggttggcagctagcaaacatttagatgttgaatttactgaattggttactggatatcgaataagggaaaatagcaaaggctcttttattgatatatatttgtatgatagtctttcaagtggtgctggatatgcagatagtatagctaatgatattgaagaaattttaattgaagttgaagatttattgaaaaattgtgattgtagtagttcttgccacaattgtttaagaaactatagaaatcagtttgttcatggtttattggatagatttgcagcgttagaattattacaatggggtaaaaatggtacagtagcatcagcacttaattttgaaaaacaggttgatattattaaaccactatgtaatatattaagttcatttaattgtatccttgattttagcaataagaaaattacaattactaaagataaatttaaaaaaactttggtcgtttatcctgctatgtggtctgaaaagaataaagagaaaacaatatacttacgtgactcgtacattaaatattcaaagccatttgcagtgcaaaaaatattggatgaaattgcattataacaatgcgtgtaatgatacatttataaaaattatgtaaaatttgttatatttattgaaaaatttatgtatatgtgatatattatgagtggcattagaactttttaataaaaatacttgattttttgcaaaatatatgttaatataacattaaattatttcataccaagaataattaggttgctataataaggtagtaaaccgtaaagcgctgatgccctgttcatttgaatagggcattatcttttataatttgatatttgttaggaggttaattatgagttatggtttaggtattgattgtggaattgcttcagtaggtagtggaactgttcttttgaacgaaaaagaagaaccttacaaaatcgattttatgggtgtaagaacttttgataaagctgaaaccggtaccggaaaatcattagctgctgaaagaagaacatttagaggatctaggagaactcaccgaagaaagactcacagaaaagatagaatcaaaaaacttatttgtgatactatgaatgtagattttaagtacattcaatctatctatgaaagaaagaatttatcagatatttatgagattagatatgaagcattgaatagaaaattaacaaaagatgagtttattcgattattgattcatttatcacagagaagaggttttaagtctaacagaaagattgatgcaaaaaataaaaattctgatgatggcaagatgcttaaagaaattgaaaagaataagtcaatttttacagataacggttatcgtacgataggtgaaatgttatttaaaaatgaaaagtttattcaaagaaaaagaaataaatcagactattctatgactttcttaagagttgattatgaaaatgaaattaaagtgatatttaatcaacagagaaaattcaataatcaacatgcaacggaatcctttgaaaacgaatatctaaaaatctatttgtcacaaagaaattttgatgacggaccggatgaaagtagcccatacggtggaaatctaattggaaaaatggtgaagaattgtacatttgaacctactttaaaggcagccccaaaagcatcatattcgtttgagtattcaaacttgttaactaaggtcaatagtatgaaaattttatacaatggaaataggagaccgttaactaaggaagaaagagaaaaagttgttaatttagcttttaaaaagaataagataacctattcttctattagaacagaattaggtttatctaatgaagaatttttcaacatttcatataattcaaaagattatactgaaactgaaaagaaaacaaagtttagttacttaactgcttattatgaatttaaaaaagcatatggatcttcatatttagagtggagtgttgagaagaaaaatactttagcaacgatacttacacttcacaaaaacgactcaaaaattatcgaggaaatgaaagaaaagaatttcttggaagatgaaattaatgttgctcttacaataccatcatttacaaagtttggaaatctttctattgctgtcttaaataaaatgattccatatcttgaagatggaatgttgtacaatgaagctattactgcattgggttataactttaaagatgatgataagtgtcagcaaatgtatttaccatcaaatccaaaagatgctccagaacttgatgaaataagaaatcctgtagttagacgaacagtttctcaaactataaaggttattaattctattattagagaaaagggtgaaagtccaacatacatcaatattgaactagctagggaacttgcaaagagttataaggaaagaaaaaatattgagagtaatcaaaaatcaaatagggagaaaaatgagaaaagttttgaagaattaaaaaaattgggagttgttaaacctactgcttttgatttagtgaaatataaattgtggaaagaacaagatggaatatgtgtttattcacaaaaaccactaaaaatagaaaaactattttcagaaggttatgctgaggtggatcatattgttccttatagtatttcttttgatgattcttattcaaacaaagttcttgtgcataccaatgaaaatcaaaataaaggcaacagaatacctcttaattatttgagtggtaaagaaagagatgagtttatagtttgggtgaagaattctcatcttagctttagaaaaaagcagaatcttcttaaagaaaaaatttcggaagacgattttgatggatttaagaatagaaatttaaaggatacacaatatctttcaagatttcttttgaagtttattaagaaataccttaaatttgcaccaagttctactaacagaaaggaaacggtaatagcagtgaatggtgcaataacttcttacattcgtaaaagatggggtattgaaaaaatccgtgcaaatggtgatgctcatcatgctacggatgcaatagttattgcgtgcgttaccaagtcaatgataaagagaatctcagagtattctaaatataaggaaactctgtatatcaagaacaacaatgaaacattagatgttgataaaataactggtgaagtgaaaaattattttcctatgccatacaagtggtttagaacagagcttgatattagatgttctaaaaatccagagagacttttagcatctaatcctatacctacttatgcaagagacgaaaaggttaaaccaatcttcgtatcaagaatggttaatagaaaagtaactggaccggctcatcaagatacattaagaagaatggttgtagaaaatggtcaaaaatatgaagttgttaaaactgatttgaataaattaagtttagataacaataacgaaattgctaattattacaatcctgatgatgatagattattatatgatgcattaaagaatcatttaataaaatttaaagaaatgcataaggaagagaatggcaaaaagaaggtagaagatgcttttaccgaacctttctataagccaaaaagtgatggttctaagggtccacttgtaaagtcagtgaaaattatcaagaaaattacttcatcagttacattaaataataacactactatagctaaaaatggtgatatgataaggactgatgtgtttcgtacggaagacggatattatttagtgccaatttatgttgctgatacagtaaaaaatgaattgcctcataaagcgatagttcaaggtggagaatggaaagctatgaatgatgaagactttttattttctctgtacagaaatgatttaattaaaattaagtcaaacagtgatgtgacattttcattaatgaatgaaagtagcagtttgcctaaaacagaatccctacgagaggaatttgtgtattttaaaggaactagtattaatacagcttctataagggttgttactcatgacaattgttacatcaaaaaaagcttaggagtgaaaaaccttcagtctttagaaaaataccaagttgatgttttggggaatgtttcgaaagttaaaaaagaaaaacgaataggttttagatgatgggatatagggtaatttttcttacaaatccagcaagattatatgtaaaaaatcaacaacttgtaatagataatggtgatgtttttaaagttccattagaagatattgaatgcattgctattgattctatgcaaatatcaatgaattcatatttgttgtcaagactatctgaatatgctattactttgtatgtaactgacaaaacacatcacccttgtggaacttttcttccgctattgagacattcaaaacatctatcagtgctaaaaaatcagttagaaatgactttacctaataagaaaaagctatggaaacaaattgtttgtcaaaaaatagaaaatcaagcaactgttttaaaattgtgcggtatagatgagtggaaaagcatagatgttttgaaaaatatggttaagtctggtgatccggataatatggaggcagtagcagcttcaaaatattttaagttattgtttggtaaaaattatacccgaactcaagataactttataaacccaaaacttaactatggttattctattttgagaagtacaatatcaaagtatcttatagtatatggatatgaaccttcactaggtatttttcataagagtaatctaaatagctttaatctgtcagatgatatcattgagccatttagaccaatagtagatttgtatgtaaaaaaatttgctttgaaagatgaaatagatacacatacgaaggcttctctggtgaatctattaaattgtgatttaataatagacaataaattgtttgcttgtgcaaaagctattgaactaacaataaaaagtttatctagttggtataatgataagaataaatctttattattgccacagattattgatttggaacaacatacatatgaataaatttatgagaataattgtattttttgatttacctgtaaaaacaaaaagacagagaacggttgcaacaagatttagaaattttctactaaaagatggtttttttatggtgcagttttctgtgtatgcaagaatttgtaatggcgttgatgatgttgagaaacataaatcaagaattagagataatactccggaaaatggttctgtacgaatgttagtgataactgaaaaacagtatgaaagaatggaaattcttataggtgatcttgtaaatgaagaaaaacaacaagtatttgaacaactttctattttttgatttttcttgagtttctgattgtattactgttaaaaataataatttttgcgcaaagaaaactcccataaacttagtgtttatgggagtttctttagtccctattatatcataccaagaataattagggaactataacaggtttgctattgcagttttataagtgttaattatatcataccaagaataattagggaactataacccaggcctgaatgggtataggatggctcgaattatatcataccaagaataattagggaactataacccgtatcatctgaataatcagtaggtacttattatatcataccaagaataattagggaactataacaataaatacatagcaagtttttgtcaatgcattatatcataccaagaataattagggaactataactctttgcaattggagaagagaaagaaaactattatatcataccaagaataattagggaactataacggagaactttttttactttttaaattgtaaattatatcataccaagaataattagggaactataacctatgtcgattaattagatatactcatccaattatatcataccaagaataattagggaactataacttgagtgaagctaaccttgaatgggtttgcattatatcataccaagaataattagggaactataacacagaatcaaacattgctgtccatccctttattatatcataccaagaataattagggaactataacttgaatgagaacaaccttgaatgggtttgcattatatcataccaagaataattagggaactataaccgcttccgcataaagggcatttatacatatattatatcataccaagaataattagggaactataactgttaatgatagacgaggcaacgcagataaattatatcataccaagaataattagggaactataactactgaccgtatgacaagttagtaccgttaattatatcataccaagaataattagggaactataactgaattgtcttataatctatctggtgaactattatatcataccaagaataattagggaactataacattagaacaacgaaaaatgaaatttagcttattatatcataccaagaataattagggaactataactactcttgcagacatacattctctgacttaattatatcataccaagaataattagggaactataactttcaaaggttacaaagtcaatatccttgcattatatcataccaagaataattagggaactataacgatatatcatcagatattaatagtattgtaattatatcataccaagaataattagggaactataacttggtaaagcacacttctttatcgtcaatgattatatcataccaagaataattagggaactataacacaactgcaatttttaacgagctaacccaaattatatcataccaagaataattagggaactataacaggacaagttacttgtcttgtttttatattattatatcataccaagaataattagggaactataacaataaataattgtataaatcaagagattaaattatatcataccaagaataattagggaactataacgcacaaattgcactaaataacagagaaacaattatatcataccaagaataattagggaactataaccattttgttttagtgctcatagctacttatattatatcataccaagaataattagggaactataacagtttacaacacggaattagaagtaaaaagattatatcataccaagaataattagggaactataacccacacaatcgaagatatacagaaagcaaaattatatcataccaagaataattagggaactataacgtggaccgacttccttcaatgttgttaaggattatatcataccaagaataattagagaactataacataataacatcaatgctatttaacaatgttattatatcataccaataacaataaccaaagtccccaatatgggacttatctattataaaacactataatttttctttttctattgtgtttctaaaaataagtatgatataatgcataatatacagaaacaaataataataactaattattttatataaatttaattatttaaggaggatattatggattatcaagaaattatgagagatattgcaagtggtttaaccggtgaaaatgaaaaagatatacagtacttaatggaacaaatggaaaagtacaaagaccatgaacttggaaaagagattatcagggcttgtggtaggctgataagtggaatgttgcctgaagaaaaggtcaatgaattagctaatgcttttgaaaaagataatgcagaaatcgaaaatgaacttgatgatttgttttctactctacaatcaggtgattataatttagcacttggaaaagtagaaaaattagtggaaaaggctgaagaattaatttctgccggtatgtatcagaatgattcagtcagcgattatttttgtttcattaaccctatgcaagaattactttatggttatagacacagagatagcaagaaagatattagactatctaattttccgtttgctacaatatatttcttctatggaaatatattgtttgaactgggtcgttatacagaagcaaatgttgcccttgaaaaagcaaaaagatggaatcctatggatgccgatattgcctttgaatatgcagaaacatacaaggctatgggtgatattgaaacattcttggattacacaattgaaattttcaattttgcttataaatctgaggatttagcccgttgttatagaaatcttggttattactttatagaaaagaaaatgtggcaagaggctattgcttgtgaagattatagtttgaattttgattctaatactgatgcagcttatggtgagttgttttatattgaacaaaccacacatttggaaataaaacctgcacctattgaaacaatgaagaagtttagtaggaaatatggctttccattagagcctaatgaggatgttgtaggattagctatagcttatggcgagaatagtgcagaaaatggcaatgatgaatttgcaaaatattttcttaatattgcctatgacttaacccactttgatgaagtgaaacaactacttgatgaattagaaaggaaagatatagaaagtaaaacagaaactttagcagatgttttatgtagttcaaaaaattttataatcccggcatatcaaagaccttatgaatggggagagaaagaaattaatgaacttactaatactatttatgcaaagttttgtgattatttagagaatgaagaaaatgttcaattcttaatgtttggtattttacaatttggaaaaattgaaaatcattctcttagcattattgatggtcaccaaagaataactaccttttacatattgaaaagtatattagcagaaaggttaggtgaagagaataatttgcctaaggtgatgaatcaaatcaataatgctgatatagttaaagctatcaatgataaatctacaaattatgggaaaaataaagaacttttagataagtttgtgtccggtattgaaaagaaaaatttagagagttttcaagattttataaataaaaaaattctctttgtttcaatttttgtaagtgaaactgcatctatttctacattattagaaattttcgattctatcaacacaacaggtctaaagctagatgttaaggatattttcaagataaaattttgtgattatatttgcaaaaatagcagtgataaaaatagtaccctaaaaaagattaatgatgcttatcaacaagttaattctttggaagaaaattattctgttaatgaaaatgtattgcttgatacatttaggttttatctaatttcaaaaaccaataaaagcggtgattgccttagaatgagcaacaataaattcttttttgatgaaaaaggatttttcaattcaccattacctgatgaacttgttaatgtggatttgctgaaagtttttgaggatatttctgcttgtattcttgaaacacaaaattatcttatgaataccagagataaaaatagtggtaatttaattaatggttgttcaagagaattactaggaataagtggttatggcaacttaaaaaatatgtatttttatcttgtatttattcagtgtataaatggtaaaaagatagataatacagtaattgataatacagtaatcgataatgcagaacagttgacaaaattactatggcaatactgttcattatacagtgcctcatattcaagaattgtctatcgtgtatttacaaatattaaggagatttattttagtgaaaacaataacccttataacaatattgaagaagtaaaagatgatttgattaaaactttagaaaaagaaaattttgattttgtcggttttaagaatgtacttgataaatcggtatttgataatcgtacaaaaaatctgtttctttcacttagttacattgatgattgtaaaagtactaacgaaactatttataatgtgaaaaatacaattttctattcttcaaatcaagaacctaaaaaagcacttgatattgaacatatactttcacattcattgtatagtgataatgagtatgtggatagtttaggaaacttaatgttccttgaaagaactataaatagacaattaggtgctaaaactaaaaatttaaatgaggtcaataaacagaaagatatagaaactaaattagaattttataagaaaagcaccttgcaatctgttgagaattttcttaacaattatgataaaagccataacatagaaaattacatagcagatagaaatatcgctaaaacagaattcctaaaaaatctatatggtgaattctatgaagtaatagataaaaagtcgtaaatcaaaatacagtaatgctaaataaaaaatggcctgtgagttttacccacaggtcatttttatagttcaagatattcaatacaattttctttggcaaatttatttccataggaatttttaggagcaaggatagttaaattttcactgcaaccggcaaatgcttttttactgatatacttaacattttcagagatagaaacactttcaaggcttttgcaatttataaatgcgtattcactgattttttcaacactgtttgggataatgatagattttatattgctacaacctataaatgcgaaactttcaattaccattataccattaggaatagcaatggttttaaggtgtttacatctgtcaaaggcgtagggactaatatattttactgacttaggaattatggcattttcacttttacctctgtattttattagatatttattgcttgaaataacaaagtcatcattgttgtctctgtaccattttgtattatcaaaagcatcatgaccaataaaagtaacactgtcagggataactatattatcaagattagtacaaaatctaaaagcagaaaaacctattattttaacagtatcaggaatggtaatgtgctgaaggttagggcaattataaaatgcacaacattctatttcttctgttccatagggtatatcaatgctgacaatatcatacctgtcaagatactgaaaagactttatctttttaatattattttccatattacaaatcctccttgtgtgttggctatattatacaaaatcctatgttccttttttatcacatataatattgtcaatttgatagtgtaatgataaaatatttatatatgaggtgattttatgcagaattatcagaaagactcagaatacaaacctaagaaacttcttattttgaatatcctagaaattctaagaaaatatactgatgaaaaccatagactaggtcaaaaagaaataatagatattctcaaaaaagagtataatatgtcagtagacagaaaagctattaagcgtaatattatggatttgatagatgccggttatgatattgaatataccgaaacagtaagaatgacacctaacaaaaagacaggtgaaatggaagaaagttatgtttggtctgatttttattatgcaaatgaattttctaacagtgaattaaggatgctgattgatagtctggttttttcaagacatataccttattctcagagaaaagagcttgttgaaaagttagagaaactttccagtgtgtattttaagcctagcataaagcacattgtaaccgctactgattataaccttgataacaaagaacttttttataccatagacattcttgatgaggcgattactgcgaaaaagaaagtgtctttcaattattatgaatatggtacagacaagaaacttcattgtagaaaaacttctgacggtactgttagagaatacaaaatcaacccatatcaaatggttgcaaaagagggaaagtattacctaatctgtaataacgataagtacatggatgtgtcaaattatagagtagacagaatagcaaatataaaaattcttgatgaagatgtaaagccatttaagagcttaagaggtgctaacggacaaccactggatttgcagaaatatatggatgagcatgtttatatgtatgccagcgatacaataaaagcaaagtttagggtaagtaaagcattgttaagtgatgttgttgatatgtttgaaaagaacttgaaattttctgatgaaagttctgcttatgtaactgtaactgcaaatgtaaatgaaatttctatgtttcagtttgctaagaattattcaaatgatgttgtggtactagaaccaaagtctttgatagaaaagttaaaagaagatgcaaaacaaaccctaaaaatttatgatgatttgaaataaaaagttaggtaattattttttatgattaagataatatcatgaataatcaattattcatgaaggtgttttgctttttacaacaatataacatttcatcttgttttagctctctgatgaatattgcataattagaaagactagcgatagtctttcttttttatagataattatatttataataatcaaatttcaaaacagaaaagtgcatagtgaaagattacttaaatattgattgaattatgcacaaatccataaaaatgtacattgtattattaaggtaactgtgctaacatcatgctataagaaagaattaaaatcgaataaattgtattagaatataagaactgaattaatcgaacaaaataaaatagcatttgctaaaggctttatgcagtaaagaagttagcaaatattatttgtcaaattaaatactatagttctttataagaaataaattcttgtaaagaataaaaatttaactccattttgtttgataattcagtgaaacgaagatacagattattcgtttttgatttaatataacaaaaaggagtttttatttatgaaaaaaactaaaaatttaattgaaaagtcagaaaataaagaagatattgtattaacaattcctgcattgttagaattgcaaaaacagattgaagaaatatctcgtaacattaataatcaagtagtaaataacttgtttttcaatattgaagatgttatgaagatgactggctggtctaggaaaacagtagaggagttgtttcgacatcctgaatttccttctacagatttaggcaaaaaacaacttgtactaaaaactgctttcattaatttcttttcagtaaagagaaaaagtagtgaaagaaatacttggattaataatcaataagaggtgttttttatggcaaataaacctaagagaaaaggtaacggcgaaggcacaattttttatgataaaagtcgtaagagatggagatgccaaataagttatcaaaagtatagtggagaaatagcaagaaaaagtttatcagcatcaactaaaacagaacttattaaaaagagaaatcaattattaaaagatattatggagcaaaaaatttgtgaaactacagatgctacaatggttgatttactgaaagaagatgcagagtatgaccacaatatgaatagaatacaagattctgcttataacagaagactgctgactgttcgaattatagaaaaaggaagtctagctaaaattccaattacaaagatacaaacaaatcaaattaatgattttttattttcgataaagcactattctaatagtgtaattgataaagtgtattcttcaatgtctaaagcttataaccttgccatacataaaagattaatgggatataacttgatggatagtccgtttattagaaagccaaagtcagataaaccaactaagaaagtagtagcctttactgttgaagaagaaaatgattttcttaattatcttaaagatatgaaaatcaataaaaatgctattgattacagacctatgttttacattgaactttttgccggacttagaatgggagaaatttgtgctttgactgctaaggatattgatttgagaaatagacttatacatgttagaaataccgttacaagaggtataaattatgcaataaaagtaggggacagaacaaaaactcaaaaaggttatcgtgatgtaccaattcaagattgtttagtgcctatactaaaagaagttttggcaaactataaagagaatgataacggactactgttttataattttaaaagcaatagaccaatatccacctcacaagtgaatagttcgtttaccagaatatgtaagaagctaaatatagaaatcagtggtggtcagcatcttctaagacatacctttgcaaccagagttattgagtcaggaa

SEQ ID NO: 983 - DNA, 22931 bp, synthetic construct
  misc_feature 1..22931: note = Synthetic
  source 1..22931: mol_type = other DNA
tgaggcgggcaagacccctgcatccatcttcaccgactttttgactgtcgttgacagtgtcaccggcactaccacttatgtcaacgcaaagaaatatgttgtcgagcccggcaacaagaccgaccagaagctgatcgacgatatcggcaccggcttaggtctgaccaagcagcaggtctatgacgcattcaccaacaatgaggttgagaccacttgggattacaccgtatccaccctgcccggtgaggtcgttcccgctcatacccatactcccggcgaggcagtacaagagaacatcactcctgccacctgcaccgcagaaggctcctatgatgaggtcgtttactgctccggctgcggcgaggaactctctcgcgagcacaagaccatcgacaagctcgcgcacactcccggcgagccggtacaggagaacatcgttcccgcgtcctgcaccgcagagggctcttatgacgaggtcgtttactgcaccgagtgtcaagctgagctctcccgcgagcataagaccatcgacaagctcgcgcacactcccggcgaaccggtacaggagaatgttgttcccgcttcctgctccgcggaaggctcttatgaagaggtcgtctactgcaccgagtgtaacgaggaactttcccgtgaggctaagaccatcgaaaagctcgcccatactcccggcggcgaggttatcgagaacagagaggtcactcacgactatatccaatatgaagtagtacactattgcactgaatgtaacacagagctgagccgtgagacggttcaggagcccatcatcacccataccctgacctttgttcccgaggttcccgctaccgaggatgccgagggcaccaaggctcactacacctgctccggctgtgacaagctctttgcggatgctgcaggtactcaggaagttaccgatgcatctttgatcatcccgaagctggcacatacccatactcccggcgaggcagttcgtgagaacgaagtgcccgcaacctgcaccgcagaaggctcttatgacgaggtcgtctactgcacctcttgcggcgcagaactctcccgcaccactaagaccatcgacaagatcgcgcattccctcaggttcaagcccggcaaacaggcaactgaagaggcagaaggctggaagtctcactttgtctgcagcgtgtgcaaaaagtacttcaacaattcctcgggtgagatggaactgacttgggatcagatcgtgattccgaagcttgcacatactcatactcccggcgaagcggttcaggaaaatgtcgttcctgctagctgcaaggcagaaggctcctatgacgaggtcatctactgcacctcttgcggcgaagagctctctcgtgagcacaagacgatcgacaagcttgctcatactcccggcgaagctgtacaggagaacatcgttcccgcaacctgcaccgcagaaggctcttatgacgaggtcgtttactgcactgagtgcggcgaggaaatttcccgtgagcacaagaccattgatatggctaaacatacgatcaagatcaagcccggcagagctgctactacagaggccgacggctggaagacccacttctactgcaccgagtgcggcaagctctttaccaacttctccggcaccaacgagaccacttgggaaaatgtcagaatcccgagaatcgtcacaggcaagctcggcgacgttgacggcgatggcgaggtcaccgttctcgacgtgacctgcctccagcgcgtacttgcaaatgttaagaccgctgacgataccattaataagctcggcgacgtcgacggcgacggtgagcttaccacgatcgatacgaccaagctccagcgctggctcttaggcctgagtcaggatctgaagatcggcgaggatgtttgatccgatcattgctgaataactgaataacccatactgctccctctgcttttgcagggggagcgttttgctttagtggataccgaaaattgaaaaatgaagaaataataatgatacggaaagagtcgttgtgcgattgcggtcattttcattttcggcagttttgtaatacttttgtcataatacacaaaagtggggtgaaaatctctattaaaaaataaacaaatatcgttgaatattttgaaaatatatgttagaattatattgtctgaaaatatatcccgaggaggattaacatgaaaaagattatcagcatgttgttggttcttgccatgatgattacagtgcttactgtcggcatcaccacaacaaacgccgctgaaacggcgaccatcacgatctacggccttgacggttctaccgaagtcaaggagatcaacgtaggcgacgagttcacggtttattccactctgaatgtttccgcttccgtttccaatggtatgatcggttcgattcagggtacccagacctactcatcgagcgtactttctctggttgatgaagtcagcggtcagtacggcgagtttgtagatcccgtcaaggtattccccgtcaccggtgagagcaccattgctaacggcgcacaggaaggaaaaatcgtctacaatgcaaccaacccctccaccaccaacgcattcaaattcgattccgattcctcgcagctgattgttactacctacaaggtaactgctgccggtaccggtgaagtcaagaatgcgcttcgtaacctcgcgattgccgataacgagttgaccagaatcatctttgagggtaagctccaggaaggcaagtcgattgcgggcaaagcgacctttaccgatcctactcccaccatcgaccatgctgaggttcgcatccacagtctcgacggttccgttgaaacgaagtctttcaacatcggtgataccttcaacgtatacaccaccctcgacgcttcctccgttaacaacggtctgatggcttccgtcaacggcacccagcgctacaccacctctgttcttcagctggctgataccgtagacgctgacggcattcttaccgatagcgctaaggtgttccccgtcatgggcgacgccgcattgggttccgcaaagaacgccggtacagtgaagtatgcaggctcttccgtttccggtttcctgttcaattctctcaattctcagctgctctgcaccacttatcgcgttaccgctaacggttatgccgatatcactaacaagctcaacgtgcttgctgcagctgatgaggatatcacccgcatcgtattcaacggcgagacccagacaggcaagaactattccatgcgtggttccttcaacaccgacggtcctatcccgactctgcctccgacagagccccccacagagccttccgacaagctcaaggtcaccatcgtcaatcctgacaacactaccgctgtcaaggagttcaacaaaggcgacacctttaccgtatatacagtcctcaacgcgggcgccacgatcgccagcttagaaggcacccagacctatcccaccgcttctctgcagctgaccgacagtgtcaccggcgagtataatgagatcgtcaataaggctgctatgttcccgatcctcggcgacgaggctttcgctgcagtcaacaacggcgcactcaagttcaatgtttccagaggcgcggtcggcggcggctatgcgttcaacaccgctacctctaagctgatcgtcaccaactataaggttctcgctaccggtgaagctactatcaagaccaccctcagaaccttgattaaggatgacgctgatgcgacgaagatcgtctacaacgagcagacccagtccggtcagagctattcgatgcccggtaccttcaccgatccttccgctcccgagcctccgacagaagctcccaagcccaccgagcctgagacagaagctccgacagaagctccgactcagccccagcctgacaacaaggctcacatcactatctacggctttgacggttcctctaagaccaagaccttcaacatcggtgataccttcaccgtatataccactctcaatgttcctgccgcagatcccgcaggtattgcttccatcaacgcagagcagtccttcaccaaagagatcctgcagcctcaggatgaggttgacgagctcggtgtaattgtcgataacgaaacggtattcccgattttgggtaatgcgactgtcggcaagatcgacactgatttaggcgtcaccaagttcaacgcatctaccccgcagatcaacaagggctttaagttcatcactgacgagtctctgctgatggtgagcacctacaaggtttccgctgccggtaacgcggaaatcagaaatagtctggtcactctggctatcgccgataaggatcttacccaggtcgtcagaaagggcgagttacagcccggcttcaccatcgacggtacttcttccttctataagcccggcgagcccgagcccaccgagcctcctacagaagctccgactgagcctcccgtaaagccgactgagcctcagcctgatcagaaagcgaatgttacgatctacggtatcgacggcagatctgaggtcaagacctttaacgtaggcgagaccttcaccgtatataccaccctcaatgctgctgatgcagctcccggcggtgtcgcctccatcagcgcatcccagaccttcactaagagcaccctgcagtctaccgacgcggttgaccagcttggtgtagttaccgacgttgagaccatgttcccgatcctgggtgccggtacggttgcgaagatcgacaacggtctgaacaagttcaacgcatctaccccgcagatcaacaagggcttcaagttcgacagcagtaaatcgctgctggttgtgaccaactacaaggttaccgctgccggcgacgcagaggtcagaaccactctcgatatgctcgcttctgcagatatcgacctgacccgtgtcgttgaccatggcgaggttcagcccggattcgctcttggcggcagtgcttccttcactgatcccggtcaggatcagcctgagacatacctgctgggagacgctgataacaacggttttgttgagtcattagacgcattggccatccagcgttacgccgcaaagatgccggttgtagataaggctactatggagagaaacggcgacgtcgacagaaacggttaccttgaggttctcgatgtaacgaatatccagcgtaaactcgctaagatgcctgttgcttacccgatcggcgagtatgtacctgtagagtgattcttctttccgtagaacggtacgatcgatcaaagatcgatccatcaatcacagtcaactcccccatcttgtgatgggggagtttttatcactttaccggagaaatctatttaggcaagtgcaagatccaccggtcgatcgagctgttttatacggcaaatatcttgcatttctttttcctgtatgatactattgtttcggaagtttgttgaaggaggtcgcttatgatcaatatcaatcaacaggcgctccttgaactgctcaaggcgtcgctgttcgatatcaaaccgacatttcccgaaggcgtcgactgggatgccgtgttgcaagaggcaaaggatcaaacggtcgttgcgttggcggcgcctcatgttccttcgcaggagtccgcaaaatggcaggtgtccgttgcgcagaataccgccaatttcctaaatcttctcaacgagcagacaaagctcatacagctttttgaaactgccgatatccctcttgtgatcctcaaaggcttcgccgccgcaatgtattatcccgctccgctgaagcgttcaatgggggatgttgactttttggtgcttcccgagcactttgaaaaagcgcgtgcgttgatggaagaaaacggctatgtgtttcattccaatcatggtaccgaccgcgattacagctacacaaagcgcggcgttattttggagcttcaccatcattacagtgacgagaaatgggatatcgacccgctgatcctacggagctttcctgatatcagcacccatgaactgtttcgtcaccgttttcctgtattgcccgagatgatcaacggactgatccttctcgatcatgtgcgccatcatcttcagggcggtctcggcatccgccagatcatcgattggatgatgtttgtccatgccaatttgactgatgaaaactggaagaacagcttttccgcccttgcgcgtgatgcgggtctggacacccttgccgtcactatgacgagcatgtgtaagcggtttttcggtttgcccgatcccatcacatggtgcgattctgccgatgatgcgacggcacaggaattgctcgctatcgtctttgattacggcaatttcggcagtaaggtgacggaggagatccacccctcagagtatattaccatcagcgcccgccgcatgggcttgtttcgctatctgcaaaccaggggcgagcagaactggaagagctgccaaaagcaccctttcctgcggcgctttgcgtggatgtatcaggtttttcgctacatcaagcgcggcacctcagcccttttccgcggcgaaaaaattgcaaagggcatgtcgtcgggaacagaaaagtatgatttattagagcggctcggactgaaccgctgatccatagacagttgtatgatgcattccattttccatcaaatctatgtttcgaatctatccgttattgtgaccgccttgctgatcctgccgatcgcatggtcggttttcggtgcgttcttttataaaaggatgcgtttgatcgggacggttttgtcaatcgcatgcggcgtcgtcattttatatgcgaccgtcgtttcacgcggggagtcatccctcggacatgacctcactccgttttcatcctttcagagggcgatcgaacaacccgagatgtaccgttccatgttgatgaacgtgtttttgtttgagccgttaggcttgatgttaccgttcgccatcaagggaagtaccgcaaaaagaatcttgctgacgatcgttgtcggcttcatgttctctgttgcgatagaggcattacagtatttctttgccttgggtatggcggaggcggatgatgtgatctgcaacactgttggcacagcactcggcagctgtgcctatttattgacgttgctatggcaaaaattgtttttcaataagaagggaaggagaaaagcctgatgaatcacgtccaaaagctcttattacaagtgatcggagccgcattattcggcggggatttgcctgcggtcgatgcgcggtatatcgagccgctgttaacagaaagcaaagctcaggcggtctattctcttctgttcaacgccttggatgaccaaatcaaagcggcgctcagtgccgaaaagtacgcacaatacagtgagatgaatctgttgcacgcgatcgcctgtacccgcaattttgacgagcacggggaactgcatgagctgatgacagccgagcagataccttatgtcgtgatcaaaggactggcgtccgcatcgtattatcccgagccttccatgcgcaacatgggtgacgtggattttctggtagctccttccgatctttcgcgagctggaaaagcactggaacaagcaggctttgcggtcgatcacggcgatgaggatgacggcatccatattgcctacacccgccctccgatcagtatttgggaaatgcaccgaagcgtcaacggtatcccatcgggcgagatcggcacagcaatccaagcggaggtggatcacaccatcgaaaccgctgtagaaacgacctgtgaaggcgtcctctgccgcgtgcccgatcgattccaccacggcttgatcatgctgctgcatacggcttctcacctgacaagcgagggcgtcggactcaggcatctttgcgattggacggtatttgtatcctctttgagtgacgctgagtttcgcgagctctttgagaagaagctcaaggaattcggactccggaggtttgctcaagtgctgacgctcctcgggatcgaatacctcggcgcgccgaagcgtgtatgggctgtcagagcgctagagcgcaagtcgatcaccgccgaacagctcgagagcctgatgaacgatatcctcagcggcggtaacttcggctttaaggatatgaaccgttatcgcgagatcaagtatatctccgaccgtggcgagcgcaccgtcaactccgacggcatcatcaagcaagggttcaaaaccctgaaccaaaaagtgtacgcggattacaaaacgatcgaaaagcacagattcctattgccgatcggctatcttgccgagggcggaagatacatcggtctgctcctatccggcaaacgcaaatcctttggcacacggcaaatgctccaagaggcggcacaaaggaaaaaggtgtacagcagtctgcgcttattcgaaaaaacagaataatgtgaaaaaagctctcgattttaatgtcgagagctttgattttgacagcatgatatccgctaaaatgtgaatactatggtatgaacgtaaaataaggagtattcacatgagaaacaatgacggaaatctgatatttgaatccatgccgcatattgcgagctacgcctcggtcgtcggcaaaaaggagggcgaggggccgctccgcgattatttcgaccgcatcatccacgacagctacgccggaaaagatacgtttgagcaagcggaaagcgagctgatgagcactgcggtgcgtgtcgcactgaacaagggcgattttacacaggagcaaatcgacctcgcctgttgcggtgatcttttgaaccagtgtgtcgcgagcagctttgccatgcgctcttacgcgatcccctacgcgggcgtatacggcgcatgctccacgatggcgctgtcgatgatcctgtcggcaatcgtgatcgacagcggcgcggcaaagcgcgcagtctgcgcggcgtcatcccattattgcacggcagaacgccaataccgcttcccgctcgaatacggctcccagcgcccgccgacagcccagtggactgtgaccggatccggcgcgtgtattttagaaaaatcaggcaacagcgataaccctaagcatcattgtgccgataacagaagcaaatcattgctttccacaggtaatgaccctcacataaatgagagccaaacgccccgaacaccctatcttcactctgcccgcatcggtcggatcatcgactttcagatcaccgaccagaacaacatgggcgccgccatggcgcccgctgccgcggacaccatctaccgctatctgagcgcgtccgagaccgaggtggaggattatgatatgatcttcaccggcgatctcggccgtgtgggcacgcgattactgcatgatctgctcagtgaaaaaggcgtcgacctcggcgagcgtcacagcgattgcggcgtgatgatctttgatgaggatcaggacgtccatgccggcggatcggggtgcggatgctgtgcctcggtgctgtgcggctatatcctcgacaaaatgcgcgaggggaccttccgcaatatcctgtttatcccgacaggagccttgctcagccccaccaccgtcatgcaaaaacagaccatcccctccatcgcgcacctgatcaatatccgcatggatgtgtaactggttgataaagaattcgggcgatgaagaattaacgataatactaagtagcaataaaaagctttaaaaagatattagcggagaatttcgcagaacaaggcggaaggcgcaggcaggctggcgcctgtcaagactgacaacgcagttgtgcggaattctccgcaatagatattaaagtgttttattgctacttagtataaatcgtgtaaaatacagcaaaagtggtattgacattcaaccgttatcggttataatattattaaattgtatcataccaagaacaattaggttactatgataaggtagtataccgcaaagctctgatgcctcatcgacggatgaggcattatctttatctgtaataggaggatatcatgaagtatatcattggtttggatatgggtatcgcatcggttggatttgcgacaatgatgttggacgaaaaagacgaaccatgcagaatcctgcggatgggatcacgtgtttttgaagcggcagagcatccaaaggacggctcatctcttgcggcgcctcgccgagagaatcgctctatgcgccgcaggcttcgcagaaagcggcacaggaaagagcggatcagatcgttgatcgtggataatggtatcatgaccttagagaagatcgacggaatttatgatgcaaagaatccattaaccgatatctatcaaattcgtgcggaggcgttggatagatgcctgagtgtcgaagaatttgtccgattgctgatccatctgtctcaacgcaggggtttcaaatccaaccgcaaagtcgatgcgcaggagaaaaagtctgaggcaggcaagctactaaccgctgtaagtgctaatcatcaattgatgacagagaagggataccgtactatcggcgaaatgttgtatcgggataaaaagttttttgagtgtaagcgcaacaaagcggatgattattccaacaccttcgctcgatctgaatacgaggaagagatcaaagccattttccgttcacagcaagggttgggcaacccctatgccacggacaaactcatggatgattaccttgcgatctacctttcccaacgttcgtttgacgagggacccggcggagagagtccgtatgggggtaaccagatcgaaaagatgataggcaaatgcaccttggaaccgagtgaaaaacgtgccgcaaaagcgacgtattctttcgaatacttcaacctgcttacaaaggtcaatagcatcaaaatcatatccgaccgtgagaaacgcactttatcagacggcgaacgccaagctgttattcagcttgcgttttccaagaacgcaatcaactatgcgtcgctgcgcaaaacgattcacatgacagacagtgagcgtttcaatatctcctacagccagtcggataaaacggcggatgaaatagagaaaaagactaaattcacctatctgacggcatttcatacattcaagaaagcttatggaaaagcgtttgtagattggccgactgagaagaagaaccgtctggcttacgcgcttacggcatacagaaacgacagttctattatcacctacttaacggataatggatttgacaagactgagattgagatcgcacttactctgcctgcatttacaaaatggggcaatctttccgagaaagctctcaataaaattatcccatatctggaacaagggatgctgtatcatgaggcttgtactgccgcgggatacaattttaaagcggatgatacggaaaaacgaatgtatctgcccactcgagctcatatcccgcccgagcaccgaaaaagcgcagaacagatagaagctccggaattggatgaaatcaccaatcctgtcgttcgccgcgctgtctcccagacgatcaaggtcatcaatgccctgatccgcgagagaggagaaagtccctgctttgtcaatatagaattagcccgcgaattgagtaaatccagagcagacaggaacaagatagaaaaaggacaaaaagaaaaccaggcgaacaatgacaggatcatggaacgcctaaaaaaagaattcggtcttctcagtccgacaggacaggatctgattaaactcaaactctgggaggaacaggacggcgtctgtccctattcacttaaacccatttcgatcgagcgattgtttgagccgggctataccgatatcgaccatatcatcccgtattccctctgctttgacgatacctataacaacaaggtgctggttatgtcgtccgagaaccgtcaaaagagcaatcgcattccgatgcagtatctggaaggtaaacgccgtgatgattttcgtatctgggtgcagaattctcatctgcggtttaaaaagaagcagaatcttttgaaagaaacactgacggctgatgatctgtccggtttcaaaaagcgcaacttgcaggatacacagtatctatcctcgttcatgctgaaatatctcaaaaagtatttggcgctttctcccaacagcaccggtcgcaaaaataccatccaagccgtcaagggttccgccaccgcatacatgcgcaaacgctggggcatccaaaagatccgcgaaaacggcgatacccatcacgcagtcgacgctgtcgtgatcgcatgtgtgacaagcggaatgataaaaaggatatcggagtacgcaaagtataaagagaccaaatatcagaatcctgataccggcgaatattttgatgtagataaacgtaccggcgaggtgatcaatcgctttccaatgccgtattcgtggttcagagacgaactgttgatgcgatgttccgaggatccgtctcgtgttctccatgaaaagcccctgccgaactacgcgaccgatgaacagatcgccccgatctttgtgtctcgtatgccgaagcataaggtaaaaggctccgcgcatgaagaaaccatccgtaagccctatgagcaagacggtcaacagtatacgatttcaaaagttccgcttacttcgttgaagctgaagaacggtgagatcgaaaactacttcaaccccggcagcgatactttattatatgatgcgttgaaggagcgtttgctcaccttcggcggagacgcgaagaaagcttttgcggaaccgttccacaagccaaagagcgacggtactcccggacctgtagtcaaaaaggtcaagttgaaaaaaagagcaactctgtcggtacctgtccaacagaataccgccgtagcggacaacggctccatggtgagggttgatgtgttttatgtcgagggtgagggatattaccttgtgccgatctatgtagcggatacagtttagaaagaattgccgaatagagcaatcacacggggaaaagaatacaatcaatggagagttatgagggatagtgattttctcttctctatatatcctaatgacttaatcagatttgtttcgtctgcacccatcacattttcgttaattaaccaaagcagtacattagcgccgagtaaagaatataagaagtgccttgtttattacaagtcaacaggtattttaaccgcaagttttaaggtcattaatcatgataatacatatcaagtcagaagtttgggaataaaaacgctaaaatgtcttgaaaagtatcaagtcgatgtattaggcaatatatcaaaggttggaaaagaaaaacgagtggggtttgcctaatgttattgacttagaacatcataaatatgaataagtttatgagaatgatcgtgttttttgatttgcctgtcaagacgaaggtgcagtggcgtgtggcaaaacagttccgcaattttctgttgaaagacggctatttcatggtgcagttctcagtatattgcaggatctgtaacggatatgatgatgtggaaaaacataagctgcgaatcagaaaccataagcctgacaatggttctgtacgattgcttgtcatcacagaaaagcagtatgagaagatggaactcatcatcggcaacttggtaacagaagaagagcataacgtctttgaacagttatcaattttctgatcaataactacttgatcagtaattctatagttgtttttatacagcaaaaatcccgataaacatactgtttatcgggatttttgcgtccctattataccataccaagaataattagggaactacaactctatttctgcatgcaccatgatgacgatagattataccataccaagaataattagggaactacaacttcaaagccgatgtattgccgaccggtgatattataccataccaagataattagggaactacaacaccgacaataccgtcctgatccagacctctattataccataccaagaataattagggaactacaactgataaacggtatcaacatcatcacgctcgattataccataccaagaataattagggaactacaacgaatattgatatggtttggcgaccatattcattataccataccaagaataatcagggaaagctccctgtcgtttatactatgttatgattttaccacattccattttatctttcaacaccgatcatcatccactctttcaccgtcctgatctccgctatgtaccccgcgtcatcattcggcgtttcgaggatgaacggtttgttttgtaaggcagggtgcagagcgatccgcttcatcgcctccatgccgatgtagccctgaccgagtttttcatgccgatccttatgtgcgccgcaggggttcttgctgtcgttgaagtggactgcgcgcagtctgtctaaaccgatcacatcatcgaagtgatgcagtacgccgtcaaggtcgttggcgatatcgtaccccgcgtcccaaacgtgacaggtgtcgaagcataccccgaccttgtccttcagctccacgcggtcgatgatcgctctgagctcctcaaagctcctgcccatctccgttcccttgcccgccatcgtttccagcaaaacggtcgtccgcatggcggggaagagggtgctgttgagcgcctccgcgatcagctcgatccccttctcagcgccctgacccgtatgcgcgccggggtgaaaattgtagtattgatgcggaaaggattccattctttgaatatcctgctccagcatatccagcccgttgaggcgggtggattccttcgccgcgcacaggttcatcgtgtagctgccgtgtgcgacgagcttgccgaaacgctgttcttcaagcaggcgattcagcgccgcggcatcctcggggatgatgtcctttgatcgacccccacgggggttgcgggtgaaataagcaaaggtgttgccgccgaaatcgcacatggttttgcccatcgcctcatagccgttggtcacactcaggtgacatccgatgtatatcatagcgttctcctgtcatcttgataggacaatcataccataaaatcgacaaaaagtcacccctctttgacagaggggtgaaatgctatagcgcgttattcttccatctgcttgccgaggaacgcggcggcggattgtgcgagcttgagctctgtttcggtggggatctgcacgcgttcgcccttgagcatcacgaccgcgcctgtcacatcgcccgcggcaatgatagggtagatgaccgcggcggcatgctccacgccctccactgtctgtacctcatccaccgagttcgcgtgggcgctgtagctgcggcgattctccatataattctcgaggatcggggtgatgcgtcgctccaaaaactcgcgcttgctcacgcctgcggcggcgatcacatggtcgcggtcacagatgagcgtcggcatcgcgctgatgcgcgacagcacatccgcatactgcgccgcaaactccgacaactcgcctaccggcgaatacttcttaaaaatgacctcgccatccgtagcagtgtaaatctccagcgggtcgccgtcactgataacacggacagcaaacttcttatcctttgtgtttttgctttgctgattttgctctttttcaagattgacgttaccgatgtgcagaatgtggtcgatgtcgtctttcagcttgatatgaatgtgatcttcgtaaaccgttatcgtttcaatcagcagttcaaggtcgtttttctccagcttttccttgttcagtatctcgtcgaacaagtcaatcgcaagctgtgccgtccggtttgcgctgacaacggtgttgtgcttgtcgtaggtcatcttgatttgattttcaaatccctcaatccgttcgtcgcactctgcaatcagttcatcataggtttcctgtatatcgttttcctgatttggctttctggcaatgtcacgcgcgcattgccgtatgagagcctttttttctgccttgctgtcggcaatcatttcttcaagctgttcgagcgtggtgttagtcgtttttatatggctttcttcctcggcgattgtttcctgcagcttttctatcatttccgatgaagtgtcgcgcaccatttgcagatacgcttttacaatcgcgtcgagtgtgtccgcgcgaacatggtggctggtgcagcccttcaagccgcgcttgtggtattctccgcagcggtagccctctttgaggtcacttcgtgtgagcggaaacatcggactgccgcagtcgccgcacttgattaagccggagtaagcgttcggatatttcttgataccgcggtagttgtttctggttcgttccttcataccgttttgcgcggtggcgaacacgcggtagtcgataatcggctcgtgatttttgaggaagataatgtgctcgctctcgtcgcgcttgatgtcctgaccgttgattttcttgcgcgtgtattttccttggcgcagtgtgccgatgtagaaatcatttgtcagcattccctgaatcgtcgcaatgctccatcgctgttttgctttgatatgacattcctcgccgcgtgattcttttcgcgcgcgttcgttcattctcggagtgggaatgtgctgctcggtgaggtagttggcaatccgcttgtagccccagccttgattgtacaactcaaatacctttcgcaccacgactgcctcggtaggttcaatctcaaacgccattgttttgctgttggtaatcacatagccgtaggggacagagcaaatccatttgccgtcctgttggcggcggcgtatgacgttgcgcaccttctttgatgtgtcggtgacaggcatttcgttcatgaagaagtagatttgtatccgcagccaatcatcgttggtggggtagtcaatgttgtcgccgatagcgatgattctgattccctcgtcgcgcagggcttccagttccaccaagcctgcgccgtttcttcgggagaatcgcgagaggtctttgatgatcagaatgtcatattgattgcggaacagctttcgccgcattttttgatagccctcgcgctgttcaaaggtgtagccgctcttgtccctgtcctcgtagaagtcgagctccgcgttcggaaagttggtttttacatagtcctcgatgatagccttttggttttcaatcgaggtgttttccttgttcagctcgtcatccaccgagatgcggcagtaggcggcaatgtagaatttttcagtcatataatcgtctccgatacctttattgacaacattgtatcacacagttttttgaatatccagacaataatcgcaggtaaataatggtatgtaatcgggcggcttgcgcccgaatttacgccgagagcttctcggcaacagccctgcggttttgtttcatcagacagtataggctgtcctccaagtcgtcctcgcctgattccaccacaacagaaagaaaggaaagatttttcaagacttgtgtgctgtcctcaatttctttcattaattctccgtcggcggtttcctgacggctcagataaaacaaaaccagcttcggcttttcttttacctcgattctgatagtttgtcacctcatggttattatttcctgttccgtttcaaataatcacaatcctttctgccagttgtcggcttcgtcaaatgtaaatataccgttcgttttcttgacttccttaacgcactcgccgcgtaaggagttgagcacttgcttatctacgcattgattggcggcgacaacattcatagtgatggcaagctctaccgcaattttgaatagcaatctgctgattctgtcatcgcttgctttgattaatttcttcattgtttctctcaagacagtggagagaaacggttcgctcgaattcattttcaaatatccgcagtaaaaattcaccgcattttcaatgaactcgcttttcttttgacagttatcttcgcggtagttctcctcgactttttcaaatgtggagtgcttcatccacaaagtaaaccgttcctttttgtcctcgttgttcattcaaaacctccgtttcttgcatttacgtcagccaaagcgctgtttgctttcggcttaaacactgactttttgagtttattcggttttgaaagcgctgtcataagcgtcaagccccataattgacgcacagtttttcaaaatccaaaacctcgaaaaatggcttaacagtcggcattgccggctgatgtgaaccgtccgtcgccccaaataggcgtcgggctttctcctgcttgcttttcgactgggcataaatgcttagatttttcaaaaattgaaaccttgcttttatcttcttctgctgtatctctgtatagttctatgggtatagttatttgttattttatgtttcgtgatagaattcaattgtaaactatttcaaagacggtaaaagaactttataaagcaagttttaggagactactatgaacacagctgttgtgatcaatgcgggcttaggctcattaaccatgggaatagaaaaagccggctatcaagtgatagcggcttatgaaactgacccaaaagcacgatcagttcatgagaggaacatcaatgcgccgatctttgatcgaatccctacaagagaggagtatggcgcttgggaagaaccggatcttttggcggcgcggatacatattaaacagccatcgggaaacgcgctccggtcggagcgcccgattcagcaagaaatgcagatgttggaaataattgatggttgtcgtccgcgtgccattctgttttttgtgaacccgataggaggcaaaacgctgcttccgggattcctggatagaatcaatcgtattggatatcgcctgtcatatcgtttgatagatgtaggagaagcgttaggacttccgatcagagaacgtacgctctgcataataggagcacgaaatgataatcatgccccattgcgtttccctgattttgatatgtctaaacagcattactatcctgaggactttttagaaattgatcatcctattgattcgtggtattacgagattaatccacaccatatttcatatgatgatttagaaggcggcccgtatttttgttggagcaatggagagtacagatcgacagatattataaaatggaatacgttgaggattcctcttgttagagatcataacagaccgagaaggatcacccatcgcgaaatagccaatataaaagcgtttcccgagtattataacttttcagatgtgagaaacagatcttggctgtataaggctttgatgtattcggagaatattactatcgttaaacagatcgccaaaggattggtatataacagacctgttagtagaggacttttatttgaaaatttgttttatcgttatttgaagtctcttttacaaagccattcggagtatggtctagaagtgacaagagagcttccgactagtgattatagaatagattttcgggtgaaaacaccacagcagttactacttctcgagttgaaactctataccggtcgcaccgtcaatccttcaaggattcaagatccctgtaagcaactctctgatttaaaggcagagggaaccatcattctgaccgtcgcaaatgaagtgtcggacgaaatgaaagcgcagtgcttagatgcttacggaatacatatttgggatgtaggcaacttgctttggctattcgaggattatcccgagattaaaactgagtttatctcctttttggattattccatcgatagtatcgagactaaagctcctgctgtcggtattgtgtgggataattcggcaaaaccggaggttgagcctgatgcggagcatgacacgaattgggcacagaagctgtccggaatcaaaccgggaacggagcatttcagagcttacgaggatgcgtgtgttgaaatactgaaatatgtactcggcgactacttaacactatggaaaacacaagaacgatccaatgatggtctgtatcgctttgacttgtgttgcagaatcaaagccggaatcaatcaggacttttttgataccatcaagaaatacttcaacaccaaatacatcgtctttgaattcaaaaacacgagagagaagatagggcaaaaggaaatatatactacagaaaaatatctttacgaaaaagccttgcgcaaagtagctgtcattatttccagagaaggagctgacaagcatgcgatgaaagcggtaaaaggaagtcttcgcgaaacaggaaaattgattctatgcttgtctgatgagcagctgttggaaatgatagagagtaaagataagggagaacaagaaccggcggatcaattaggcgatatgcttgatgatttgttgattcatctcgaaaagtaagagtaagattatctgattgataatagtgacacctccgcattaagatgtgcggaggtgaagtcaaatgtgacatcaaatcaagctaaactgatgcattgaatgcagagtaaattgctattgcttaagctatagcttgaaataaatcctttcctttttagcttctctaacaacttgtaattataatcagaaacataaagatattttttgtgtctccgatctttatgatggtaaatctccattcgcgggattatcaagcaccttaccgtgtttatcaaagcgtgaaccgtgacaggagcagtcccaggagtgttcggcactgttccacttcaatgcacagccgaggtgcggacagcgtttctttgagatggtcaacagatttttcgttgattcgaaactgttgattagtagctgtggtttgaggatactccttgacgggtcaaacacatcggcacagtcgttatgctttccgagaattgtgtcggtgagtatcagcgccgcggtcatcgctccagtcataccccacttgttgaagccgctggcgacatagagatgatgagtacgttttgagtattgaccgatatatgggatgtcgtcaaggctcatgcagtcctgcgccgcccagcggtattgttgagtcgatttaggataaaccctgttggcgaattcacgcagttcattccagttgccgcccttgtgacctgtgcggtgacctccaccgccgagcagaagaagattgccgtggttgcgaaaggataagcctgtccgacattcgtcaacatacatcccttcgacatcctgtgcgttatcgagtgcaatgacataggaacggtgttgatacagcttgaggaaataactgccgtgcgtgttgatgaaggggaaatgtgtggttacaatcacatgattcgcgttgactgtgccgtggtcggtgatcgctatgttgccgatcatctcgcggacgaaggtgtgctcataaatgtccaatccctcggcgatagcggcgaagaatttcaatggatggaactgcgcttgacgagagaatttcaccgcgcccatcgttttgatggggatgatgggattttcacacagctctgccctgtacccgattcgatgtaaggcttccatttcatcgtccaactttttgcggtcgttggtactgtaaacgtagttgtccttttcttcataatcgcagtcgatcgatcggcatagggcggaatactgttcaaacgctcttttattagcgttcaagtattgctgagccgcatgtgtgccgtagctttttagaattttatggtagatcagaccgtgttgataggtgatctttgcggtggtgttctgcgttgtacccgagcagatcgtgttcttttcaacgagcacatactttacgcctgcttggtgcagatagtatgcggtcagtattcctgcgattcctccgccaataatcagtacgtcggtgcggatatctttctttaattgcgggaagcgcggaagtcgcgctgtgtcttgccatacagatttcatttgcatccatccttcatagggaacagggtcagctgattctcgtcatagcagatgccgaggaagatctcctttgtgcttttatagccctgctttttcagctccttttggagccaatcatcattcagaccttttcgcttgagattatctcccatcactctgccgtccatgatgatctccgtaccgatgtgctccggcttggggttcagctccatatcctcggggttcagtggacgtttggtgctgaccggcaggatcgacagcttgccgttatattcaaagacagcagtctgaatatcattcagattgaaatacccctcctgacggcataggagtagaaattcgctcagctcgagctttgcttttttcatgttctggcggtatagtttaccgtcgttcatgacgatcgtcggcgtaccgttgatgaatttccggcttctcgcgaacctgcgtgtgatgatgctcaaagcgacggtgatcgaaccgaacaccagcatcgagatcgtcggcttccaccacggcttgtccaaggttgttgctaactccgcggcgatcgagccgatggtgatgcccgtgatgtagtcgaagaactccaactgcgcgacctgtttatgtccgatgaccttcgcgatcaggaacaggatcaccgccgagaacagcgacgcgagaacgacttgcagaacttccatcacaagtcctgcaagtccgcgtcgggaatatcgttctcgagattatcccgcgcaaggtcggtgtcgatctccttgtaaacatcagagatcggcttttcgtgcgcatacggtgtggtgtgatacaccttctgagcaggagcttctgttcccgcaatgatggggttgatgcgctctttgccgtgtttggcttttccctgtatttcgggaacagccgcctgctcatttctgggttttgtgtgcgtccgattcggtcgcttcattccttgttttgccatggtttcacctcactgttattgtgggtgaaatacagtgctttatactgcgcggatcacgccgcaggcgattttctctcctgcgtcccccgacggctgtgtacgaaagtcgtcagtatcgc

SEQ ID NO: 984 - DNA, 19929 bp, synthetic construct
  source 1..19929: mol_type = other DNA
  variation 14540..15807: note = n is a, c, g, or t
  misc_feature 1..19929: note = Synthetic
tcgttgatgaggaactggaactgtatcttcagccagtcgtcgtcgttcggaaagtcgatgccgtcgccgatcgagatgatgcgaacgccgtagtcgcgcaagtcctccagctccaccaagccgcggctgttgcggcgcgagaatcgggagaagtccttgacgatcagaatgtcaagcttatgggagagaagctgtttgcgcatcttctggtagccctcgcgctgctcaaaggtgtagcccgagcggtcgcggtcttcgaagaatgtcagactgctgccggggaatttctgccggacataatcctcaatgattgccttttggttctcgatggaggtgttgtcacggttcagctcctcgtcaacggagatacggcagtagcccgcaatgtcaaatttttctatcaatttacatcacctgctttgcgtgatattttagataatattgtatcacagctttcggaaaatagcaagaggaaaaagacgctgccaccgcgacagcgtcttttgtcatgcagattctttaccagctctgacctcgcgttccgcaaagagctttcggttgtagcggagcagctcgctcgtcaaatccgtcaggttctgacctcccgagcgaaagacggcaacaaggaatttctgctttcggaacctgtcatagagcggtctgagctgttcctgagccgatgtgtccgctgattccgccttggtaagccagatgcagaccagctttttttcagggtgaatgtcgagttgcaaacggctcacctcctgttcatattattgccttgttggcatgataatatacggaataatatttcaattctcccaaccttcctgccagtcaatggcgtcttcaaagtgaagcataccgtgaatctctttcacttcttcctggcattggaatctgagacgctccacggaagcggggtcatacttactgaggttggcgagaatgttttcaaccattgccacttccaccgccagcttgaacaatatcacgctgtggcggttgtcgctctcacggataatacttctcagacatgagagaaacatgttgggcaaatagtttgttttgttttccgccgtgaggtaaccgacgtagaatcgaatggatttttccacgaactccgacatactgcggcagtcgtcctgacggtacatctccttcacctttgctttgatttcgggatacatccataccgctaatttttcttttccttttggtgctgacatgatttgttactcctttttatttagcaaaccctctcaaaagcacggtttcatcggcaaattcgggaaaggctgccaactattttgattgtttcggaaacaggttgccaacctgtcaaaatgcacagggagtgtccaaaaacggcttgcggtcggcgttgccgtccgccgtgaaccggcaggggtgctttagcaaccccaagcctttctcctgttttccgctcgattgtgagacctgattctgatttgtgcaaatgtaacagacgaatttcggcagttcattcttctgatgtgttctgcgtcatcgcaaaaatatccgcgacgaaatacatattactggtatggctgccgttctcacggaggcggtgctttttaatgatcaggctccgctcctctaacgccttcagcgccgcgtcaacggttttctcttttacacagcactcctttgcgatcaggctccgcgacggaaagcagctgtcgttctcattgtccttgtgacggataagacaggcgaggacggctaagtcccggggcttaagtccgagtgaaaagatttcattcggcagcataaaataatctttgcgtttgataacaggttcctccttgtacagcagaaaaagaagaatgattgtgcgtggatttgatatgtgggctatgcgcggatcggattaaaatttttaattcccggtttgttattctttctctgccgttgatattttaggatgtgtatagttccttgggtatagttatttggtaagaagatattacactaaggtaaagaatttttcgaacccaccacctttcattttgatatttctttaacgggcggtgcaaaatattcccgacctcagaaatgccgacattcgcccaaattcgcgcgtgtttcgctgtcgggtactttcccgaccttttcccgaaaagcccacacgtcggtacacagggcgcgacgtcggcaccgtttggttagggacggttgggacgataaagacgatatttcaggcaccccctatatatcgtacacaccgtacttatcgtccctctttatgaatcgttgacgggtggttcgtactgaatatggatgttgcggatgttgttgctttttttggactcatacgtcacgccgaattcctctaaatcgaaccgccagtgattcatcttccgcttgagcgcgttggctttgatgtccgtgcctgcgtagcgattgaatttctcaaggaaatctgcgttactgccggagaagaaagatatctccttcatcatctcaaccagcttttgcagctccttcggtaacaccatttcaggattttcgacgctgtcggatatgtactcccaagtacaggtttccttgtcaaagtgcagctcgatttccctgtcctcaatgtcgcgccctgtacagtgcagagtggcgttgccggagctacgtttgcttttcagcaaaacaaattcggtgtcggcgcagcctgctaatccgttggtgcctgaaatcatatcaaacgggtcgtctgctttttccttgcggacatgatgaacgaggagaatcgtgattttcagctcatgcgccagctttttcaaaacctccatctgactgtagtcaaccgaatagctgacttcgttattggcgcggactttgagaaaaatatcgattgcgatgaggacggtttccgggtgctccgaaacgaaggtgcgtatctgctcctccagaccgtcgccgatcgtcatgcagctcgtcgcaaaatgaacattggacggtgcatcctccgtgacagtcagcaatctttcctgcaggcgcgattcggtatcctccaaactgaggtaaagtgttgttcctttcactgtcgggaaatcccagattttttcgcccttcgcaattttcacgcaccaatcaagtgtcagccatgactttccaaccttcggcgaaccgctgagcagcgccagtccctgaggaaggagcttcatgatgacgtattttgtcggcggcaaatccttgtccgccagcgtagcaccgtcacaggtgcaaaaccgcttttgatatgagtcgatatccagattccagttttcttccatgcttgttattcctttctgttttgatatttatttcacgcccatgtgagcgggatatacggttttgaaacagtcctttcactattcagtacattttttggctgtttcggggtgggtaaaataaaaaaagatttctttctctgttgtgtacaaacgagagctttgacatttgtgaaatatcacggtgattggtgatttgcccctctacttttgtattgctgaaaaaaacagtgctttgttcaggcttttttctttttctaataactttggagagatgcacaaaaagcagaagaacaattcagttgaatacaacaagggtgcgtcttctctttcatcatctcgattaatacctgcaattcattcggcaaggttatttatacaataactttcctttgttctcccctttgcttattagccatttttacggcacaaaaatatacccattttactaaaatttctaaagattcgttaaagatgttctatattaggcgtttcaattttgtatttatagaaaatatgacatgcttttttagatttttacttgcaatttcagttgtgctctgataaaatacaataaacatcatattacgataggattagctatggttacattctcttttgaaaaagatattgcgcgctttcacagcgcgtggagtgaatggaagtactctgtgtatcacaaggacactcctcggcactataatttgagcgtgcagggcttttacggaagcggtaaaacagaatttctgcgacaattttgcgaactgaacaagacgctgtatatttgaatttcaaagacttggacagcagcaccgcgttagctgtattctgcaaacggattcttaacggtgaaagagctccggactggattgaggcggttgagaaatataaaaatctgacaggcgcacgttttcaggttttattcattgacgacgataacggctcggcagcatataaagattttgaatcagcgatacagtctgtaaagcttcacaaccacacgcttgttctccatgtcaagagctttgctccggaatcggaacagaaacccggtaatccataacagttggtttatcgatcggtatgtcaaaggataaacgaaacccgcctatctcaagcataaggacggattccgtttcaagattgattgtattattgaaaacaacggcaaaacgctggtttgtgtatttccgcattccttcgatgaaaagatcaccaaggaacagttggagaatcacatcaacgtcagcagcagctacgggagcctatgcagcgaggtttcccttgtcgtgtttagcgtaaatcgattcagtgattggtgtgttcatcaggcttcggtttacgaccagctgttctgcgtaccgttagagagattgaaatattagaaaacacagcgcatagattagcgttatgccaatccatgcgctgctttttgcgcccacaaactgcgacaaatcggctgtgtgggctttgttcggtgaggtcgggtacttacccgattttttctttcgcgcgacacagggcgaaacagggcgcgtcaggttttgccgtagtttaacgcctcaaccgcgattttgataccaagagaaaaccctcggatatgaaaagaaagacctcgccgctgctgcgggaatcagtacctttactatcagcaagatgggcaagggcaagaatgtaacaacagatgtatttggcaaaaattgcatatgcgcgtgagagcaatgacattgtcagcctgatcgtgaaccgatgcagaatgttttaataagtaatttgtgtaaacgccgaggtgagattgcctcggcgtttatgtatatactttgtgacttccgcaaaactgaaatatatgatgcttttacgcttttattcaaaaacagcgtcgaaatttgttgaaagtccatataaatggtgatataataaccttatattatatgtgatacgaggcgttgtaacatgaaaaaacatattgtgtgttcgctgataattggtgcggcagttattgctgccgccggaactgcacacgttcttgccgaggaaaccactcagaacagcggagcggttcatataacttttgccgaaaataataatcttgatatttcatatttttccgatgaggcttgcagtattcctttgtctacggaaaattgtcgattgaatcagggcgacaaaatatacgcgtctttgcccgcggtaaaaaacgccaagagtaatctgtaccgctttgattgttttcgcatctggtcgcataatgaggacggcagcaaaaacgaattaatcgcgaagtcagacgaggcgggcggtttggtttggactgtcccggaggattttaccggtactgagatttccgttgagccgctcggaggttttgagcaaagaaagctaaagttcagtacatatagcctggacgaaaacttgaaggaaatagagcttcagggcaagtggctggtaaacggaaagagcaaagctgaagtcagccccgttgaatcgtataaggttgtttttgattacagcgattactccgattctcattattttgtttcctctactccgaaatgctttaagaataacgagagcgactgcagagtagttttccctgaagcggattcactcaatcctgtcgatacatacactgtacagatgcacccgtacttttcgctccgtattattgacccggaatacaatgtaatgaatttcattcctatatttgaacgcgatgccgtgaagagcgtcaaaaaaaacggtgaagaggtttcgtattccgcgggcggaaacgaaaaaatcgacaagctgaaagcgggagataagattgttgttgtggtgaatagcctttatagactgattggaaagggcgtaaatgtcggtcagcccgttgaagcggacggcggctatgagtatacctttacaatcccagattcatacggcgacgctttggagataactctgagcaagcgcagtcaggaaaaaggagaaaaggtttcggttcctgaaataaagaacgcgtctattactctttataacaagaatggtgttgagctgcgtcccgatgaagttgcgcccgacggaggcgaaatgatcaaagtggtaatcaatcctttctcaggatattacgtgttgggcaatgacatcggcggaaaaagctatgaaaaggaaatgagtttttcggactacaagaataatatagacaagattatttccgagcatacggtcaagaagtatcttgcaatcacactaaataacaacaacgactatggcacctgtgcatattttattgacggacaggaggtcagcggtactcaaagcgtgaaggagcaccaaattattgagctaaaattcactcttgcgcctgattctgatttcaagattaagcgcgaaggttgggaagcaatgtggtcggcattttcacctgattcttttacaacaaagattgaggtgactgaagatatgaatcgcacggaaattgactgcagcaggtattttgatgttgaaaggaaggaaagcaaatgaaatggataaaatggttcaaatgtattccgatttgggtgcttccgcttttgttaagcgttattatactcggcggtattgtgattatcgccgttgacgctgttcctaactatctcagagtcgcgcctgagggtgttaatatctttcagggtttgattccaggtatggcggatagctacgaaaaaggaaaggaacacggcttgagcgctgagaataccgagcttgttcttgctgctcgtttgaaggaaaacggaaagacggaggttttgatagccgacggagatattacggattttcaaaagtattcatcggaattatttaatattaatctcgataaatacgctgctttatatgaatttcaggtaaacgtggtttttacagttgatttgagtgaagcgactgcggagataaatgatgaaggtacggtcgttatcagagtaccgcagccttcatcggagataattgttgacccgggcaacgtgaaaacaattgcagaggattcgaatcctctctttgacggcagcacatcagagggagtgaaagcgtatatcaattccttcaatcaactcaagaagaaagctggtgaagcacaggttgagctgattccaaattacgatacccttttggatcgcgcaaaactatctgcggagcagattgtcaccgaaacagtccatggagtatacggcagcgacaaaagtgtggaagttgtatttggggaggaatgattgtgtccgagataataaaacgcgatgattctgaaatcatcaatgaggaagataaagataccgaaattattgagaataaatcaggagacgccgaattcattgaaacggagtgcgctgatacagaatcgccggaggataaaaaacacggagccaagaaatggcttgtactatcgcttgttctggttgttgttgtactgattctgggagtggttggcgtaagactgaagtgtcagacgagtgcctacgagctgggtgaaaagcagcaccatgttagcaataaagcgacgctgtcaattgattctcttcgtgaggttcataagctagaagtaattgacgttgattcggtggtatatattacagatgttgagaaccaggatcctgatgtcaaatcatgggtcaaaatatcgggaacaggacattttgttgtcaatatggacatggctgaatacatagttgacaaagaacgcggaagcgtattgatccgtgctccaaagccgtcctttgacgctgacagcatagatattacgcccgagctgttgtacgcgaaagaaatagtatttttttacggaaacgtgcaggcgggagaacagcttgccaaaatacagcttgatgagggcaaaagaaagatacaaaacagaattgaatccaacgaagaatattataatatcgctgcagacaaggcaaaaaagatgataaaaaatcaggtatacgccttgaatgccgataacactgatatcaggatagatgttgagttttatgacgaatgagatttcaatgtaaaatgaatggcggtgaggcagaatgatcgacctgaatcatcttgaacaatacagggaaaataaccgaatcgaggcgaagcgcgctctcggtggtttgccgcacagcatctgggagacgtactcgtcctttgcgaatacgtttggcggaatcattctgctcggcgtggtggagcataaagacaagacgcttcattcggtcaatctgcccgaccccgaggagcttgtgagcgaattctgggagattgtacgcaacccaaaactcaccagcgtgaatattctctccgccaatgacgtgagaatcgaggaggtcaacggcgaccgcatcatcgtcatcacagtgccgcgtgcggagcgtttttataagcccgtgtatgttgacggcaatcccgtgaacacctaccgccgcagcggtgagggcgattaccgctgcacgcaggaggagtatcaggcgatgttgcgcgacgcggcatatgcgacgcaggatatgcagaagttagagcagtacgatgtgagcatactggattttgagagcgtgcacaaataccgagaacgggtgcatgaatcccacccgaatcacgtctgggagactcttgacgatgaggaattcctttttaaaatcggagccgtcaacattggggagcagggcatacgtcacccgaccgccgcaggtctgttgatgtttggcacctcggagattataagacagaactatccgaactactcgctcgattaccgcgaagccgactatcagcttgtgtctgcttcgggcgattggagcggaaatgtctttgatttttacgaagctgtttacggcagattgaagccggcgttgcccgacaatcccgtgcgaatggctgcaagagaagcacttgccaactgtcttgtcaatgccgattattacggcgaaggcggcgttgtgattatccgacgtgaggacagaatcgtcctttcaaacccgggcgatttccgcatagaggtcgcggcggcaaaaagcggcggcttttccgacccgcgaaacggcttgctgatgaagatgttcaacctgattgacatcggcgacagcgcgggcagcggtatcccgaatatcttctacacatggaagcagcacggctggagtgagccgacgatcaagcagaccgtccacccgaaccgaatcgaatttctgctgccgctgatgaagcgcggcgacaaggtgacgagaatcaagcaggagggcaaaagggcagagatgaagtccgccttgaaaagagcgatgatcatcgactacctcaccgaccatgcggagggcagttttgaggagctgacaagcttgctcggagtgaagccgtccaatacaaaaaagctgcttgatgatttgattgcggaggagattgtcacccttacggaaaacgggatgtatcttttgaaggcataagaatcgttatttctctgtggtttatgataggattagcttcttcgtaatttcgattacagaattattgcgtaattagattaacattttttctaatttggaatgttgacatatatggtatatttaattataatttaataaagatgggattatatgttgacaaataataattattctgtataatataattaggttgtatcataccaagaacaatcaggttactatgataaggtagtataccgcaaagctctgacacctcatcttcggatggggtgttatcttttttaggaggttattatgaagtacattatcggtttggacatgggtatcacatctgtcggttttgcttcaatgatgctggatgataataatgaaccgtgtcgtattattcgtatgggttcgagaatctttgaagcggcagagaatccgaaggatggttcttcgttagcggcgccgcgcagagaaaaccgcagtatgcgccgtcgattgagaagaaaacgccatagaaaagagcgtatcaaaaacttaattattcaaaataatatgatgactgcagatgagattgatgcaatatacaacagcggaaaagaattgccggatatttataaggtcagagcagaagctttggataggaaactagatactgaagaatttgtccggttgcttattcatctgtctcaacgaagaggcttcaaatccaaccgaaaggttgacgcaaaagaaaagggttctgaagcaggaaaactcctttctgcggtcaaaagcaacaaagagttgatggttgagagaaactatcgcaccatcggcgagatgctgtataaggatgaaaagtttgcggagtttaagcgcaacaaggcggatgattattccaatacttttgcccgttcggaatacgaggaagagattagagaaattttccgcgcccagcaggagtacggcaatccgtatgcgacagaggaattgaaagatagctatcttgaaatctatttgtcacagcgctcgtttgacgagggacccggcggcgatagtccgtatgccggtaaccagattgaaaagatggttggcagctgtacgttggaacctgatgaaaaacgtgcggcaaaggcaacattttcttttgaatactttaatttgctgacaaaagtcaacagcatcaaagtcgtatcctcagccggaaagcgttctttgaatgaagacgaacggaaaagggtaattaagctggcttttgcaaaaaacgcgataagctatgcttctatccgcaaggagctgaatctcggcgacggtgaaaggtttaatatctcttacagtcagtcggacaagtcaatcgaagaaatcgaaaagaaaacgaagtttacctatctgactgcatatcatactttcaaaaaagcatatggttccgtatttaacgaatggtctgcagaaaaaaagaaccatctggcatatgccttaactgcgtataagaatgataacaagattaagaaatacctgaccgaaaacggctttgacgcggtggaaaccgatattgcattaacactgccttctttttcaaagtggggaaatctgtccgaaaaggcattgaacaaaataatcccgtatcttgaacaggggatgctgtatcacgacgcctgcacagcggcaggctataactttaaggctgatgataccgataagcgtatgtatctgcccgcgcatgaaaaagaagcgcccgagctgggtgatattacaaacccggttgtacggcgcgcaatttcacagacgatcaaggtggtaaatgcgattatccgcgaaatgggcgagagtccttgctttgtcaatatcgagctggcacgcgaactcagcaagaataaagcggaacgcagcaaaatcgaaaaggggcaaaaagagaatcaggctcgcaacgaccgaattatggaacgtttaagaaacgaattcggccttctcagtccgaccggacaggatttgataaaactgaagctgtgggaggagcaggacggtatttgtccatactctctaaagccaatcaaaatagagaacctctttgacgtgggatatacagatattgatcatattatcccgtattcactcagcttcgatgatacatataacaataaggttctggtgatgtcttcggaaaacaggcagaagggcaaccgaattccaatgcaatatctggatggaaaacgcagggatgatttttggctgtgggttggcagctccaacctgagccgcagaaaaaaacagaatctcttaaaagagactctgtctgatgatgatctgtccggctttaaaaagcgcaatttgcaggacacgcagtatttgtcgaggttcatgctgaattaccttaaaaagtatctgacggtagctccgaacgcaacaggacgtaagaataccattcaggcggtcaacggcgcggtcacatcctatatgcgaaagcgttggggaatacagaaagtgcgcgaagacggcgatactcaccatgctgttgacgctgtcatcatttcatgtgtaaccgcgggtatgacaaaacgcatttcagagtatgcaaagtataaggaaacagagtatcaaaatcccgaaacaggcgaatactttgacgtaaataaaaatacaggcgaggtaatcaaccggtttccgatgccgtatgcatggttcagaaatgagctgttgatgcgttgctccgaggatccctcgcggattctccacgaaatgcctttgccgaattacgcaacagatgaagcagtcgcaccgatctttgtttcccgtatgcccaagcataaggtcaggggctctgcgcataaagaaacgatccgccaatcattcgaggaagatggtaaaaaatttacggtatcaaagactccgcttaccgatttaaagcttaagaacggcgaaatagaaaactactttaatcccgaaagcgacgtactgctatataacgcgttaaaagagcggctgatcgcatttggcggagatgcaaaaaaggcgtttgaagcgccgttccataaaccgaaaagcgacggctcagagggaccgcttgtaaaaaaggtcaagcttatttgtaaatcaacgctcaccgtgcctgtattaaagaataccgctgtagcggataacggttcaatggtgagggtggatgttttctttgtcgaaggcgagggctattacctcgtaccgatatatgtctcggataccgtgaaaaaggaactgccgaataaagcgatcgtcgcacataaaccatatgaggaatggaaagagatgcgggaagaaaactatgttttttcgctttatcagaatgatttgattggtattaagttaaaaaaggaaatgaagttttcacttgtacaaaagaatagtaccttgccaaaaaacattaatgtaaaagatggactattttattataagggtacaaatatttccggtgcaaatatatcggttattaataatgataatacatatacggtggaaagcttgggtgtaaaacgtattcctgtaatagaaaaataccaagttgatgttttaggaaatgtttccaaagtgggtaaagaaaaacgcgtgaggtttcaataatgggttatcgggtgatttttcttgcaaatccggtcaagttaagcactaaaaacgaacagctgttgatagataacggagaagtgacgaaagtaccgcttgaggatatcgagtgcattgtagcagatactctgcagctgaatattactgcaaggctattgacaaaatttgccgaatacgctatttccttctatgtgacggatcagggacatcatccatgcggtgtattcattccggtcagccgccacagcaggcatatgtctgttttgcaatgtcaaatcgacatgacgttgcctgcaaagaaaaaactatggaaacagattgtacgccggaagattgagaatcaggcaactgctctgaagctttgcggagttgaaggatggcatgagattgattgcatcaaaaatatggtaaaatccggtgacagtgaaaatatggaggcggttgccgccgcaaaatattttcggctgatgtttggaaaatcgtttgtcagagcacaggagaacggtattaacgctgcgctgaatcatggttacgcaattttgcgcggaacaatcgaaaagtatttgatcgcttacggatatgaacctgcattgggtatctttcataaaagcagcctgaacagtttcaaccttgcagatgatttgattgaagcctaccgaccgcttgttgatttgtttgtaaaagaatatgtatcagaggatgaagagctgaaaactgcgctaaaggcgcagctggttaatctgctcaacgctaatgtcgttatagacaacaggcttttcgcttgtgcaagagcgatcgagctgacggtcagcagtctgaccggttttatccaaggaaacaaaaacgaattgttattgcccgctattattgatttggaacagcataggtatgaataaatttatgagaatgatcgtattctttgatttgcccgtaaaaacaaaaacccagcgtcgggtagcaacgcagttccggaattttttgttaaaggacggttactttatggtgcagttctcggtttactgccggatatgcaacggctatgacgatgttgaaaagcataagcagagaataagaaataataaacccgacaacggttccgtgcgtttgcttgtgataacagagaagcagtatgaaaaaatggagttgattattggcaatcgagtgacagaggaagaacattccgtgtttgaacaattgtctattttttgaagaaatcaagataataataggcaaatacaatgatttttccaatacaaaaaacctgataaacgtagtnnnnnnnnnnnnnnnnnnnnnnnnnnnnnnnnnnnnnnnnnnnnnnnnnnnnnnnnnnnnnnnnnnnnnnnnnnnnnnnnnnnnnnnnnnnnnnnnnnnnnnnnnnnnnnnnnnnnnnnnnnnnnnnnnnnnnnnnnnnnnnnnnnnnnnnnnnnnnnnnnnnnnnnnnnnnnnnnnnnnnnnnnnnnnnnnnnnnnnnnnnnnnnnnnnnnnnnnnnnnnnnnnnnnnnnnnnnnnnnnnnnnnnnnnnnnnnnnnnnnnnnnnnnnnnnnnnnnnnnnnnnnnnnnnnnnnnnnnnnnnnnnnnnnnnnnnnnnnnnnnnnnnnnnnnnnnnnnnnnnnnnnnnnnnnnnnnnnnnnnnnnnnnnnnnnnnnnnnnnnnnnnnnnnnnnnnnnnnnnnnnnnnnnnnnnnnnnnnnnnnnnnnnnnnnnnnnnnnnnnnnnnnnnnnnnnnnnnnnnnnnnnnnnnnnnnnnnnnnnnnnnnnnnnnnnnnnnnnnnnnnnnnnnnnnnnnnnnnnnnnnnnnnnnnnnnnnnnnnnnnnnnnnnnnnnnnnnnnnnnnnnnnnnnnnnnnnnnnnnnnnnnnnnnnnnnnnnnnnnnnnnnnnnnnnnnnnnnnnnnnnnnnnnnnnnnnnnnnnnnnnnnnnnnnnnnnnnnnnnnnnnnnnnnnnnnnnnnnnnnnnnnnnnnnnnnnnnnnnnnnnnnnnnnnnnnnnnnnnnnnnnnnnnnnnnnnnnnnnnnnnnnnnnnnnnnnnnnnnnnnnnnnnnnnnnnnnnnnnnnnnnnnnnnnnnnnnnnnnnnnnnnnnnnnnnnnnnnnnnnnnnnnnnnnnnnnnnnnnnnnnnnnnnnnnnnnnnnnnnnnnnnnnnnnnnnnnnnnnnnnnnnnnnnnnnnnnnnnnnnnnnnnnnnnnnnnnnnnnnnnnnnnnnnnnnnnnnnnnnnnnnnnnnnnnnnnnnnnnnnnnnnnnnnnnnnnnnnnnnnnnnnnnnnnnnnnnnnnnnnnnnnnnnnnnnnnnnnnnnnnnnnnnnnnnnnnnnnnnnnnnnnnnnnnnnnnnnnnnnnnnnnnnnnnnnnnnnnnnnnnnnnnnnnnnnnnnnnnnnnnnnnnnnnnnnnnnnnnnnnnnnnnnnnnnnnnnnnnnnnnnnnnnnnnnnnnnnnnnnnnnnnnnnnnnnnnnnnnnnnnnnnnnnnnnnnnnnnnnnnnnnnnnnnnnnnnnnnnnnnnnnnnnnnnnnnnnnnnnnnnnnnnnnnnnnnnnnnnnnnnnnnnnnngattataccataccaagaacaattagggaactacaacttatagtcagcttttgcaagacatgaaatgattataccataccaagaacaattactgaatagcagctgacgattcgctgttcatgagctgctcgagctttgcgtcgtcataatcgctcaagccgccctcagggtagatcctgaccatgaccatcgcaacgggtttcatgcctgatgtgatgaccagatcgtaatagccgggagcattcgtctcgggatgagcgtagaaggagccccatgcagcgccctgctcctcgggctttgtcagctcggtcttgggcacgtcgtcgttcagcgcggcgacgaatgtgtcggtataggccgcggcgtcatcggaatgaggtacgagatatgccgccaaaccgctggtctgctcggtctgcggatacagctctatccactcgctttgctcaaaaacgaagcggatcttatcggcggacgcttcccatccgttaacaccttcctcggtgccgacctgattgccgttcagtttcaaagcggagattgccggagcgtcgccctcgtcctgattcagggcatacagcttgccgggcacgggcttttctgccgatttgtcagccgacgcgtcatttgctgagggctttgcggtcgttgtctgaacggtggtctgctgctgtgtctcggtctgtgagctctctgcccttgaggagctgtctgacgattttccgcatccggcaaacgccaggatcgctgcggctgcaagcaccgcgctcagtattcttttcagtaacatcaatattcctccttgttttttgtttgcaataacttgttctgacaattatatcataacacggaaaactgcaatattcaaccgatctatcaaaatgttttgcggaaacatcccctcaggatactcaactgcgtgccgcctgtattttaattgatttttcgcgtgatttgtgataagattatttcagaaaaatctagtgttaaaaaggatgtataatatatgataatgcaggtcaatcaggtcgtttcaaacggcagaaatcaatttgaaatttttgaaaacggacttctcctgtacagagcctcatctccgttttttaagcccggaacgcccgtcggcggcgacgaagtccgcaggctcattctgacggacgttttcaaccgtttgttgttgtttaccgactataacgtgttcgaaaacctcgtcgcttccgcgatcccgatgagctggctgttcaagggcgcaaagcaggtgcgccgttattccgtgctcaacagcgaaaatcagatcgtcggacgcttttattttgagcagaccggcgtagcgaaatccaagctcgttttggaatggcgcggaaggctgatagtcggttatcgcaaggaagcgggcaagaaggaggtcgtctccttctatgacggtgaaacgcagatcgggcagctcacaaagccaaacgctgtcgtcaataactgcgactgctatctgctgcattttcttgacaacagtcttgaccgtgagatcgccgctttctttacgatttattatgattttctctatcacaaccacagcggagagctcatgaggggcaggcgtacggatgtcgagtacacctttgaccggtacaacaaaatgttcaacaagaattttataaccgataacttcggcaaggaagaaaacgagcgcgtggagcagttcatcaaggacgcgtacaaatcaaggaaaaagaaataactcagccttggagaatgtcttatgtatctgaaaaacggtttgattgaattcttaaaagtaaaaaacgttatcctgctgattttgggcgtgattttcacttcaatttcattctccctgatgacgcagctggtcgtaggactccacggcgattttttatcgattatccgcgccggcagtctgatcgcagcgtttgtgtttttcgtctttggagtttcgatgatcgtatattcgagaatatcgcgtatgatgataaatgaagctgtctttttctcgggatatttcgagggcgatctgaacggctatgtcgatttcgcggagcttgccgaggtgacgggaaaaacgcaggagcagattcaaagccgtctgagatggctgagtccgctgtatatgcagaatttccgcgttatcaaaacagtaaattaccgctacccggagatcatcgagctttacagcaagaccgtcacctgctcctgccgcagctgcggcggttggatggaaaagcgcgtgtactttgagggtcggtgtccgtattgcggcagctccgatctgaccgcgcaggtcgtgtcgggtcagcgggtctacttcatcaacgacaacacaacccgcaagccctataaccccgcctattacgagggctcgccgcttcagccaaagcgcatcggatacgccgtcggcttcggcatcgagctgttctttttccttatttttctcattatatttttgacgatggtcaacaattacaacaacgagccgtatttcagggatatgttcagcaacagtatgacgtctttcagtttgttccggtcgggtctgctgaatgcgatcatctttttcgcgttcgccctcgcggcgatagtgctgacagtcccgataacattttcccgcatgtcaaacattgaacactcgcaaagtttagcgagggatttcgcgcaatggcaaaagccgtttataagcctgcaggagtttgacaggatgcaaagggagaagtactcttacagcaccattccgcccgaaaagcggtataagaatattgtggaagcgatcaaggagggctatctgcgcggctgtacgcccgagatgcacggcggcgtactgaggatagcgctcgcaaagcagatcgtcaaggatcgctgtcccggctgcggcgcaccgatcgtcggagctgtcaccgaaaattattcatgccgctactgcggacgcgtgattactggcgttatccgcaagcagtgaacggaaagaaaatcaaaagaacagcaacggtggcagtgaatattctaaaataacgaacaatgaaaccggcttggcgtaacagaaattacaccgagccggttgttatttttcgtacaagtatcttttcagcaggaaagtcaggaaataggggaaggtatagaattttccgttaaagccgatataatcgcggtttcttgcgacttttgcaaccttgcgcaacaaataaaccgcccgggctttcacccgagcggtttaagataatattgtatgatgttatttcttaacgatctctacccaccacaactcagaatactaatgcgtgtatctgttgatcttttcgttattgttattacagcatacagcggcacatttaccagcccgtcatcatcttcccggtaatttgccattgaagctctgatactgagcgcaggtttgtatttgtcccgatagattttcagacttttagctttgaggttttcttccgctttgacttccaacggaatgactttttcaccatcgtcgagcaggaaatcaatctcgcagctatttctgtcatttgtatagtagtagatgccaaaatcagaggtggctttcagctgttgcaggacatattgttctgtcaatgctcctttgaattccttgaacatatcgttgccgtcaaggagaacgcttttgcttattcccgacatacagccgagcagtcctacgtcaagcaaaaacagcttgaatgcttttaaatcttcataggctttcaacggaatattcggtgttgtaatgcggctgaccttgtgaacaagtccgcagtcacacaaccacataatagctgtctcaaaatccttggctctgccaccctcgcgcacaacgccgtaaataaattttttgttttccttggcgagttgtgagggaatgctgttccataccattctgattttcgggacaatctccgacggcgcgtgcttggagaaatcctgttcgtatgcttcgagaattcgtttttgcacttcgcgtacctcgttgaaatctttgttatgcgaaaaacgcagaacaacctccggcatacctccaataaaataatattgcttcaacaggtaaataaactgctcggaaaaagagctgataagtgcatagtcgccgctgttgagtaacttgtaaagctt

SEQ ID NO: 985 - DNA, 18120 bp, synthetic construct
  source 1..18120: mol_type = other DNA
  misc_feature 1..18120: note = Synthetic
gttagtccagcaaaaatcgaggctggtgttattggctttcttggagatggagatgcagggattagctttgttgtagtaaatagagataccgtcgaaatctacatattttgtcgtcaaagaggtgttattcgcgttgtccggaatcacgatcttgcggttgtcgccgtaaaccctcgcacgaacgagttcgaggctggcaccgttgttgatggtgaacagatccatatcgctctttgcagagcagtcaaagccgttatgctgtctggtgcccatgtcgatgtatatgactctgcctgcgggaacttcaaagccgcccttgtcgttcaagccctttacattgttatctaacttgaagcccttctttgcgtctgcctttacatactgattcattttgagaacgacgatgttgaagtccttgccgctgtcgatgccctgtgaccaagcgtcgataaaggaggtgcagcccttcttcactgagcttttgccctcgatgacatagagctcggttgtgacgtacttgctcgggatcgacgcgttttctttgagcactgcttcaaagattttgttgatatctgccaagctattgtgcaggtcggtggcagcgttttcaaattttgcgtaaggagattcgtcctcgttgacggtgatgatgccgttgtcgatctcatattcctttacgcggaactgcattccgttgagcacgttgatgatggcgtaatccatcaggacttgttcttccattacgcggatctctgcgttgatggcgtcaactgcaccgtagtagtcgggagtattggtgaagctgtgttcgccaaggtctgctgcaaccactctgtccatcaggtagttggtgagctggcggtagccgttctcgttgttgttggaggtgcgctgacccttgaggaagcggagcatttcgtcaaagtttgcctgcattgcactgacgttgcacttggggtctgcgaggatctctttgtatgccttataggtggtgttgttgatcttgtcgctgccgtcgcaggtgatgttatccttgttctcgtcaatgcgctttaacgcatgagcaaaatctgctgcgaccgtgtctgcctgaactctgaaatccttggtgtcgatgttgccattgatggctttaagctggttcatttgcagctgatggtagttggctgtctgtgtggacagctcctttgtcgcgtcaagcaccttggctatctcttcctttatctctgcggtgctcttgtcgatcttgtcgagtatatcctgatttgagggaccctcatcctcaatgccgaggaacatattgaggatcggcgttaaacccacctttgtaagctccggaccgatgattttccatgctgtgttttgtaagaatccaagggatttgtccttaaagtaatctgtgaccgttgaggtgagctgtgtggtgatggaatctttattttcggctgccgagactgggcttactgccattgagcctgccgataaaacggtgattgcggataatgtggttgcgatgattttggttttgatgttgttggtctttttcatggtgttcactccttttgaataattggtattggttttgttgatgatgtttgttaggttttgatttgtctttttcattttgaaagctcctttcgttatttaggttttgttttgttttctttactgtaactacagtatatcaggtcgatctttgcaacttctttgcaaatttctttgttttttgaaaatgtttcaaattttcttttcagccgttatttgtgggttgtttccttgactgtgattaaagtatatcaggttgatatttgcaacttctttgcaaatattgaaaaatttttatttgcaggtgcttatgatataatgataaaaacggaaaaaggagcggtaaaatgaaaaggattctcggcggcaaagcgtttacggcaacgattgccgcgtttgtcattctttcgcttgtatttgttgttgtgcaatgcgttccgtttattgccgaggactttacaaacaacatgatgagcgttatgctttgcggagaatactctgtggacagcggagaatggcagagcattgaccccgaacaaagtattaaagaccattttcacaaaatcaccgtaaggggcaagcttgatgaaacggcggttgcttttgaaattttagccgtctcgtcaaagaacgtttggttcaccttgaaaaccgccgacggagaatatgaaatatacaatcgccgcttcgctcccgatatacccgaggaaaacttttttcctgaggacaaaatgctgaacactcccggatatcaggtctttcaaatcggcacagatcaattcccggaaaaagtcctcaacggagaacaggaattaatactggaggtcgaatacccttacaatttggcaacaaggagcttttcggaatgcttctctgtcacatacagcaggtacgacggattatataaccaactgttctttaagtcgctgccaagtgttttgatttttgtattggtatgctttttcggattgtttttcttcccggtttccggctttgtattgggaaaaatcaactataaatatctgtgcttcgggctgctttgctttttctggggactgtatatgataacgcagtcgctcagcaattttttgaacctgtggatcaccgatgaagtcatgtgcctgtttgcggttaaaatcatcagctatttgtttgtgacgtcgatattcctatatctaaaatccaatttacagaggccgccgacaagggcaatagcaaactgcgctattgtcgtgtttttccttaccgttgttgcagccgccgtgcttcaacttacaagcacagtcgatttaacggcatcagagccgaatatgtttatcggcatagcggtctgctccgttataatgatcgcgctgctcattaccgagatccgcggcaaccgcaacgcactggtattccttatctcgtggacgccgctgatcctgacgctggggcttgatattctcgatcagtacatccatcttcccggctcgcatttctttaactacggcttggctatcaccatggcgtatcagatcgtgcgcctgatatttgaccttcgctctcagtataaggaagcgatccgatatcagcaaatgcaaaaggaattgtatgaagccaaggtcagcgttatggtttcgcagatccagccgcactttatgtacaacgcgctcagctcgatcgcaatgatgtgtacgctcaatcccgaaaccgcacaggaggcaacaataacctttgccgattatctgcgcggcaatatggattcgctcaagcagactgctcccgttgcgtttgaaacggagcttgaacatttgaaaaaatacttatacatagaaaatctgcggttcgccgacctgctgaacgtcgaatacgatattcaggcaacggacttcaagctgcctctgctcagtatccagccgcttgttgagaacgctgttaagcacggagtcggaatggcggaggacggtggtacggtcaaaatctccacacgagaaacagaaaacgcctatgaagtaatcgttgaggacgacggcgtaggctttgatgtcattgagaaaaagaacgacggacgttctcacgtcggaatggaaaacacaaaaaaacgcctgcacgatatgtgcggcggagaagtcattattacaagcgtgatcggaaaaggaacaacagcaaaagtgattttacccaaggagggacaaccggatgagaatactgtgcgttgacgacgaaccgctggcactccaaatgctggagatgtcggtcaaaaaagccaagccaaacgaggaggtttacgctttcagaaagccgaaagagctgctcgaggaagctcaaaagggcggctgcgatattgctttcctcgatatccatatgcgcggaatgaacggcgtggagcttgcaaaggagctcaaagccgtcaaccccaaaatgaatatcatttttgtgacaggcttctcggattatacgggcgacgccatgagcctgcacgcttccggctacattatgaagcctgtcaatcaggcaaaggtggagcaggagcttgccgacctgcgttttccgatcgtccctaagaacaacgcaaagctgagggtgcagtgcttcggcaattttgacgtgttcacacccgacggtgcgcacgtccgctttgagcgcagcaaatcaaaagaggttttcgcatatcttgtacacaaacagggcagctcctgcaccacgagagagatttttgctgcaatctttgaggacgagccatatgaaaagaagctgcaaaatctgctgcaaacctatatctacgcaatgataaagagcctaaaggcagtcggcgcagaggacgctgttgtgcgcagctacaacgctttggcggtcaatcccgatgtgctcgactgcgactattaccgctttaaggagcttgacgcaggcgcggtcaacgcctatcagaacgagtatatgagccagtattattgggcggattttttatatgacgaatattaggggcatatactattctctgataaacgcaacactaaaataaaagtaaaagactttttatttatttcatttttctattgcaattttattttttttatgtataataaagatagattgtatcataccaagaacaattaggttactatgataaggtagtataccgcaaagctctaacaccctgcttttggcagggtgttatctttttcgtatctttttcgtatcttttttacagattatattatgtgatatattgacagctcgctcatgattatatataatttgtattataatggtaaattttaatacaacatacatgtaaatttagtgcaaaattcaagataagaggtaagtttatgaaatatgcagttggtttggatatcggaatatcttctgtagggtatgctgtaatgatgttggacgaaacagatacgccgtccgcaatacttaaaatgggaagcagaatttttgatgctgcagaaaaccctaaagatggctcttcgttagcagctccgagacgtaataaccgtggaatgagacgaaggttaagaagaaaacgtttcagaaaagaacaaatcaaggatcttattgtaaaaaatgggatcatgtcatatagtgatattaatgaaatttataattccggcaaggttctttccgatatttattcaatccgcgccgaagcattaaacagaatcctcacaaaagaggaatttgttcgtctgcttattcacctttcacagcgcagaggattcaaatccaatagaaaagttgatgcatcggattcaaaatcagaagcaggcaaattattggacgcagtaaacaaaaacaagtccttgatggaggaaaagcattatcgaaccattggagaaatgctcttcattgatgaaaagtttgccaaaaacaaacgtaacaaagcagaggattacgccaacacctttgctcgttcggaatacgttgctgaaataaatacaatttttgacgctcagaaagtctttggaaatgaatacgcaactgacgaattaaaagaagattatctcaaaatctatctttctcagcgttcgtttgacgaaggtccgggaggcaacagtccgtatagcggaaaacaaatcgaaaaaatgcttggcaaatgtacctttgaaaagaaagaatttcgcgctgtaaaagcttcttttacttttgaatatttttctttgctttcaaaagtcaacagtctaaaactcaaatcgtcaactgaaaaacgctttctcaccaaagctgaacgcgatgcagttatagcactttcgtttaataaaaagaacatttcgtatgcttccatcagaaaggaactcaatcttcccaatgacacattattcaatatttcttatggaaacggcgataaaacagtagaagaaatcgaaaagaaaagtaaattcacttatctaaatgcttatcatacttttaaaaaagcatttggagattcatatataaactggagcaccgataaaaagaatcatctgggttacgctattgctctgtataaaaatgataataaaatcgctgaatatctaagtgagcatggttttgataagtctgaaatcaaaattgctttatcgcttccgtcaatacccaaagcaggaaatctttcgctaaaagcaatgaacaaaattatcccttatctcgaagaaggcatgatttataacgaagcatgtaaagcggcaggatacaactttaaggctgatgaaaccgacaaacgcatgttcctgccagccaacgaagaagatgcgcctgagcttggagatatacgaaatcctgttgttcgccgctcaatctcacaaacgataaaagtaacaaacgcaataattcgtgaattcggagaaagcccatgctttgtaaatattgagcttgcaagagaattgtccaaaacaaaaaaagaaagaaatgaaatcgaaaaaaatcagcttgaaaacagaaaccataacgaagaaattgtaaaggaattgaaaagcaccttcggacttttacagccaacaggtcaggatattgtaaaatataagctttggaaagagcaaaacggaatatgcccctactccttagaaccgattttgatagaaaatctttttgatattggctatactgacattgatcacataatcccatattcaataagctttgatgacacctataacaataaagtacttgttctctcctcggaaaacagacaaaaaggaaaccgaattccgatgcaatacttaaccggaaaaaagaaggatgatttttggctttgggttgacaattcaaacctaagggcgcgcaaaaagaaaaatctacttaaagaggagatcaccgatgatgatatttcaggcttcaagaaaagaaatttgcaagacactcagtatatttctcgctttatgctaaatttcttaaagaaatatcttaacactcagcctaattcctcaggaaagaaaaacaccataatcgctgtaaacggagctgcgaccgcatacatccgcaaacgttggagaataaacaaaattcgtgaaaacggagacactcaccacgctgtagacgcagttgtgattgcctgtgtaacagattcgatgataaaaaagatctctgaatactcaaagcacaaagagacagaatttgttcacccggaaactaaagaaataaaagatatcgaccttaggacaggcgagataataaacaaattccctatgccgtacaattggtttcgtgacgaactggtaatgcgcacctcaaataatcccacaagaattctacacgaaaagccgctccctaattgcggaacagatcaaaaggttgaacctatttttgtttcgcgtatgccaaatcacaaggttaaaggctctgcacacgaggaaacaatacgaaaaaaatatgaagaggataataaaacctactctgtttcaaaagtttcgctctcttcactaaaactcactaacggcgaaattgaaaactattttaacccctcaagcgacatgctattatacaacgcgctcaagcagcggttagctatgtttggcggaaacggaagcaaagcgtttgaagaaccattttataagccaaaaagcgacggaagccaaggtcctcttgtcaaaaaggtgaaaatacagagcaaatccactctttcggttcctgtactcaagggcacagctattgccgataacggttcaatggtaagggttgacgttttctttgtcgagggtgaaggctattatatggtgccgatatatgtatcggatactgtcaagccggaactccccaacaaagcgataatcgctaataaaccatatacagaatggaaagaaatgaaagagcaagattttttattttcgctttatccaaacgaccttataagaattaaattcaacaaagaaaaacaattctcgcttgtacaaaaagacagcactcttgccaaaaaccttttattgtcagaagggtatttttattataaaaaagcaagcatttcaagtgcatccattacaattattaataatgacaatacgtatactgttgcaagcttgggtgttaagagaatcccattaattgaaaaatatcaggtagatgttctcggaaacattcaaaaggtcggaaaagaaaagcgtatgaggtttagataatgggttatcgtgttttattcttgaccaacccggttaatctcagtgtaaaaatgaacagctgataattgataacggtgaattgacgcgtataccgcttgaagatattgaatgtgttgttgccgataccttgcagcttaaattcacagcatatactctttctaaattttcggaatacagtatcagtttttatataactgacatgtctcaccacccgagcggagtatttttgccattgagtgataatcacagtcgtcatatgtcggttttaaaaaatcagcttgaaatgactttgcctacaaagaaaaagctatggaagcagattatatatcaaaagatagaaaaccaagcaaacgtactcaagctctgcggaaagtcaaactggaaagaagttgacaatcttaaacaaaaagtcaaatccggagattctgataatatagaagcggttgctgcttccgcatatttcaagtttttgtttggaaaggatttcaaacgtgcctctgaatgcggaataaactctgctcttaattacggatatgcaattcttcgcggtacaatcgcaaaataccttatggcatacggctatgaaccctcgctgggtttattccacaaaagcagtcttaacagctttaatcttgctgatgatcttattgagccataccgtcctttgatagatttgtttgtcgcaaaaagcaccggttttgatgatgatttgacaactttgaaaaaagctcagcttgttaatcttttgaattgtgatgtaatcattgacaaaaagctttttgcctgcgcacgcgcaattgaatggacggtgagcagtctaacaagctttattcaacaaaaccgaagcgaacttctgctcccttcgctgattgatttagagcaacataagtatgaataagtttatgagaataattgtattctttgatctacctgttaaaacaaaagctcaacgaaaggtagcaacacgatttcgtaactttcttctaaaagacggttactttatggttcagttttctgtatattgccgagtttgcaacggatatgacgatgtagaaaagcacaaagctagaatacgactaaacaaacccgacaacggatcggtgcgtttattagtcataactgaaaagcagtacgaaaagatggaattgataataggaaatcttgtaaaagaggaagaacccaatgcgtttgaacagctttcaattttttagttttttgggattgtacaaaaatcaaatagtgtgatgtatgtttttttacagcaaaaagttcgatgaacctaggattcatcgaactttttgcttccctattataccataccaagaataattagggaactacaaccctctcttcattgacaagtctgccgcactcattataccataccaagaataattagggaactacaacctacttccggcagccctgctgtgctagtcaattataccataccaagaataattagggaactacaacacatcagttccacacgcgctgcaaaatttgattataccataccaagaataattagggaactacaaccgagaacactgttgtgcccgtgcaatccagattataccataccaagaataattagggaactacaaccaaaagccttataacgtgcttcgcttcgctattataccataccaagaataattagggaactacaacaccaaaagcgtgcacgataagacactgaaaattataccataccaagaataattagggaactacaacattgatactatactgcctttcggtattcctattataccataccaagaataattagggaactacaacggataaaagcactacggttggagaaatcgcattataccataccaagaataattagggaactacaacggaaaccatgacggaaatactattggttcaattataccataccaagaataataagggaactacaacaagtttctctgcgtcctttaacagacgctcattataccataccaagaataataagggaactacaaccaaacacccctgtgcctattgagaacgagaattataccataccaagaataataagggaactacaacagcggcaaaaggcgcgtttgtaaagaacaaattataccataccaagaataataagggaactacaactcaacttcttcatttgccgccgctcgcgtgattataccataccaagaataattagggaactacaacctcgccctgcgcaacctctaaagaaagcaaattataccataccaagaataattagggaactacaacccgcagacctcgttgatcgtcgcgctgtcgattataccataccaagaataattaaacagctccaatatatgggaacaaacggcaaagagttttggtgtgattccaaaacaggcttggatgcaattttgcaccaagcctgtgatttttattttttcaaattatttgttgaagatcgacataatgtcatagaaggtgtcgtcgtcgtcatctgtcttatcctttgtagctgtagaagctttgtcgtcgggagtatctacgataacgttgtcgatcaccggctttggtctttcaacctgtccgtcggcgttaaagcctgtggcaatgacggtcacgctcatttcgtcgttcatcttatcgtcgataacagcaccccagatgatgtttgcgtcatccgaaaccttgtcctttatcattgttgaagccgcgtcgatatcgtcgaggctgacatcggcagaagctgtgatgttgatgataagtccctttgcaccgtcgatcgaggtctcaagcagcggacttgaaatagccatatccgcagcctcaacagccttattcttgccagaggatgcgcccatgcccatgtgagcgtagcctgcgtccttcataaccgaggtcacgtcggcaaagtcgaggtttacaagacccggaagaagaatgaggtcggaaatactctgaacaccctgacgaagcacatcgtctgcgatcgcaaacgcgttctggagggttatgctctgctcggaaacgtatttgagtctctcgttcggaacgataataagtgaatcaacgtttgcagaaagctcggcgataccctgctctgcctgtgtcattctctttttgccctcaaaagcaaacggctttgtaacaacgcctacggtgaggatgcccatttccttggcgattcctgcaacaacaggagctgcgcctgtgccggttccgccgcccatgcctgcggtgacaaataccatatctgtatctttaaggagcgcagcgatctcgtccttgctttcctctgccgcttccttgccgattgccggcattgagcctgcacccttgccctttgtgagcttctcgcctatctgaatcttctgtgaagcctttgaaagtctcaaaacatgctcgtccgtgttgatcgctataaattcaacattctttacatccatagcaaccatgcggttcacagcgtttccgccgccgccgccgacaccaattactttgatttttggcatatattccagctcaatatccatttcaaacgccatttttacttcctccttgaatcgtgtttcacagtaaaagcacataatttcgtattttaatatttataatccatattaacatacttttgcaaaaatatcaatgcttttgtccttttttcttaaattttcctgatttatttttataaaaagcctgcgcatcgaatcattcccaagtttgtgcgtcggctgcaccgttgccctccggcgcgtatacaggctcttcctgaggagaatattccggctcaggctcccaccaaacctggttgtcctgattagggtcttcatacaactgcgaatcatagcccggatcgtcgtaatatgcctgatcgtcgtatggctcctcataatagttattgttgtcgtatacctgctcgccgttgtcgggctgagactgcgcggaagattccgcaggagccgtggttgaagaaatcaccgggcgcacggcggtttcggcaggcttgtagtgcgacatgcggtttgtgttgcaggtcgaaacgtcaagcgttccggcaaccgcaccggtattgttggggtcgagcttctctttgattatggtgatcgcggtcttgattttgtagtctatatcctcgggaagcccgatgttgattttgattctgtcgtcatagttcagggttatgtttgcagggtcggtcacgtcgaagccggtaatgtgctccacctcgtttttgtgcaggctttctgcaacatcctcaaggatatccggaatgttttcgtcgctgaactcaacatattttccaaccgttttgtcattgagctcgccgcaggtcagctcgggatatttgttgctgttgtcggtaagactgtctatgatcctgccctttgagcttaccagcagatagttgttgccgtccatgatgacatatgacggcacagcgtcggttattttgatcgtcaccgtatcgggtatcgcaaagccgaccttggcttcttcaacatagggcaggttttcaacgattttttcaggcgttgcctggatcgaggcgataaaaatattttgctgaagatttactccgcaaaaagcggtgatttgatcctcataataaaactcgtcgccctcaacgtcgattttttctgtcttgaacaaaaccgtgaggctcaaaacaattcctatcacgagcacaagggcgatcattccaacggagataagcacccttcttctgcggatctgcttttgcgtaagaggctttttgttgcgcttgataacctcgttttcctgcttgcggatcacccttgcgcgtttttcgcgcttttgcatttcggcgtattcgtctatgtaatagccgtcctcaaaatcctgcggctcaagactgcggatcttttcgtcactctcgcgcctgaatttttcctcgcggctaatatcctcgtaattctccttggtgcggtcaataaccgcctgctcaagtcttccgggcttgtgcttctttttcttttgcgcagtgcttttggactgctttgcagaggatttctttttcttctcctgctccttgtggaacttctgcgcctgctttgcggtgcttttgcgttgcttggcaagctctttcttttccttggggctgagagccataactaatcctccttttttaaattcgtgtatattgtgcggtttttcgatatatggcggatgcccgagagaaacctaatatatataaatcacgttagataaactcacggaaaaattgcagaaacaaccttgcacttttccgaagatccaattttatctgctgtattaaaaatattgcaaaggcgaccttcaacttttccgcaaatacaacctttgccccgccgttgatgacgtttaccaaataataaaacttcaaaaaggcggataaaagtgcatatcggcacctatatttttttaatgtctgcgcctagagaactgagagtgagctccagattttcgtagcctctctcaagatattttattccgctgatctcggttttttgttccgcgcataagcctgccgccacaagcgacgccgctccgcgcagatcggtcgcctcgaccgccgcgccgtacagggcgtcgacgccttcgaccacggcgaattttccctcggtgcggatattcgcacccatacgtatgagctccgaggtatggcggtatcggttttcaaagatgttttcaataaaaacggtcgttccctttgccacgcacgccgccgccatgagcggagcctgcgcgtcggttgggaatcccggataaggcatggtgcggatgatcctcattgaatccagccgctgcggagcccgaaaatctatctctccgtttttgcacaaaaccgtgcagccggcttcctcaaaaacaggaatgaccgaagcaagctgagaacctatgacgtcggtcagggcgattctggaacccgtcaccgccgcgcacgacatcaaggtcgccgctgcgatccggtcgggaatgatcgtatggcatgctccgttcagggagtcaacgccgtcgataacgaccacgccctcgcctgctccgtagatcttcgcgccgcacttgttcagatattcggcaaggtcgctgatctcaggctctcttgccgcgttggtgatcgttgttgttccgtgagcaagcgttgccgcaagcataatatcctcggtcgcgcccacgctgggaaatgaaagcgagagcttgcagcccttgagtccgtcgggagcggtgcagtcgagatatccgtgcttttctttgataactgcgcccatttcgcgaagcgcgcaaaggtggatatctatcggtctgggaccgatttcgcagccgccgggaaaggaaagcctcgcgcttcctgttcgagcaagaaccgcgccgagaaaaacgattgagctgcgcatcttgcgcatcagcccgtcggggatatcagatctgcaaacaccgtcggagtttatcaccaaggtcgaaccctcgcgacttgccacgcagcccagatatctgaggatcctgaccgaagcctcaacgtcggacaacatcggacaattaaaaatcaggctttctccgcgcgtaagtacagttgcggcaaggattggcagcgcgctgtttttcgcgccctgaacgctgacctttccgccgagcctttgttttcccttgattatcagctttgacataccgacaccctctcaaatagaatacctatacattctatgaggggtgcttcggtttgttaccgatgaagcatatttagtttggggtttggagtttggagttgatgtcgagcagaaaaaatgtattttaaaacacgtttgttcccgattgtatttatattttttgcaatagttttccattcgcccctacaaatttttgtacggaaatcaagataaaaccattagttatacagtcgggaagaaagaattcttccgaataaaacgtctcttcacgaccaaaattgtccattgtccattgtcaattgtccattaaaaaaacgccgtcgggaatgaacgcattttcttaacgaattctatcttcccgaccgaaactccacacttcacactccaaactccaaactaacaaacgtttcccatgatctttttgatcacggagtatattctttcgttggcgttcgttattgccattttgcgtgagttttcgctgtattttttcaaaatatcggggttcgagagcatttcatctgcttttttcataagcagctctccgctgagcttagattcctcgatgatctcagccgctcctgcattcacaagagccattgcgttgtgatactggtgattttcggcaacattcggcgaagggatcaagatcgccggttttcccattgcctggatctcgctcagagttattgcaccggcgcggcaaataaccagatccgccgccgccatgcactccggcatattgtcaatatattgtctgatgtcaagattatggcacagctcaagctgcgcgcccttttcgcggacgagctgagggaaccagtccccgtagcttccgtaggcgtggatgtgctgatatcttccgtcaataccgctgcgagccaccaaatctgcaactgcctcgttgatcctttttgcgccgaggcttccgccaaacgaaagcacaacaggtcgctcgtcaagaccgagcttcattctgcaatgctccttgtcggctcttaggatctctcctctgacgggattgccggtgacaaccacgtttgccttgtcaaaatactttttggcttcctcaaccgcgagcattaccctttgaacgcgctttgcaagaagcttgtttgtaactcccggataagcgttctgctcatggatcacgcaggggatccccattttggaagcagttctgatcaccggtcccgacacatagccgccggtgccgatacaaatgtcgggcttgaattccgaaattatccttcttgcctcaacagacgaggtcagcgtgcggtttaccgtttttacgttttccacaacgtttttgggtgacaggctgcgcttgaagccgcttatcacgatcgatctgatctcatagcctgcctgagaaaccagcctctgttccattcctcccttgttgcccacaaagagaaattttgtgtcggggcgtttttctttgatatatcccgcgatggcaagagccgggttgatgtgaccggcagtgcctccgcctgctagtaatacgcgcattgcttcctccgggttatatatagttgattttgttgtcgattattgtctttcgatatttgccgttcgcgagatcgaaaggataattcccatctgcgccaaaagcatgataagcgaggagccgccgtagctgaaaaacggcaggctgatacctgtgtttggcagccagtcggtgataaccaaaatattgagcaccacctggatcccgatttgggaggtgagtcctattcccaacagcttgccgaatttatcctttgctctcagcgagagcgttattcctctccaaaccaaaagcgcgaaaatcagcagcaccattgttgcgccgatcaagccgagctcttctacgactatcgcaaaaataaagtcgttctgaggttcgggaaggtagagatatttttgtcttgactgacccaagcccaagccccaaagtccgcctgagccgatcgcatagagcgaatttcttgtttgccaggtggtctgccacatatcctcgtcggtgtatatcaaagcctgaccccagccgtccattcggctcatagcataggacagtccgccggtgatcgccaaaagaagcacgactccgaccatcgcggctccgccgatcaaaagatacttggctttcattccgccgatatagagcatcaaaacagtgagcatggcgatgattacgataccggaatagtgcggctccaaaaacagcagggctgcgatggttccgaacaccagcacacctggaagcacgctgtagcgtgcaagctgcattttgttataatacttgctcgcccagtgagcaaagaacagaatcaccgcgaattttgcgatctccgagggctggatattgaacattcccagcgggatccagcgttttacgccgttactgggcaaaatcaaaaccagcacgagcgcgaaataggctatgcccaaaactatcggggcgattttgtgaagcttgttgtaattgaagaacgacatcactatcattcctactattcccaagccgataaaaatgagctgtctccaaagataataatagctgtttccctgagtatagtaggaaaatgcgtagcttgcagagaacatcatgatcgttcctattgtcagcaaaatcatgaggattatgcaaaacggaaaatctattcccattccgatcgcaaaccagccggctttttttgccttttttttacgtgagggacgaataaaatacttctcctgacggatcttctgctcggagtattcctcgtcatagatcctgttgacatctgcttttagaatcattcttttgttaggagccatagccgtttccctccttttacaaaattactgtcagcttaggatacgccgaacattacaagtaaaaatgatatcaagccgaaaatcgcagttactgcgctgaacacagcaacgattttgacttccttccagccgcacatttcaaaatggtgatggatcggagccattttgaacagtctttttccgtgggtcagcttgaaatatccgacctggagcataacggaaaacatctcgcaaagatagatgatccccagcggaagcagaagtatcggcatatctatagcaaaggtgagtccgcagaccagtccgcccaaaaacagcgagccggtgtcgcccataaacacctttgcaggatgaaaattccataccaaaaagcccaggatcgcgcctgcgcagcacgcgctcattgccgcaacgccaaggcagttgagcatcggcgcgataagcatgatcgaaacgcaaacaaagaaggttaccgagccgttgagaccgtcaactccgtcggtaaggtttacggcgttgattattcccacaatcacgatcgccgaaataat

SEQ ID NO: 986 - DNA, 16123 bp, synthetic construct
  misc_feature 1..16123: note = Synthetic
  source 1..16123: mol_type = other DNA
gggagaaagcaataatggatgctggagaaaacaagtgtgattggactgataaaaaatatatcgatcctattctcaaatgtatttagcaacttgtactgatgaattaacggtatcgaaaaaagctgcaagataaccgtaaaataggcggatgtcctgttcctgcagcgcaaaagacatacattcaaaaaaatcggcattcccctgcacggaggactgccgattttttataaaatattggttttgattcagaccttttcatgtcctgcgtgcaattatataattgaaagcgaaaagtaaagcaaaaaagctgaaaaaaactcagccttgcgaaccttttcgcctgaaaaaaacaattatataattgaaagcaaaaaaacaaagacaaccaaaaatatatgcatatatctgcgggaaggaaatgactatgaatgataacgaactgctgaaagggctaaaacaacacgatgagtcggcgatcgaagaaataatcacgcgctatactccttatgtatcgacagttatatataatctgtcacgagtgaagctgagcacgtctgacattgaggaagcagcggctgatgtgttttttaccctgtggagagatcccgaaaaaatacaggagggctcgctcaagggctttatcgcagccgtagccaaaaataaggctaaggaaaggctgcgcaaggcgcaggcgtcggataatatcattgatatagatgatgtggtcatggctgatgaatacacacttacggacagggtggatgataagctcctgcaaaaggatctctgcgatgcactcgatcagttcggtcagcccgacagagaaatcataatcaggtactactactactatcagactgcaccgaagatcgccgagcttcttgatatgaagcttgaggcagtcaaatcaaggataaaaagggcaaggacaaagctcagagcttttctcagtgaaaggggatattgatatgaaaacaaataatattttcgatcttatgaacggggacagagataatatttcagagcagacagttattgaagaaacaggagtcagcacggaaagggtaagggaaatttttatggataaggtaaagtcaggcaaaagcacaaaaaggcacggcagaaaggtatttgtcgtccttgcggcagcagcagctgtacttgcagcaggcgcagttacggcaggtgcaacaggcagctttaacggtaccttcggacagatgtttgcaggagagccggcagacggaatgtattcaggcggcaatgtctcagtcagcggcgatgaggtaaatgttgatttcaagggtatcgcaggtgacaagaatgatgtatacggtctgatgaccatcagtcccaaggacggcggcggctttgttgacgatacggatggctattacgtaataaatgagctgaccgaggacggactcagcggcaatgtaaaatgcacacgctcactttttgatcagttatctgcaaagctcttctatcgtcccgagggtgggaacggctcgatagaatactctttgcaggaagacggaactatagaggctctgatcggatacagcgatcacgaatacaatattatcggagaaacactgagcttcagcgaggattatgtgctcctttgccataccgacagagtattctatacatgggatgaatacggcaagcttatacaggagcacgaggatgaaaacgatcccttctggaaggacggcagcattatcgagcagctggagaagaaatacggcaatgagcttggggatgatcagagcatagactttgactggtacggcagaattgcagtgataacaaagaccaggctccctttgggcatatcaggctccgtaaagctcaattacaaggatacatccgtaaaatttgatgaagctgtcggcaaaaagaccacctacagcggcaccgaaaacatgatcgtaaaggagcttgaggtacagcccttctccgtaaagcttgatatagtttatcccacagataatcaggacgaggtatgggcgcttgcggaaaaggaagatcccgatgcaaagaataccatgactgttacaatgaaggacggaaattcatatacatcggataacactcccctgtaccaaagtgataatatgcagcgtctcacatacaccttctctgacggcttcaagacagttctcatagatcccgacaatataaagagcatagtttataacggtaccgtactttacgaaggatgagagatataaaaaggatcaccgcaggacagcagaaaaagcttgtcctgcggcgcaaaaacggactgcttcggcagtccgttttattcaatagctgatgttaaaaagaacacctgacggagattgaagtgtcccgtcatatctccttttctttgttacaccatatttcattgaatatttaatcagggattgacgaaacatcatcttttgtgttacagtattcatagcaaataggattctccttcgttatgttgatggttgcaaattaactgtaacacaggttcttcctatttgctattattttttgcttactgtaacatatcaattgtaaacctacacaagagacactatccataaagaaaaacggtcttgacaaatcgaaataatgtgatataatatatataaattgtatcataccaagaacaatttaggttactatgataaggtagtacaccgcaaagctctgacatcctgtttgccaaaaacaggatgtcatctttttttgcattttattgtacattgatgataaacacgatgatttgattattgacgagaaaaaagtatgatgataaaataatattaatttcatattttattggaggattacacaatgaaatacagtatcggattggatataggaattgcatctgtcggaagtgctgttatgttactcgacactaataatgaaccatgtaagatctacagacttgcttcaagaatatttccgaaagcagaagaaagcgatggttcttccttagctatgaaccgaagaattaacaggggaatgagaagaagacttcgtcgtaaacagcaccgaaaagaacgggtaagaaatcttatatgtgaaaagtttcatattgatgacagttatattgtttctttgtactgtgaagaaaaattgagcgatgtttacaaaattcgcttcgatgcacttgaaaggaaattaagtaacgatgaattgattagactcctgatccactattcgcaaagaagaggatttaaatcaaacagaaaagttgatgtttccgaaaaggatgaaaaaacagaagaaggtgctttgcttggtgcagtcagcgaaaatcataaactgatggaaaggaaagggtaccgcactatcggtgaaatgctgtattgtgatgagaaatttagcgtttgcaaacgaaacaaaggcggttgttattcaaacacattctcaaggaaagactatgaaaatgagatcagaacagttttttcattgcaaagaaaatatggtaatgaatattgtaccgaagagttggaggaaaagtttataagcatttttctgtctcaacgcagctttgacgagggtccgggcccgggaaaggatagtaagtactcgggtaatcagattgaaaaaatgcttggaaaatgtacctttgaaaaagaggaattcagagctgtaaaagcctcttacacttttgaatactttaatcttttatgtaaggtcaatgcaatcaaaatcatcaccaataaaagcaaacgatgccttactgacgatgaaagagaaaccatcaaacaacttgcattttcgcagaaagagattacttactctacccttagaaaaatattgcaccttaacgacagcgaactgttcaatatttcgtatattcttacagatgataataaaaagaaaggggcaaatgataaaccatttgctgcaagagattcggtagagaaaaaaacaaaatttaattacttaaaagcatatcatgcgtttaaaaaagcatatggagatgtttataatagctggaacaaagacaagcgtaataaacttgcctatgtattgactgtattcaaaaccgatagaaagatcaaggaacaattagcaaaagcagaattttcagacgaagaaatcaaaacagcactgactattccatcatttactaaaacaggcaatctatctgtaaaagcaatggacaaaatgattccttatcttgaacagggatatctgtacaatgaagcagcagaaatggcaggttatcatttcagggcagatgaaaaatgtgctggaatgtatctgcctgtcaatgcggcaaaagcacctgaacttcatgatattgtcaatcctgtagtacgcagggcagtatctcaaacaatcaaagtcatcaatgctatcatccgtgatatgggatgcagtccgacctatgttaatattgaattggcgagagaattggcaaaatcatatgatcagagaagcaaaatggagaaagagaataaaaatcaaatggctcagaatgaaaagctgatggaagaacttagaaaggaatttaaatttggtaatccaaccggtcaggatttgattaagctaaaactctggaatgagcaaaacggccactgtatgtattcgggaaaaccgatagagcgtgcaaggctgtttgaagacagctatgctgaaattgaccatattataccgtacagtatcagctttgacgatagaatgaccaacaaggtacttgttcttgcaaaagaaaacagagataagggaaaccgtttgccgcttgaatacatgacaggtaaaacagcggatgattttcgtatcagggtaaagacatctacgctgaggaataaaaagaaaatgaatcttttaaaagaaaaactgacagaagaagatacagaggtttttaaacagcgtaatcttacagatacacaatacatatcgaaatttctgactaattttataaaaaaatatctgaaatttgaaggagattcaaaagtggtttccgtagcaggtggtgcaaccgcctatatccgcaaacgttggggaatcaaaaagatccgtgctgacggcgactgtcatcatgcagttgatgcttgtgtaattgcctgcacaacacagggaatggtacaaagaatatctctgtattccaaatataaggaaacggaatatacagatgagaacggtaatatttttgatgtggatcataaaacgggagaagtaattgatcgtttccctctgccatatgcaacattcagaaaagaacttgaaatgttgacttctaatgatccgaaaaggcttcttggggagctgaatttgccgaattacagaggcgatgaagagctgaaaccgatttttgtttcacggaagactaaccgcaaaataacaggacaggcacatgaggaaacactgcgaaaacctgttgttgaagatggagaacgctatgttgttcaaaaggttgccctgacaacgctcaaactcgacaagaacggagaaatagcgaattattatatgccccaaagcgataccctactttataacgcactaaaagccagattgacggcattcggtggaaaggcagacaaggcattttcagagcctttctataaaccgaaaagtgacggatcgagagggccacttgtgaaaaaagtaaaaaccatagaaaagcgttcactcagcgtacctcttgcgaataatacagcggcagcggataacggctctatggttcgtatagatgttttttatatagacggagagggttattacattgtacccatatacgttgctgatacggtcaaaaaagagcttccaaacagggctatagttgctttcaaaccttatgaaaagtggaagttaatggatgataatgattttgtattttctttgtatcctaatgatcttataaaagtgacttccaagaaaaagatgaagttttcacttgtcagaaaagaaagcacacttgataaggaatatctgacacagacagaatatttgtattataagtataccgggattagtactgcatcaataaaggttattaatcacgataatacatataaaattgataatatgggtgtaaaaactcttctgagcattgaaaagtatgaggtcgatgttctcggcaatatccataaggtgaacaaagaaaaacgaatggggttctgacatggggtacagagtgatttttctcacgaaaggatgcaaactatcggtaaaaaatgaacaactgatgattgataacggagatacagcgaagataccactggaagatatcggttgtattgttgccgactctccgcaaatcagtctgaatatttatcttctgacaaaacttgccgaatatgccgttgcattgattattgatgataaaagccatacgccgagcggtgtttgcctgccgtttgcaaaacattccagacaccttatgctactgaaaaaacagattgatatgactgaaccgacaaagaaaagactatggaaacaaatcatacagaaaaagatcggaaatcaggcaatagtactgcagatatgtaatattgagcagtggaaagaagtagatagcaaaaaggcaatggtgaaatcgggagacacaacgaacatggagggaacagcggcggcaagatatttcaaattgctttttggaaaagattttacgagatcacaagaaaacaccattaatgctatgctgaattatggttatgcgattctgcgaagctgtattgcaagaacattggtagcttatggttttgagccgtctcttggggtacatcacagaaatacgcttaacagttttaacctcgcagatgatatgattgagccatttcgccctattgtggatttgtttgtgaaagtatatgccgaggaagcagaagagttggatactaaaataaaaattaaattagctgatcttctgaatatggatgttctgataaacggcaaattttttaactgccagagagcaatcgacttacagatacaaagtttgtccggaatcctcaacggaaataatacggaactggctttgccaacaattattgaattggaaaggcacaggtatgaataagtttatgagaatgatggtattttttgatttacccgtaaaaacaaaaagacagcggagagttgcgacaagatttcgtaactttctgctgaaagacggatattttatggttcaatattctgtttactgccgtgtgtgtaatgggctggatgctgttgaaaaacacaaacaaagactgaatgaaaacaaaccggaaaacggatgtgtcagactgttgattctcacagaaaagcagtatgaaagaatggatattatcatcggagattatgtaaaatatgaggaggatactccatcggagctttcagttttttaacggacaaaacccgcatgagcatagcgttcatgcgggttttcagctccctattataccataccaagaacaaaaagggaactacaaccttatacagcggttttattttcgggtgtgtattataccataccaagaacaaaaagggaactacaactcaggcattttacttagtaaaagttcaataattataccataccaagaacaaaaagggaactacaacagtattatatccgtggaaaaatgaaagggaattataccataccaagaacaaaaagggaactacaactattataatacaatccgcaagcaatgtcaaaatatatcataccaagaacaatgttatttaccgtttgacggctgacaggtaggcctgtcaccatagcagccctttgcattgacatggttgcagtattctgcacaagctcggcacatttctctgctttattgttataccatcaagctttcgttctttctttgcattaagaaccgccgaatccgtttcttcaattactgctgacagaatattcaatgcaccatttttcaaaactcccaaaattattttacactaacactttggcggacaaatgatgatggggattttaatgcagagtaaaacagataaggagttttgttattcggaaaaatctcataaaaagattttagtaaaatcttgtgagaatagctgttaatgaacggttgatgaacggttgatgaacacttagtatggtataataaattatcataaaaatattgaaaatttataaatgaattgacaaaaggattgacagggctatgtaaaactggtataattcaaaatagtacagacagagaatatctgagttttattgtataaaggtgataatacaagagaaacattgggtatatcttgctgaactcataacatagttgaaaaggagggaatcgtaatttctgcagaagaaacacccatcgatcaagaacccgtaaaagtgtctgcggcggcacgcatttttagtgtatcaagcacagtgtttgtttatcttttggctgcttgcatactgatcggggcggtattgtttgcgttcgatgcttcaccgacaaaatctattttcgggtatcggtattatacggttctgaccccatccatgtcaccaagttatgaggtcggcgatgtcgtttttgtgcatattgaagattcggatacgattaatgaaggtgatgttataacatttaatccttccgctgacagtgaagcgtatcttacccaccgtgttacccaaaaactcgaaaattatgaaggtagcggcgttacctgcttcagaacaaaaggtgatgcaaatgattctgaagacagttttttgatagatcaagaaaaagtgataggaaaagttgtgttcggaataccaaagctggggtacatcattcgttttgctcagttaaggtggtattacattgcagcgatcacagtaatgataattgtgttcatttgtttgttgaaaagatattttaagacagatgaggaagatgatgatcgaaaatgtgaagctgctgaagaagtaggtgaagcaaacagtgataaaaccgactgacgttttgtcacaacagctttttggctgtaaaaaaaattattataaaaggagaatgtgttatgtcaaaaaataagaaaaacaaaagaagagtgcttgcagtgtcctgcatatttgccgctctcatagtggcaggttcaacgtttgcatggttcacaagcaaggatgaggtagtcaacaagttgagtgcatcgagcaattacgatgtagtagctgtcgaggactttacaccaccctcaaactggacacccggacagacagttaagaaagaagttggcgttactaacacgggtaacgttgatgctttcgttaaggctaccattacaggaaatcttgttttgacaagaagcgcagcatcagctaaatcttctgatttgactaaagcaatagaattggaagataatgccagaaaatcgaagcaggcaggcgctaagcttgtttacagtcctggcatcagagattatagtattgataatctggaaacaactgcaacaggtgttacggttgccgatactgatcatgcacaaaatgtaaacagcgatactttcgcaccgaccacaacaggttattacatttttgcacgttcaacaacgcagacaagcaacaacggtactacaacatctgttacttatgacggttactatttcgtaaagggaactgatggcgctgctgataagttctacgacattgagattaaacaggtagaaaatggtagcatttatcaggtttatgctttgacaagacagaaagaaactgtaacaattaacaacgatcagttcaatcattgatattgctcttgacaatatcggaacagaaggcgatacatggaaatctcacgttccggaagctgttgccaatagttcaggtaagtcagctgcattctactacaataagatacttgcagcagcagcaacatcatctgatttcattaaaacagttacattggacagtgctgttacagaggacgcattcctcgatatggattataacctcaaagtaacagttgagtctgcacaggtgacggatgatactgctaagacaactgcggttaatgcacaggattgggcagtatataaagcaactgtaagcggtagcaatgtaacatggtctgaaagatcataatccgaataaaaatacatgctgacatagatcgaaaaggagtgctgctgcgtgatgaaatgggttgacaagttaatattcgtagtccttgcggcagtgctcatcttttgcatgaatgtaactgcatatgcggtgccgcttagctccggaagtgtgcagggattgcctgaaaagcttgtagtgctggacgagaatggacagtcggcaagcgaaaacggagaatattttttcgttgtcgaaaatatgcaggcagggctgacctacacaaaaaacattcagttgatgaacctgcgggatgacgcatcatacaaaatatctttcagagcagaaccgctgacaaaaagcggtgaaatagatctggaaaacgaatgtagctgtgagatatctattgacggggaaacagtttacagtggcaaagtcacaggagaaggaacgcctgatatccgtgacaatgcgttgagtctcggcaattttgagcctggcgaaagccatgtaatgaaggttgatgtgaaatggaacggtacctccgcaggcggatttattgacaacggcgaaagagttgtgactaacagcggcgttgaaattacccgtgagaaaagcggagaaaattatatcagcggtgaaacaacttttaaatggatattttcggcatcggtgcttgagtcggaggacggtacaagcaccgtgagcgaaataacccctgtcagctccgctccgggggaaaatacggattatccgaagagcaattctgcttcgggttctgactatgtaaattcaaactctatatctgatttcgttcagaccggtgaagttatcgcctttgccgcaattatcatgataattgctacatcgcttatgcttttctttctgcttcagagtaaaaagaaaaaaacaagaaaaaaatgagtataggcggatagtttctttgtgaacagtccgcctatatttatattacagtccaatgaatgggaaaatttcaaaatatgtatcggaatcatgcttgatgtgtgagcggcatttacgtattctgaaatttactcattgattttatgaaatgaattatgaaaaaaataatcaatgttgctgtcaatataatatttgttcttctgatattgtcatctgtggctttggtattgctgcgtgcggtcggtattactgcctatgcagtgaaaactccgagtatgtatcctgtgtgcccagtgggcacaatgatatttgtcgtcccgacagcttttgatgatttttcagaaggagatattgttacttacaaggtaaacagcacggttgtaactcaccgtatatacgatatcgataccgaaaacagaaccgttatcacaaaaggtgacaataacaatacacctgacggctctccgatatcggaaaagaatatcgtcggcaaagtggaattttatattccttatgcgggatatgtctatatttttgcggaaacgacatacggaaaggtgtctctggttgctgcattcgttgtattggcagcgttgtccgtgcttacaagatcatcggatgatgaaacaaagcagaacgaaaaatctgaagattaaaattttgttgtacagaggtgttggcaatgaaaaacaaaaataaaaaaaatccggttgtttccattgtcggcggtattactgcggcagcggtcattatcggaacgatagcatttctcacgtcgcttgacgaaaccacgaatgtttttagtgcgggaaatgtgagtattactctgaccgagcctgattataacccggatgatgcaaaaaatatgattccgtatcaggaagtggaaaagaatcctaaaattcaaaataacagttcgaacgaaatttatgtctttctgcgcataactgttcctgtatcaaagggaacagagcttaatgaagacggtacagcgaaagacggaaatactccgaaacttcaggaattgttctatttgaaaacaaaaaataatgaagagcttaaaaccgactttcattcagaatggatagaacttaatgaagttgaaaccggaaaagattatgccgagggtacgaccgaaaggacttatgttttcgcctacaatcaaatattaaatccaaatgagcaaacagaaatatcaccgtttgataaggtgcagctgaaaaatcttaaggaacagcctgtgcctgatactgttacacaggtaatcggtgttgaagcatttgcaattcaggcggataaccttgacggtataggttctgaaatgaacgaagataatcttacacaagtatacaaattgataaaatgatataattaaagataagaggtggcatacatgaaaaataaaaaaaaggtaataatgatagctgtgatgtcatgcttacttgctgcggctgttttactcagtacggttatgtcatatcttattgatcaaagacaaacggataatatattcactctcggaacggtaatcgtttccctgactgaaacaaattatccgaaagaccctgacagcagagttttggttccttatggaagcattccgaaaaatccgcagattgccaacatcggagaaaacgatgcttttgtatttatgaagattacagtaccgaagttggaagtggaaccgattaaaaacgacggctcacttaaatacagtgataaggtcagttttgatgagaataataaaagaactttccaaacagatttaatggagatatttaattttaaaagcgatagtccagtatcaaaacgtgctgatttggaaaaacctgattcacaggaacttacagctgacgaagagggtttgtataacaaggattggtataaactggataatgttgattataatgaaaattggtatcttattgataaaactgttaatgaagattccaagacgaatacatatctgtttgcctacaaaagtgtgctttttgctgcggctaatgtaaaagaggaaaatcaaaaaacgaaaacggaagcactttttgatgaggtgcagcttaaaacctttgttgagaatgaaacgctctatcaaagttttcagaagattaaaattgaagcatacgccatacaggctgacaagcttaagagtataacggatcttgacaagataaatcccgaagtgtggcagcttaaaaaaatatatgatgtttacaaaaatcagtcggaggtgggacaatgaagaagcgtaagggtttgattattaccggtactgctgccgttgctgtaatagcagtttgtgtcggaatgaccttttcatatcttgtgtctgctccgggtgcggttaataatgaaattactgtgggatatgaccacatagagatagcagaggagttttcagctccgataaaacaggaaccgaatgaagccacatcttacaaaaagaaagtgactgtgaaaaacaatggagataccccttgttttgtaagagtgtatgccgatttttcatccgctgaaatcagaagaagatcttctttttcgtttgatgaagagggtcagacctattattctgctgagcgtgtaatgaagagcggtaattttgtatatgaggttacaaatagtagtaatcactgggtgtatatacctgaagatgacagcgaaaattctgatattggcggctactattactacactgaacagcttaaggcaggcgaagaaacgccgccgctttttacatatgtaaaaacagataatcaaggtgaagaagttcagcaatatgacgttattgtttatgcggaatctgttcaaacagtaacgaaaaacggtagcaacgagaatgattatacagctgtatggaaggaatttttgaacaacagctgatagtagccgctgtcctgatttgggcagcggtacatttgcagtacagctttggaggtagagtataatgagtaaaaaatataccgatatactgaaaaggaagcattataaagcaacagcgttattgttggtgattatcatgcttttcagcatacttgatattgcagttgtggcggaaaacacggaaactcctgtggtatatactgatacccttaacgaatggatcgtcaaggcggtatggaataatgatgaagctgattatgaaattaattcaagcgaaaatgaaacgtggcgccccaagctaactataaaatattatgcggaaaaaacattaaaggaatatggacccggtgaaatacagtttgtgatcaacggtattgatgatattggacgtacaaagctgattactgcttcaacaagtacaactcagagcgactctaactgggtgcttggtgaaagcaatgttccggggcagtatattttcaagaataagaatacgattccaataaacgaagtattgtcgggcggttttgagattatgtggagctttaattcccgtgaaggccgcaacgattacagccagacaattactccgacttttcagattacaacagaaaacggtaatgaaattattaatatgaacccgcttacatttcattattattccaagcgtgattactataatcttagcctcacatcaagaaaaattacttctaatgaatatgaaaatgttgcaggcattccgaacagcggccaaacctctgcatatgagaactataactggtatgcgcaggaaacaaaatttaacctccaaaaacgtgcaagaggtgcgaatgtttccgattattttatcgctgtccaaataggtgatgacgcttttacagaggaacattttcaggatttggaagtatacacaaaaagcggcaaacgtgttaagcttaaggaatatgatctttacgatataacgggaatagcggctgatcaaggaaaaaaaatatacggttattatgaatttacaaacagaaagggagatctgaccgaaaacagctatatctcatacataggtgttccgaagggagcaccgtatgaaggcgaactaattacaacaacaggttatctgaatgtaaaatataatgacgaaaccgaatatattcgcatggtatcccaagatattattccaggtgaaaatataagagccaacgcttccataaccaataacgattatggatttaactatagcggtacgggatattggcattacaaatataatacaaagtatgaaaacggtacccaacatacaggaccgacatatacaaacagacttctgtcatcagaaatttatagcaatgcagttgtggaattcactcttgttgcaggggtcaatagaagctacagcagtggatcctcggcttcttctgttaactatatccgatcggaaagcggcatcgtgaaatctacttcctcgggtgctgatagtcagggtgataccagtatcgccagagatcaagaattttatatgatacagggtgatgatcacattgccgtggaattgagcaacggtgaaatacgttttcttgaggattatgaattcgatatcgctaccgtgaccgttccgatggactattataaaagaaattatgaggtttatgcggcaacaagtcaaagcacaccatataaagattatactaagataggttcgggcgatacttcatcggaaaagactttccgtctggacagcaagtataaggctgtatatgttaaaatagcagaagtttcgggaagttatcgatcaaccataaaagtcggcgttcgttttcatcttgatcagacaaagactccgggtgtcaatcctgatggaaatattgtgaatttcagctatatgcgtgttgtttataatgataagaatgacagcgacaagcaaaaggactatattggtgttactgctgataatttccagggaacatttactaaaaaaattgctgaactcgactatgtaaatcatgcagatgaaattattaatgaacgagctcacgatgacgaaaatcaacgactgtacctttacagaggctattcaaatgtatatatcagaaagtcgatcactcggctcgaatcgtcaactgcgacaaacggcaaaataaaatctattgcaaatggcggaggatatactttcaaggttacgaccacaggaaccgtgcaggctgataactccggtccgctcaggaaattctcgattcatacacttctgcctgcagacgtggtgcctaatgaggatctttctgagatagaatacagggacggcacattctcgggaattagccttactgcgag

SEQ ID NO: 987 - DNA, 14330 bp, synthetic construct
  misc_feature 1..14330: note = Synthetic
  source 1..14330: mol_type = other DNA
gtcctgctcctcaacctgagaaggattgagaagctgagggcggagatattgttgctctttgcccgcagtttgaaatttgggtttgttcagtagatattacatatacaattggttttaaagctatcatttatgtttagtttgttgggaatatgtgaaatagcagcaaaatatggaaacaaaatatatcgtatcgttggatttattgcaagcgcttctacttttgcttacttgtttcataggcagtattatgctatatgggaagcattttttaatccttttccatattggttggcatatttggttattttcccgactcttattgttctgtcatattttggacagaagttatataacagaattgtacggcaatttaatagtgttagaagatgttgctactgaatttgaaattcaaggacttgagcttgactacaccatcgttgcatgggacgctgatttccgtatgacagacgatggctggacctacaacagcttcaagggaagcaagtggcagaacgtcaacagcgaggagcgccggctgtacctcaaaaacacctaccgcgtcctcctcacccgcgcaaggcagggtatgatcatcttcgtcccgcagggcagcgacacagacgccacccgcccgagagagttttatgatgggacgtatcactacctcaaggggttggggattacgatattctgaataatatagggcaggaatggcatattgtctttcctgccctgtactttgtaaaagctattaagttatttgaaatctagtaaatcaacgatgtattaagctctgatttcaaattatactcgtgagtttgacaaaaacatcaaaacttattataattatacaaagatgagatttcttgttgacaattgaataataaaaaacttattataattatacaaagatgagatttcttgttgacaattgaataataatatgtataatataattagattgtatcataccaagaacaattaggttactatgataaggtagtataccgcaaagctctaacacctcatcttcggatgaggtgttatcttttattaggaggttattatgaagtacattataggtttggacatgggcatcacgtctgtcggctttgcaacaatgatgctggatgataaagatgagccttgccgcattattcgtatggggtccaggatctttgaagcagcagagcatccgaaagacggttcttcgttagctgctcctcgcagaattaaccgcggcatgcgccgccgtctgagaagaaaaagtcatagaaaagaacggatcaaagacttaataataaaaaacgaattgatgaccgcagatgaaatcagcgcgatttacagcacaggaaaacagctgtcggatatttatcaaatcagagccgaagctttagacagaaaacttaacaccgaggaatttgtccgtttgcttattcatctttctcagcgcagaggatttaaatccaatcgaaaagttgatgctaaagaaaagggttctgacgccggaaaactcctttccgcagtcaacagcaacaaagagctgatgattgagaagaattatcgcaccatcggtgaaatgctgtataaagatgaaaagttttccgaatataagcgcaacaaagcagatgactattccaatacttttgcccgttcggagtacgaagatgaaattcgtcagatttttagcgcgcagcaggaacacggcaatccgtacgcaacagatgaattgaaagaaagctatcttgatatttatttatcgcagcgttcatttgacgaaggtcccggcggcagtagcccttatggcggtaatcagattgaaaagatgattggcaattgtactctggaacccgaggaaaaacgcgcggcaaaggcaactttttcttttgagtattttaatttgctgagcaaggtaaacagcattaaaatcgtatcatcatcaggcaaaagagctctgaataatgacgagcgtcaaagtgttatccgacttgcgtttgccaaaaacgcaataagctatacttccctccgaaaagagctgaacatggaatatagcgagaggttcaacatttcttacagtcagtccgataagtctattgaagaaatagaaaagaaaacgaagtttacctatttgactgcttatcacactttcaaaaaagcttatggctcggtattcgttgaatggtctgctgacaagaaaaacagccttgcatatgctttaacggcatataaaaatgatactaaaattatagaataccttactcaaaaaggctttgacgccgctgaaacagatatcgcattaactcttccctctttttcaaaatggggtaatctttccgaaaaggcgttaaacaatattattccataccttgaacagggaatgctgtatcacgacgcatgtaccgcggcgggctataactttaaggctgatgataccgataagcgtatgtatcttccggctcacgaaaaagaagcgcctgaattggacgacatcacaaatccggttgtgcgccgcgcaatttcacaaacgatcaaggttattaatgctcttattcgtgaaatgggcgaaagcccgtgttttgtaaatatcgagttagcgcgtgaactcagtaagaacaaagcggaacgaagcaaaatcgaaaagggacaaaaagaaaatcaggtgcgcaacgatcgtataatggaacgtctgagaaatgaattcggtctgctcagcccgacaggtcaggatttaataaagcttaagctttgggaggagcaggatggtatttgcccgtattctctgaagcctatcaaaatcgaaaagctttttgatgtgggatataccgacatcgaccatattatcccgtactcgctcagctttgatgatacctataacaacaaagtcttggttatgtcctctgagaatcgtcaaaagggcaatcggatacctatgcagtatctcgagggaaaacgtcaggatgatttctggctttgggttgacaattcaaatctcagccgaagaaaaaagcagaaccttacgaaagaaactctgtctgaggatgatttgtcaggatttaaaaagcgcaaccttcaggatacacagtatctgtcaaggtttatgatgaattaccttaaaaagtatctggcgttagctccgaacacaacgggacggaaaaacaccattcaggcggtcaacggagcggttacctcctatttgcggaagcgctggggaatacaaaaagtgcgcgaaaacggtgatactcatcacgctgttgacgccgtggtcatttcgtgcgtaacagccggaatgacaaaacgcgtttccgagtatgccaaatataaggaaacggaatttcagaatccgcaaacaggagaattctttgatgtcgatataagaacaggtgaggtaataaaccgcttcccgttgccgtatgcacggttcagaaatgagctgcttatgcgttgctctgagaatccgtcgcggatcctgcacgaaatgcctctgcctacttacgccgcagacgaaaaggtagctccgatattcgtttcccgtatgcctaagcataaggtcaaaggttccgcgcacaaagaaacaatacgaagggcatttgaagaggacggtaagaaatataccgtttcaaaggtaccgctgacagatttgaagctaaaaaacggcgagattgagaattactataatcccgaaagcgacggtttgctgtataacgcattaaaagagcagctgatcgctttcggcggagacgcggcaaaagcttttgaacagccgttttataaaccaaagagcgacggctcagaggggccgcttgtaaaaaaagtaaagcttatcaataaagcgactttaaccgtgcctgtattaaataataccgctgttgccgataacggctctatggtgcgggtcgatgtattctttgtcgaaggcgaggggtattatcttgtaccgatatatgtcgccgatacagtgaaaaaggaactgccgaacaaagcaatcatcgcaaacaaaccatatgaggaatggaaagaaatgcgggaagaaaactttgttttttcactttatccaaatgatttgattaaaatatcatcaagaaaagacatgaagtttaatctggtaaacaaagagagcacgcttgcgcctaattgccaaagcaaagaagcacttgtatattataaaggctcggatatcagtacagcagcggttacggcaattaatcacgacaatacttataagcttaggggcctgggagtaaaaacacttctgaaaattgaaaaataccaagttgatgtattaggaaatgttttcaaagtcggcaaagaaaaacgcgtgaggtttaaataatgggttatcgggtgatttttcttgcgaatccggtcaaattaagctctaaaaacgaacagctgttgattgataacggcgaagtgacgaaaataccgcttgaggatattgagtgtattgtagcagatactccgcagctgaatattaccgcaaggctgcttgcaaagtttgccgaatacgcgatttccttctatgtaacggataaaggacatcatccgagcggagtgttccttccggtcagccgccacagcaggcatatgtctgtattgcaaagccaaattgacatgacgctgccgacaaagaaaaagctttggaagcagatcgtgcgccaaaaaatcgaaaaccaggcaaccgtcttaaagctgtgcgatattgagggatggcatgagatcgactgcattaaaaattcggtcaaatccggcgacagcgaaaacatggaggcggtcgccgcttcaaaatactttcggctgatgtttggaaaaacgtttgccagagcacaggagaacggtattaacgctgcgctgaattatggttacgcaattttgcgaggaacgattgaaaagtatcttgtcgcttacggatatgaacccgcgttgggtatctttcataaaagcagcctaaacagttttaaccttgcggatgatttaattgaagcctaccggccgcttattgatttgtatgtaaaagaatttgtatcagaggatgaagagctgaaaaccgcgcgaaaagcacagcttgttaatctgcttaatgcaaatgtcattatagacaataggcttttcgcctgtgcaagagcgatcgagctgacggtcagcagcctaaccggttttattcaaggaaacaaaaacgaattgttattacccgctattatggatttggaacagcataggtatgaataaatttatgagaatgatcgtattctttgatttgcccgtaaaaacaaaaacccagcgtcgggtagcaacgcaattccggaattttttgttaaaggacggttatttcatggttcagttctcggtatattgccgtatatgcaacggctatgacgatgttgaaaaacacaagctgagaatcagaaacaacaaacccgacaacggttccgttcgtctgcttgttataacagagaagcagtatgaaaaaatggagttgattatcggcaatcgggtgaccgaggaagaacactccgtgtttgaacaattgtctattttttgagagaatgagttgttttttgacaaataaaacgtatttttccaatacaaaaaacctgataaacgcagtgtttatcaggttttttgcgtccctattataccataccaagaataattagggaactacaaccactatacatcgtgaaagatagattaaaccattataccataccaagaataattagggaactacaacaaataaaataaaatgaggtagtctatggggattataccataccaagaataattagggaactacaactgagagtaaacggttaaaaaacgagccgaaattataccataccaagaataattagggaactacaacctcaacatctgagtagctcacgcagaaaacattataccataccaagaataattagggaactacaactcaagtagtcacgtaagggctattcgtagaattataccataccaagaataattagggaactacaacaaaacacgataaagagagtgcggtgaagctattataccataccaagaataattagggaactacaactattgcacgcaacacaaaaatcgatactttattataccataccaagaataattagggaactacaactttgtcaagcgtttttttaaaactttttttattataccataccaagaataattagggaactacaacaataaggatggaagataaatatattcaaatattataccataccaagaataattagggaactacaacgtgaaaagttgagcttacggctcagctccgattataccataccaagaataattagggaactacaacaagcaccggtttactttttcaaactttgctaattataccataccaagaataattagggaactacaaccatgctcaacaccgctatcaccggcagcaaattataccataccaagaataattagggaactacaacataaacagcctgatacaattcgtttgcaatattataccataccaagaataattagggaactacaacttgaatgtccgaattgtcatattgctctgcattataccataccaagaataattagggaactacaactaatcttgcggattgacttgcgttgcgtccattataccataccaagaataattagggaactacaacgactaaccaacaacatgatttacaacccgaattataccataccaagaataattagggaactacaacagcgatttcatacatattcacccccgaataattataccataccaagaataattagggaactacaactgcttggtggtttttgccctgtttttgcggattataccataccaagaataattagggaactacaactataacccagttagccccaattttttcacaattataccataccaagaataattagggaactacaaccaaggtaaaagaagcaaaagaagatatcgaattataccataccaagaataattagggaactacaacacagagaacggagggcgtatatgcgtagttattataccataccaagaataattagggaactacaacgagattttcaagcctgataacgggggctgtattataccataccaagaataattagggaactacaaccctacgcatcgtcggggcagggcagaacgtattataccataccaagaataattagggaactacaacactgcggaaaagggattgcaagaaaaaacaattataccataccaagaataattagggaactacaacagcttcttcctcagtaaatacaccacactcattataccataccaagaataattagggaactacaacccgtgcgcggccggttatgaagcttgtttaattataccataccaagaataattagggaactacaactggtaatgcattttcttcatttgccttttcattataccataccaagaataattagggaactacaacttgccaaatggtcatcccacaaagttagtgattataccataccaagaataattagggaactacaactacggaaaaatactgtaccgatttcaaagaattataccataccaagaataattagggaactacaacccgagtacggcataatcaagagctgggttcattataccataccaagaataattagggaactacaacattcaatttgataaaaacacattatatcaaatcaataaggtacagtcaacaaagtttgtaaagagcgggtacagcgaaagcgggaaaaggataaggcggagaaacagcggataaaggaaaggaagattcaaaacgataaacagaaaaagaggttctggttgtttcagagcctcttttggaatttgtttaatcaagtatttcattatggttagaatattctttccgtccttgtattcatagctcacgttgtccatgcttttcttgacaataaagattcccagtccgcctctttgatctgctcgtctatgaacgcctgtgccaaagggagattcattctgtcggccatgcttttcggattatagttgcctctttcatcaagaaggatcacaattgtcatctttgttccgccgtaaaacggtgtaacgcccgattttaggcgatttgtactttaccaggttttttgtttcgtgagcgatccctttcgggcgggtgagcactccccttacagggcggtaaacatacaaagcgggaagcagccacttgtgctcggcaaagaagggatagtttttctttaggtcatctccgcgcaaaaacacccggtcaaagattcgcgactatgtaaccgtcggccgttcagatagcggcgagctgcaaatcgtggtggacgggcccctgttctccgccatgcagtttgaaatttatctgctggaaatcgtcaacgaggtctatttccgcatgcggtacgactatgaaaccctcagaaaatccgcggaagaaaaacttgaccgtaaaataaaggcgctgagcgacggaacttatacctttaaattcgccgaattcggctgccgccgcagactctcccgcgagtgggaggatgttgtggtgcgccgtcttgcgacagaaaccgacaagtgcgtcggcacatcaaacgtatatctcgcaatgaaatacaacctcaccccaatcggcacctacgctcacgagtatgtgcagatgtatcagggaatagacaagatccctctcgcctacaccaaccactacgccatgcgcgactggtacaacgagtatgacggcgacaacggcaccgccctgaccgacaccattaccacagacctgtttctgcgcgacttcaaccgctcaatggtaaataactacacgggtgtacgtcacgattcgggcgacccatatgaatggggcgacaaaatcatcgcccactacgaaggctacggcgtagaccccaaaaccaagctgctgctcttctccgacagccttgattttgaccgcgctcaggcgctgtatgactactttaagaacaaagccaaggtatccttcggcatcggcaccttctgctccaacgacacctgcgaaaaggctctcaacatcgttattaagctgcagtatgtcaacggcagacccgtggcaaagctgtccgataatcctgaaaaatccatgtgccgtgacacggaatatctcgattatctgaagcgttcggttgaattcagactaaacagagaaaaataatatcccgagcggttcacacggggtactatacaccaatgaaaacagcctgagcaaatgctcaggctgttttttgtattgggttatttgtgttttacttatttgcgaagttcttttacaaaatcgtcaaagaacttcttgctatcggcgtcgttcttgatcgattcgtaaacaaacgatttttcgccacggttagcgtaatcggtaacggcagcgaaaaaggcagtaacaaaaaagctgaagaacgaaacaatgatcatgacaatagccagaatcaggcctgatttgcgcggacccatcttttcacggccgcccttaatcgagagaattccgaaaataagggctacaactccgaacagaaacgcaagacccgcaaatccgacgtttttaaagctgtagaacatggtgtccgaacctttgatttttgctgttcttacggcgaaagcgagaataataaaaatcaccgcggcaattcccgaaaaaagactgataaaacctttaacgttttttttcatttttttaacctcctaaaatatattaatctgcttaccagattattttacgtcgcgtttgttaacaatcttaaccgacaggaacaggaacaaaacggtaaacacaatgccaaccgccaataccctgaaaccgtctgccgagctgtgaatattggaggggttgattgagcttggagaatagtcctcaagcttaaagcccttaaatacgttttggatcagttggtcaagcaaggtgtatataagcgaaaagccgcccacgccgaacataactcccagaaccgtgccaaaggttttgctcctgagcgcggttgtggcaaacagaatcattgtacacattgccagaacaagaaggaacctcataagaagatatgtggttgcgtacagatagtttccgtcgagctcaagggtgggtaaagagcccgcaagccttcccgcaaagcccgcaataaagaacgcgatgttatggaaaattattacgacaaactttgaaacagcggtgtagcccttgttcggaatctgtcccgcgatattctttatatagccgtttgacaggtcggcatagcagaatattgaaacagagatgtagagtgccacgacagtcagaacttcaatcggcgatcctataatttcgaccaactgagatgaatagtcttttgaaaagaacatgggtacaaggtttaacaatgcctcaaaaacaaacgtaattaacagagaaacccaaaacgacttcgatgttctcaatcggtaaaaatccatcttaataattctacccattatgctcccctcctgtcacactgagataataatcctcaagggatacatcgttaacgcccacgcggtcgggaacaaggtttttgtcaaccagcagtttaacaatgctcttaacctcatccaaacgctcaccaacgcggatgatattatcttcgtcaacagacacatcgttaaagcccgcgcccttaatcaactcagcggcggcttgattgtcttcggtgttaagctcaatatacttgccgcagcggcggtgaagctcctcggtggtgaactcgtcgacaagcttgccctcgtggatgattccgtagcaatccgcgagctttgaaagctcgtcgaggatatggctggaaatcattatggtgattcctctttcatctctgagcttggcaagcatctggcgaacctcaacaataccctgaggatcaaggccgttgataggctcatcgagaattattagctttgggtcgccgataagcgcgagggctatgcccagacgctgtctcatgcccagcgagaacgagcccgccttcttttgctttgcgttttcaagtccgactaactttagaagctcgtcgatatagccctttcttttgtcacagcccatggcgattgcctttagcttcaggtttttgtgcgccgaaaggtttggataaatgcccgggtgttcaataagaacgcctacgttgcgcatttccttcatagcatcatttcctgttttgccgaacatcgagaacgagccttttgtcggtgtcgacaatccgctcagcattctcattacagtggtttttcccgcgccgttacgaccgattaagccgtaaatcgaacccggtcggatatggatacttacatcttttgcggctgccttttcgccatacatttttgtaaggccgtcggtagtcatgatatactccatctgctctcccccttttaaatttaattaataccattttaccataattttttgcagatgtcactaccttttttattgaatttttgctttatttagatttttcctcaaaaaaatccgccgggagtttaataacccgacggataaaatactattcaatttgcggttaccgtttttccgattccatacggatttccgtattcggcaagataattctggatagccgtagcatccaggatgctcaggccgcctccgtctacatcgccgcagcgttcagcctgctcggtatcgccctcaagcataccggcaaggcaaagctggattgtagttacgtcaaagattgtcacaacaccgtcgccgtcggcgtctccgcgaatatacggctcaaaatctgtaattacgtattttatgcccttttccagagcgtaattacgcgcgaagctgtttttggagcagtgaataacaagcctgccgcagtcatcgaacgcgttgtcggctatataatcaaccgaatccggaatgattatttgagtcaaagcagggcacgaagcaaacgccctttctccgattgtctttacagttttacccagcgacacgcttttaagcgagccgcacttgtaaaacgactggtcgggaaccgattgaataccgctgcccaagactgccgttttaagccccgtacactcctgaaaaactccgaagccaatgctttcaacgctgtcgggtacgtttatttctttaagcccgctgcagccgtagaacgcgtcgataccgatcgttctgagatgttcggccttttcaaacgataccgaattgatatcggtattgccgaaaaacgcgtaattgtcaatgaccgcgacgtttgcgccgagcagcttatcgggaatctcaacgtcggcagagcggttgtcgtaaccgtgaataaccgcctccccgctgtcatttttatcgaatgagaatccgtaaatagtaacataagaatcggcagcgcataccgtaacggtaccgagaattattaacacaagcgtaaccgcaagtgtttttattatgcttttcataatctgacaccaaaccttttttaacttttgctgaataccaaattgctagaaaacgggatcatcgccccagtcatcgcctccgccgccattgtcgtcgccatggccgctgtagttttcaacactgttggtgagaatactgctgaatgttacttttagacagtcaaactcaggagagatatattcttttttcaaccaatctcctccttcatttccccggaaatcagtcgttacttacacaaactccgtttaccgccatgttcttagacgcgatgtctgacaggcagatgtattcggagttgcttagtgtaacacttccgtcaggggcaataagataagcggttgctttcataatgtatgtcttgtttgtgtaggtgataactccgtctttatccttgtatgtgtttctgtagcccttaaagaattccacacggtttttatttgtaaggcttcctgtcggaatttcacttatctgtatgcttcttcttttgctgctgtcggaagaatcgtaattgtagacgcttggctttttttcgtcggtgattgccgccttaaggttagcttcgtcggaatggtagctgtaagccgcagggtcaaacgtttcgccgttaaacacaccgcacagctcaaacacaacgcctgttttatagcccgaaccggcgccgtaaatctgattctgtccgtcagcaaaggcgatttcaaagtcggaatacaaaaggtcggtcgctccgcttgaggcaatattgccctctgtatctgtccagcggttgcgggaatagcccaaatgggtcagagttatacttttttgagtaggctgcgaccatgttccgtacatttttttatcttcatacgttccccagccggtaagcttaaaggtcgctccgtcaacgacttcaaggtcgtcggtctgattccagacgttgcaccaatcatagccgaactcggtagtgcccttgggaactcttgcgaacacaactttatccttaagacctgtaaacgtaagatcatatgacggagtcacaagcgttccgtcggcttttccgtcgctccaagtccacgcgagccagtcctcgtcgcctgccttgatggcgtcggggttgagtttcgcggttttggtgggctgctccgcgtcctcaaacacgggacttatccaatagttatccattatgcagaacgagaaccacgggtcgtagcactttgcgataacattcgctcttgcgtcggctgactttttgatttcccaatagctgaactgcttgccttcgtattcaacgtcgcgcaggtcaagcaccgcgagtttttcatcaagcaagcggttagcgccgattgttgtatcaatcgccgtgtatccgcccgcaggagtcatacggtaattgacatataccttcttgttagactgctcggcgtatacggtggtagtcagctttttgtggttgacatcagaggtctttttcattcccttgtcagtccagcaaagcgtcttgccgtaattgctctcaaacggcgcgtttttcataatatactcgtcgttcaactcgtatgcgcccgcgtcggtaaggttttcagccaattcatcgccgctgagcgtatctttaaacacaaaagtcttcatgccgtttgagcgttttcagccaattcatcgccgctgagcgtatctttaaacacaaaagtcttcatgccgtttgagcgagtttcaaagcagtacttgatttcgatatcaaccgattcctcaagcggcttttccttaaacatcgctatatagcggtagttgcggattcttgcgtccttgtcaaccgtcgttgttgtgatgtcggagcgcggaatagcgctgccgttttcaagaacctcataccagcccgcgaattcgtatttatatatcctgctgtcgagggcgttaagagtaaagataaacttgctgttt

SEQ ID NO: 988 - DNA, 12211 bp, synthetic construct
  misc_feature 1..12211: note = Synthetic
  source 1..12211: mol_type = other DNA
ataagcgtgcctgttcttgaatagccgagtttctttgcggcttccttgacaaggtcgtcagtgtgcaggcttatctgctcgctgagcacttcaatcactgcattgaggatttcatacgaagaaatatcgtcaatgctcctcttccagttactttgttcatcaacacggtaaacagagtattcagcaggattctgatttttcttccagtaaaaaatgtttccgttatcaacagtttcgcttttgtcaacaaaggttactacagtgtcgagaattgactcaaccttgttgcccgaacgggttattccccaggcagataaaacctttttgaacagagctttcctgctgacgggagcctctgtttcaattatattcatcataagactgcgtattctgtttcttgatttcggctcgtaaaaattttctgcagtgccgcacggattaatactgaacgctttataactgcgctttcttgaaacagagttttcgggtgacgtcatatcaagcttttcaaattttacaacgtcggggctgttcttgacagtaaccgttttaactgcatttttttcactgctttcaacagcattgtttatttcttcagctatgctgtcaataactctctgtggattgtcaagccagtctagtgtccatacacgcataatattccagccgagtcccgtaagtatggcgggttgtagaacaaacctgtcctttgcggtagcggaatttttgcagtttttgccgtcaagcagaattccgataacatacgtctgcttgttgtgcggatttactacgccgatatccattttgtattccgaatatcctatgttgcgcttgacttcatatcccagattttctatttcctttgaaatttcttcaataagagtgtccttttctttggacatggtatttgctttttgtgtaataatatttttgcccttacccgcaaattcaaggaatcccttgagccctgcaacgccgtcggagcgagtgcgtgacagatcgatttgctcaggcataatcgttgaataaacaatcattgactttcttgctcttgaaattgcaacgttaagtcttctccatcctccgtcacggttaagaggtccgaaattcatagaaaccttgccctctttgtcgggtccgtagccgatagagaaaagaataacgtccctttcgtcgccctgaacattttcaagatttttaataaacaaaggttcggcagagtttttgttttcctcctcaagctcgggatattttgcaaattcttccgaaagcaggtcatcaatcagattttgttgaactgcactgaatgtaacaacgccaatactgtcgtttttgagattttcgtctttcagcctgcggataatttcatttaccaccgcaacagcttctgctttgttctgctttgttctgcccttgtcgtaatagccgtcaatatgaacaagacttacttccgaaacaaggtcgttgggagaggggaatgtgtaaagcttgttgtcgtagtactgcatattgctgtaggcaataagactttcgtgccttgaacggtagtgccatttaagatgctcctgaggcatagaaacagccagacagtcgtcaagcagactttcaaggtcttcattttcgatattgtcctcgtcaatcctgtttgatgcaaaaaagctcgtcgggggtaactgtttggggtcgcctactactacaacgttttcacctcgtgcaatagtgccaactgcttcacacgttggaatctgcgatgcttcgtcgaatattacaaggtcaaatttcgggaaagacgggtctatgtactgtgcaacggaaatcgggctcatcagcatacagggacagagtcgtctgagcagattgggagtttcgttgaacagctttctgatggacatcattctgccgttgctcttgattgccctttttagaattccgatttccgaagatgacgagcttatttttccgcttacgggaatttcggcagacagctttgcaacaagctcttgaattgtgagtgagcggaatttgtcaataagcttatgatactgtgcaataagctcctcatactgattgcctctgaaagtctttaagcgttcgtcactgttgagctctgctaatataagtgcataataaaggttgcagttaaatgaattttcaatctcgtccggagatacagcgccattaattacggcttgtgtaacgttttcaagtccgtttgaatttagttcctcagtaattctgttaagcgacgtccactgtccgagctcataaatattatcactgagctttttaagaaaagcgcttaagtcagtaagccagtttacactgttttcaaccgacttatttaatttgcatagattgctgaatgaaatccatttttcaatatattttctcagtatttcgcattttgattttgcatctgaagtaaaaactgaattatgcagtgaatttataatctgcgttttttcgttcggtgcaaaggaagaaactgcattgtgcaactcaagcgttttttctatagaagaattaagaatattccagtctgtatgaataccgtttataatttctgtaggagaattaaggacttttgcagactcaattttcgctttcagcgattttaattctgtcagtttgtcataaatctgagttattgtcgtatcgttgattgagtcgggatttttgcagtaaagctttagttcctttttaagctttgactttttgattatctttggcaagaaccagcttgcaagtgcttctctccactgtaaaactgctctgtcaacgtcataatcgagtatccttaggtcaaaattatcgctaaattccttgtatatctgcgaatatttacttccgtcagagcaaaattctttaagctgagataccgtataatcaaagttttccgaccttaacagctcggggattatcactgtattgtcaagcataagctcgttgatttttaaaattttaagaacagtattaatatctgatttattttttattccagtactttctgataaaatgtcaaacgactctttgacggaagaaaagcctgcaataagttctttaagactttgctcaatgctttcacgaagctcaattgaatactcggtaaggcaaatgcttttaagcggatgatcggcaaagtttgcagtgcttttcagctctacaacgtattttcttatcaggtcggtccacttcacgatgtgctgttcatctgcttttaaaagtaattcctgactgaaaataattttgtttttatactctttttccgattcaaaaatttctacagcctcgtaaacggatttcccgaatttacgcttgcagtgaagtccctctattatgtagttgagttctgtcctcatcgagtgcagtcgttcggatgtggctttgtaatcgtcgggagatttgattctaccgacctcgagcgacttgttaagctgtgacagcacactgcttttgttggttttgtttgaatgtagctcaaggcagaacgggtcaagaccgattgaggcaagtcgtttctgaacaacgttgagagccgccattttttctgctacaaaaaggacggatttgccctgatacaaggcgtttgcaatcatatttgtaatcgtctgagattttcccgttccgggcggaccgtgaagaacaaaactgttgtttgttgcggctgagtagattgcaagcatctgcgaagagtctgcgctcagcggaacagccatttggtcgggtgaaagcctgctgtcaaggttgtcaatcgttacatcggacggctcggaagtccagttgagctttttgtcaataaggcttgatacaaccttgtttgattttaattcatcagaacggttgtgcaagtcattccacataacaaactgaccgaacgagaacaagcccaagaacgccaggttttctatgttccacctctttttgtccataacggcgttgcgtatggtgttgaaaacaagcggaagattagtaccgtgctcatcaagcgggagtgggtcgagattcgggattttcaagccgaaaatctgacgcagatattctataagcgtaatatttatctgtgcttcttcctgacggcttcggattatgtaccctttgttgcgtgagctttttacaatgtcaacgggaatcagcactatcggtgcataccttgccttttctgaaatgtcgctttcaaaccaacgcaaaaatccaagtgcaagaaacagtgtattagtaccgttttcttcaatgcttacttttgcacctctgtataggtttttcaaatttctgtcaagctcatcgacaggaagaaaggttcttattcggttgcttttaaattcctgcgaggcaatattttcaatcagatcacgttcgttttcaatttcatacatcttggcgtctcttaatgacacgctccattccgaaggtacttccattattctgaaatctacgttgtcggaaagcttgtcttccagctcagcaaggtcggaagtcataagctgtaatgtgttctttgttacccgaaaattgagcagggtgttcctgaggctgaaatcaagcagctttctttcccaaatctgcacacgtgaaagattgctgtcgctgtactcaattttacctacgtcagagaaattaagctctttaggtgcatttatattaactttgttacttgtactctcatctgaagacgtgaagtcagaaaatgcctgattgatttttacgggaatgggacggattccgctgcctctggaacgctgtatatcaataacatacagaaaatctgttggattgttaaggtggtcgttgccgtgctttatcgcacgttcaaagtcgacgttatttccgcaagtaaaatttgtgcactcaacaagaagtatttcttcattgcctgcaacaatccgcttttcaattgcagaaacgtcgtctacagcgcagtcgctgaaggtctgctgttcaagccagcaaccgcagaaagcgtggccttttataaaaacaagcaatgggaaaagccctgccgcttcaaggcaggctgaataaagtaccgaaaggtcaagacaggttccttgcttttcttcaaggaccttgtgcggaagtctgacacgctgacctatagtttcatagcttgcaggagggttgttgtaaataatttcccacgaacgcaaggcggcaaaaatcgcagccatttggaatttaacattgttgggattgtttgtctgatatcccgtaaatgacggaagcttgttccattctcttaaaaaagcagaggctctgctcaacacctccgcaattaacggatgattcggagtgacaaaagccgtgatgatttcaggcataatcagcagaccgttccactcgtcgtacgcaagcagttcaacggtatcgctatagctgaaaattgttgctccattctgcaataactcaactaaaattgtaccgaccattttttctgataaagaaaaaagaaacttggtggaaagtatgatattgacaggagaaatttcaacagaacagtttggttcgatacttttgatattgtagatgaattcctttgcaaaatcgggttcaaacgttattttcagctttaaattgttttgaatttcatcagaattattattgactaacagatttctgattaaaggtacgtaattttgctgcattgcaaaatttattgaaccgcttatttcaccgcttacagtaattttgtcactcattttatcatatcctttcggaatggaaatagaaaattgcacaaatattgtgaaaatattataatgatattatataacaatcacattgttattgcaatataatttatatatttttgttgaattttgtgttgtaataaattattaataattcagtgatataattcagacaaaaaatacgtaaaaacaataaatattttattaagattattgacaaaaaagaattatatgttaatataatagtgaagacgatgcacaatctgatataaatttattaattttgtattgacaaactgcgaaaaatatgtataataatagtaaattgtatcataccaagaacaattaggttactatgataaggtagtataccgcaaagctctgacgctccgtcttttggcggagcgtcatctttttatataaagcgttttgtcgaaataattcgcaatcgttttgattttgatttatcgttgcgctgttttaggaggtttttatgaaatattcaataggacttgatattggtattacgtcaatcggctatgctgttatgctgcttgacggcaacgaccaaccctgcagaattatgagaatgggttcacgaatttttgatgcagccgaaaacccaaaagatggttcgtcgcttgccgcacctcgcagagaaaacagaggtatgcgccgcagattacgcagaaaacgtttcagaaaagagagaataaaatctcttattgagcaaagcggaattatgagcgttaaagaaataaacagtatgtatcagacagcagccgaattaccggatatttatgaaataaggtgccgttcacttgacagcgagctttgcaaagaggagtttgtgagacttcttgttcatctgtcacagcgccgaggatttaaatctaaccgcaagattgactcgcaggacaaaaaatctgaagcaggtgcattgttgtctgctgtcgaagaaaacaaaaggctcttagaaagcaaaggctacagaacaatcggagagatgctttataaggatgaaaaattttccgaatttaagcgcaataaatccgacaactattcaaacacatttgcaaggcaggcgtactgcgatgaaattaagcttattttcagcaggcagagagagttcggaaatgttcttgcaagcgaaaagcttgaaaatgattttttagagatttatctctctcagcgttcatttgacgacggcccgggaggagagagcatttacggaggtaatcagattgaaaaaatgctcggtaaatgtaccttcgaaaagggagagcttagagcagtaaaagcctcgttttcgtttgaatattttaatctgctttcaaaggtaaatgcaatcaaaattgtatctgcaagcggaaagagggctttaacggacaatgaaagaaacaagattatcagccttgcgttcagtaaaaattgtattacatacaaatctctgagaaaagaacttgggctttcagacagtgagcattttaatatatcttacggtgaaaagtcagtagaagacaccgaaaagaaaatgaagtttacatacctcaacgcatatcacacattcaaaaaagcatacggcgaatcttttacaaagtggaacacggataagaaaaatgaacttgcatatgcgctcacggtgtataagaacgacagcaaaattacagctcatcttgccgacaaaggttttgatgatgctgaaataagcatagcgctcacgttgccgagcttcagtaaaacgggtaatctgtctgtaaaggcacttgagaaaattataccgtttcttgagcaaggtcagctttataacgaggcttgccttagtgcgggttataatttcaaagctgacgaacagtgcaaagaaaaatttctccctgcaaatcccgaaacagcagttgagttgaaggacttgacaaatcccgtagtaagacgcgcagtatcgcagacaatcaaggtgattaatgcgattatcagggagtttgacgacagccctgtttttgtcaatctggagcttgcaagagaactttcaaagaattttaaagacagaaaggatattgaaaaatcgcagaaagataatcaggcggcaaatgagcgcattatggaaagactgcgaaatgagtttcaccgacctaagccgaccggacaagatttaattaagctgaaattatgggaggaacaggacggaatctgtccgtactccttaaagccgattagtattgatcgactgtttgaaataggttataccgacattgaccacattgttccttactcgataagctttgatgacacctataataacaaggtgcttgtgctgtcgtcggaaaacagacaaaagggtaacagactgcctatgcaatatttaagcgaagataaaaaggattcgttctatctttgggtggataattcaaatcttcgcagcaggaaaaagaaaaatcttctcaaggaaacgattactgatgacgacctttcaggatttaaaaagcgaaatcttcaggacacgcagtatatttcaagatttctgctgaattatttaaaaaaataccttcagcttgcaccgaatacaaaagacagaaagaatactatcgttgccgtaaacggagctacaacggcttatgtccgcaagcgctggggaatttccaaaatacgtgaaaacggcgacgttcaccacgctgttgacgctgttgtaatcgcctgtatcactcaggctatgataaagcgcatttcggaatattcaaaataccacgagaatgaatatatcaacaataacggtgagtattttgatattgataagagaacaggagagatgataaatcgttttcctacgccgtatccttatttgagagatgaaattgatattttatgttcaaatgacccttcaagatatctccttgaatctccgttgccgaattactcggtaggcgaggacgttaagccgatatttgtgtcacgaatgccaaaaagaaaaattacgggagcggctcataaggacacaataagaaagccttatgaaatagacggaaaaaactacgctgtttcaaaggtcgcacttacctcgctcaaattaaaggacggagaaatagaaaactatttcaacccgtcgagtgatattctgctctataatgcacttcttaaaagattaaaacaattcaacggtgacgctaaagcggcattcgcagaagaattcaataagccaaagagcgatggaagtaaaggaccacgtgtaaaaaaggtaaagataatcgaaaaatcaacattgactgttcccgtacacaatggtacagctatagctgataacgactcaatggtcagaacagacgtcttttatgttgaaggagagggttattatcttgtgccgatttatgttgccgatacggtcagaaaaatgttaccgaataaagcgattaccagagaccgttcgtattgtgattggaaagtaatggatgaaaaagattttttattttcactttatccgaatgatttaatacatattgtgtcgaaaaaagatatgaagttctctttggtaaacaaagatgctacgattgcaaaaaattacatcagtaaagacatttttgtttatttcaagggtactgatatttcaacagcctcaataacggctattaatcacgataacacatataaattgcgtggcttaggtgtaaaaagcctgctttctatggaaaaatgtcaggtcgacgttctcggcaacgtcacaaaatcaggcagagaaaagagaatggggttcagataaatgggatatagagttctgtttcttgcaaatcctataaagctatccgtaaaaaacgaacaattgcttattaacaacggagagattacaaaaattccgctcgaagacatagaatgtattgcgtctgacagtcaacagataaatgtcagcacatatcttctgatgaaattctcggagtatgcaattacattttacgtgactgataaatgccatcatccctgcggagtgtttcttcccgtgagccgacacagcaggcatatgtcggtgcttaacgaccagataaatatgagccttccgacaaaaaagcgtttgtggaagcagattgtgatgcagaaaattgaaaatcaggcggctgttctgaaattgtgtaatattgacggctggcaggaaattgacaacataaagctcaaagtgcactcgggtgatacgagcaatatggaagcggttgctgcgtcaaagtattttaaactgctttttggaaaaacattttcaagaagtcaggaaaatgcaattaacgcctgtctgaattacggctatgcagttttgcggagcacaattgaaaaatatcttattgtttacggatatgagccgtcaataggaatttttcataagagtactttgaataatttcaatcttgcagacgatattatcgagtcttaccgtccgttggtagatttatttgtaagatataatgcgcttgatgatgaagaactttctacaagcagaaaagcacagattgtcaatctgttgaatgcagatgtaattattgacggaaagctttttgcctgtgcaaaagcgattgataataccgttcaaagccttacaagctttatttccggtaggagaaacgatttgcttttgccccagataatggatttggaacaacacaagtatgaataagtttatgagaatgatagtcttttttgatttgcccgttaaaacgaaaacacagcgcagagtggcagcgcagtttagaaaatttttagttaaagacggttattttatggtgcagtactctgtctattgcagaatctgtaacggttatgatgatgttgaaaagcataaaatcagaatacgaaacaataaacccgataacggctctgtcagactgctcgtcataacagaaaaacagtacgaaaaaatggagctgattatcggaaaccttgtaacagaagaggaacacgccgtatttgaacagctttcaattttctgaaaaatgaaaaatttatgttttttatctatgatattaacaattatcagaatacaaaaatccccataaacatagtgtttatggggatttttgcgttcctattataccataccaagaataattagggaactacaaccaataacaaagctgtctgtatcggtgtagattataccataccaagaataattagggaactacaacaagttataagtcaagggtgaaatcgccgcaattataccataccaagaataattagggaactacaacatccaaaggtagcggcaagccacgccttttattataccataccaagaataattagggaactacaacaaaggtcagtggaaagatttccacgcttgaattataccataccaagaataattagggaactacaacaacaatgctcgtaacacctttgtcggaattattataccataccaagaataattagggaactacaactgcaaagggcgaaaaaggcgacaagggtgaattataccataccaagaataattagggaactacaacataattatgttgttaaatttacaacatacaattataccataccaagaataattagggaactacaaccttaaagcctgcgaacaaggctgacggaacattataccataccaagaataattagggaactacaacacgtaaaaggattaatttcgtcaagtcaggattataccataccaagaataattagggaactacaacccgtagatgtctgcacggttttgttgtattattataccataccaagaataattagggaactacaactaatagcctctatacttatgtataacattgattataccataccaagaataattagggaactacaacgtgcggtatgtatctaccgttgtctcgcgcattataccataccaagaataattagggaactacaacatttcttcctgcagtttggtaatgcgcttgattataccataccaagaataattagggaactacaacaagttttttcatcttcaaaaactcttcctaattataccataccaagaataattagggaactacaacgccttgcgtttgcaaagtttatttggtaggattataccataccaagaataattagggaactacaactaaatgagggttctcttacacttgaagttgattataccataccaagaataattagggaactacaactgttgtttacttgctttaccttaaaaacatattataccataccaagaataattagggaactacaactctttataagcatacctcaccttatacagcattataccataccaagaataattagggaactacaacacaaagtcaaagttttcgcctgtatgaccgattataccataccaagaataattagggaactacaaccgtgcaaccccgtcatatccgccgcaaggcattataccataccaagaataattagggaactacaactagctcacacgctttttttactacaataaaattataccataccaagaataattagggaactacaacaaaatcggacggtaaaatcatcggtaacgcattataccataccaagaataa

SEQ ID NO: 989 - DNA, 7015 bp, synthetic construct
  source 1..7015: mol_type = other DNA
  misc_feature 1..7015: note = Synthetic
aagcaacattgttgaaggtttaccacaatacatggggaggtcactactatgagtatagtgtatgttggtatggatgtccataagaattctttcacgctgtgtggattgtatcgcaatggtgaaactacgcgcttcctgaaaaacaagcaaaccaatcccagcgtcgatgctgtcgtacggtatgtcaatgaagcacgtaaagaattcggtgaggacgtcaaggtcctctgctgctatgaggcaggctgcctgggatattatctggaacgccagctgcaggttcgaaatatcccctgcgtcattgttgcaaccgatacatccatgaacaagggcaagaagaacgaccgccgggatgcccattccctggcacataatctggatagtgcagagtataaatctgtccacatccctaccccggaagatgaggctgtaagagaatacatccggatgagatattcttacaagcaggaactcaagcggacgaaaaatgaaatcctggctctctgcctgcgtcatggctttaaatatgatggaaaaaccaattggaccactcaccatatcgcctggatgaagaaaatcgattggaaactgcccattctagcagagaccttcaaggaatatctggcccgctacgactggctgaagatgagaatcaatgatcaggatgccatgattgaatctttggcacagaaaactgaataccgtgaagctgtgaaaaagctctgctgcttcatggggatcaaggttcatacggcgctatcgcttctggtggaaatcggtgactttaggcggttcaacactgcctatgctttttgcatgtatcttggactgacgcccagtgaggattccagtggcagcaaaggccattatggagcaatcacgaaaaaagggaacagttacatacgacgtcttctggtggaagcagcacaatgcttcagcagaacccggaaaggtttcaagtctgctgccttaaagcagagacaggctgggatgccggctgacattatccgttatgcggacaaagccaatgaacggttcaaagcgaaatatctcagagtgaatatgcgttctcacagaaatgttgctgttgtggcggttgccagagaaatggcgtgttttatttgggggatgatgacggacaggattgcataaagagtttcacgtaaaagcaattgctatgacagacgagtaaaacctgaaatctgtaattgaaatctgtcctggaggtagaaggaaagagctgccggtaccgtaaggttcagctatctaagaaagcctcttttgttgggtgacagctggttttgactcatacgtcatccggctgattcacgaccgtagattttagagcccacggcaagaaccatttatccttttggtaaccaatccaagtatagcaggatggggataaggccgtcatttgtatcgggctctttccttgtgcccccagggcagatatggatcattgaaaattgtatgaaagttgctacttgacaagggtcacatcatagcaggggcttactcattggtaagcccgccccgaaggccgagggtgcgggcggaatggtaaatagggtggatcggtgaactgattattatgctatttgttcgcttcattacattttaaataaacaaataatctaaaatacaaacaataatttgtccgtttttctctacactgtttgttgtacaatagaaatgtgaatgaaattaagcataggaattcaatagattatgaaactatcatgaagtatgatacaatattcttaattatccctttacttttaatggcaagcaggttataataatcatggttgtaccaaaccaatgatcaacgggttactatgataaggtagtacaccgtggagctctaacgccttgccatttatttggcaaggcgttatctctttctatggggaaaataggaaaggcgggtttggaatatggcatacggaattggattggatatcgggattgggtccgtcggttgggctattttggctttggaccacgaagaaaatccctggggaatcattgatttgggaagccggatctttgatgtggcggaacagcccaagacgggggcctctctggccttgccccggcggcaggcacggagcatgcggcgccgtctgcgtcggcatcgtcatcgtctggaacgaatcaagaatctaatgatttcattcaaattggtgacacaggaacaattggattcattgtatgaaggacaattggaagatgtttatgagctgcgggtccgtgccctggatgaaaagttgtctaatgaagaattggctcgtgtcctgctgcatctggccaaaagaagaggcttcaagagcaatcggaaagcggatgctgccagtgaagaagcaggggcattaaagaaagctatcagcttgaatcaggctgctatggatgaaaaccattatcgtacggttggggaaatgttctataaggatccccggtatgcagattataaaagaaatcggggtggtaattacctgaataccgtcgaccggagtatggtcgaagatgaagcccgtaaaatcatcgaatcccagcggcaattggggaatcccgttatgagcccggaatttgaagaaggctatctttccattctgctgagtcaacggcagtttgatgaaggtcctgggggaaagagccactatggtggaaaccagatcttcaatatggtggggtcctgcacgttcgaaaaaggggaaaagcgggcaccgaaggcctgctattcgttcgaatatttcaatttgctgcagaaagtcaatcatttccggctgacttcttccaaagacaatcggccactgaaagataccgagagaaagcagctgattgaactggcgaaaactacggccgatttacggtacagcaaaatccgtaaagaactgaatatagatgaatcatatcgcttcgcagatattttctataaagctgatcctgatgtagaagagaaaaaagcaaagttcaattatctgcctttctatcatcaaatcaaggcgaagctgaaaagcgcaggggaaaatgttgcggaatactctgtccctaagctggataaaatcggtgaaatcttaactttttataaaggtgatgatgccagaaggaaaaacttgaaggaggctgggattcccgatacagcgattgaagcgctgctgctcctgaccggggcccggaaatttggtcatctatcgttgaaagcattgcggaaaatcacacctttcctggagcaggggatggtgtataacgaggcctgcgatgcggccggatatgattttcgtgcccatgaagcggagaaatccatgtatctgcctgcgaattccgataaagcacctgaactggatgatattaccaatccagtggtacgccgggctatcgggcagaccatcaaagtagtcaatgccatcattcggaagcagggagccagcccgctgtatgtgaatgtagaattggcacgggagatggctaaagacttccaggaacggaagcagattgaaaaaacgtataaagagaatcgagataataacgatgctattatggcaaaaatcaaggaggaggaccatcagctcaatccttccggactggatctattgaaactgaaattatgggaagaacaggacggtaagagcccttattcccaaaagagcatcgatagagccagattatttgaaacaggttatgtagatatcgaccatattgttccttacagcatcagttttgatgacagctataaaaataaagttctcgtcttttcttctgaaaaccgggataaagggaatcagttaccttatccttacatactgaaaaaatatggccaggaggcagcagatgcctttaaggtctgggtgaataactctgtccgtgattttcgtaaaaagcagcggctgctcaaggaatatctgacagaggatgagatgaaaggttttaaggagagaaacttgcaggataccaagtatctttcccgattcctgtataattttatccgggatcatttggaatttgcgccttcggaaacggggaagaagaaacgggtactggccgtgaatggcttgattacttcttatttgcggaaacggtggggaattcgaaaaatcagagccaatggggataagcaccatgctatggatgctgtggttattggctgcaccactgataaaatgattcgagatctgaccctgtattctgaagaacgggaaaatgaatatgatgcaggatatcgggaaagtctcctggttgatgggaaaactggagaggtgttgaaaaaattccctatgccctgggaaggattccggcaggaactggaagcccgctgttctgaaaatccagcaggaagattagctggcttgccgttctacatgaacaaagactggaattccatcaagccgatatttgtttcccggatgccaagaagaaaggtgaccggggccgcccacaaagatacggtccgcagtgcccggcatatccaggaggggattaccgtgtccaaagttcccttggaaaccctgaaattggataaaaatggggaaatcgatgggtattataatccggacagcgacagactgctgtatgaagcattgaaggcccggctagagaagttcgatggtaagggaaaagaagctttttcgaaaccgttctataaaccaaaagcggatggcagtcaggggcctttagtgaagaaagttaagattcagacaaaggctacgcttgctgtgccggtaaatcagaaaactggtgtagcggataatgacagcatggtgcgtgtggatgtattttatgttgaaggggaagggtattacctggtaccgatttatgtcgcggatacgttgaaaaaggagttgccaaatcgggctattgttcaagctaaaccatacgaaaattggaaaataatgttagacaaagactttcaattttctctttatcccaatgatgtaatttacgttgagagcaaaagaaaaatcaactttaaggttacaaaagacaaatcggaagatagtacacttaaacctcaatttgattgtctatcggtgctgggatattacgaagggactgatatagcaacaggggcaattaatgtcattactcatgatgattcttatttgaaacatggccaaggtgtaaaaacgttggtaagtttaaaaaaataccaagtcgatatacttggtaatgttcatcctgttaaaaaggaaaaacggcaggcattttctattaaacagaaagcaaaatagtagaaagcgtgaacggtatggggtatcgcaatattgtcattgcatcggatgccagcttatctgtgaaaaatgatcaactggtggtattgaatatggagcggaaccagattccgctggaagatatcaatgccattgtcctggaaaatcagcagagccgagttagtcttgctgctttacaacagctggtggccaacaatgtgacagtatatctgtgtgatgctcagcacctgcccagtgcggtcattctgccgttctatcagaattcggtcaatgctgttatcatccaattacaggaacaattatctgtaccccgggaaaaacagatctggaaacagattgtggtagaaaaaatcctgaaccaggggcgctgtttaaaagaaagaggggatgcagaggggtatcagtatcttgtggaactgtctaagacagtaaccagcggggatatccataatgtggaggccacggcagcccggtattattttaaacgggccttcggggaaaagttctcccgttccggtgaagacgggcggaatagcggcctaaattatggttacgccatcatgaggggacttatagcccgtttattgacgggctatggctttctggtcatcaaaggcatccaccatgggaataagtacaacaactttaacctggcggatgactttatggagcctctgcggcctgtcgttgatttatttgtcctggagaacatgaagggggatgatacattgacaccggctctgaaacattctcttgtgaatttgctgggggcagatgtcatctcgggtgggcagatacatagtgtaagttatggcgcggaacggatgatccagagcttcatgcggatctgtcagcaggaagataagaatctgatgattcctgaactgactcagctgagacagcatcaatatgagtaaatttatgcgtatcttagtactttttgatattccggtgaaaacaaaagtccagcggcacattgcaacgaaattccgccattttctcttgaaagacgggtactatatggtacaatactccgtgtatgcacggatctgcaatggtccggatgccgtggaaaaacatcggcagcgcctgaaaggggcactgccggaaaatgggtctgtcagaatggtggttatgacggaaaaacagtacgaagccatcgatgttctcgtggggcgctattgcccggaggaaaagaaatatgaccctgatcaggtctccgttttttgaaaacaatcaaatcatggtctcaaaagcagtttttgaattggttttgagaaaaagagaaaagcccttgtgccagacagcacaagggcttttgttgatcacgattgtaccaaaccaatgatcaacagggaactacgacagagatacaaagagaccgtgaaggaatccaattgtaccaaaccaatgatcaacagggaactacgactttctgtgcttccgcgttagtcttgccttgattgtaccaaaccaatgatcaacagggaactacgaccttctcatttctgggtagtcgttccctgccattgtaccaaaccaatgatcaacagggaactacgacgcaactattggaaccggtgaagatgggggaattgtaccaaaccaatgatcaacagggaactacgacgcttctaatgtatgtaggagaattaataaaattgtaccaaaccaatgatcaacagggaactacgacgaaatgtattgtaacatcgtgttaaaaaaaattgtaccaaaccaatgatcaacagggaactacgacattagaatcaagagaggcgatg

SEQ ID NO: 990 - DNA, 3217 bp, synthetic construct
  misc_feature 1..3217: note = Synthetic
  source 1..3217: mol_type = other DNA
aaagagactgcttccaacgtaaaatgttgcaactccaaaggttgtatgatataattcaaaagattatactgaaactgaaaagaaaacaaagtttagttacttaactgcttattatgaatttaaaaaagcatatggatcttcatatttagagtggagtgttgagaagaaaaatactttagcaacgatacttacacttcacaaaaacgactcaaaaattatcgaggaaatgaaagaaaagaatttcttggaagatgaaattaatgttgctcttacaataccatcatttacaaagtttggaaatctttctattgctgtcttaaataaaatgattccatatcttgaagatggaatgttgtacaatgaagctattactgcattgggttataactttaaagatgatgataagtgtcagcaaatgtatttaccatcaaatccaaaagatgctccagaacttgatgaaataagaaatcctgtagttagacgaacagtttctcaaactataaaggttattaattctattattagagaaaagggtgaaagtccaacatacatcaatattgaactagctagggaacttgcaaagagttataaggaaagaaaaaatattgagagtaatcaaaaatcaaatagggagaaaaacgagaaaagttttgaagaattaaaaaaattgggagttgttaaacctactgcttttgatttagtgaaatataaattgtggaaagaacaagatggaatatgtgtttattcacaaaaaccactaaatatagaaaaactattttcagaaggttatgctgaggtggatcatattgttccttatagtatttcttttgatgattcttattcaaacaaagttcttgtgcataccaatgaaaatcaaaataaaggcaacagaatacctcttaattatttgagtggtaaagaaagagatgagtttatagtttgggtgaagaattctcatcttagctttagaaaaaagcagaatcttcttaaagaaaaaatttcggaagacgattttgatggatttaagaatagaaatttaaaggatacacaatatctttcaagatttcttttgaagtttattaagaaataccttaaatttgcaccaagttctactaacagaaaggaaacggtaatagcagtgaatggtgcaataacttcttacattcgtaaaagatggggtattgaaaaaatccgtgcaaatggtgatgctcatcatgctacggatgcaatagttattgcgtgcgttaccaagtcaatgataaagagaatctcagagtattctaaatataaggaaactctgtatatcaagaacaacaatgaaacattagatgttgataaaataactggtgaagtgaaaaaatattttcctatgccatacaagtggtttagaacagagcttgatattagatgttctaaaaatccagagagacttttagcatctaatcctatacctacttatgcaagagacgaaaaggttaaaccaatcttcgtatcaagaatggttaatagaaaagtaactggaccggctcatcaagatacattaagaagaatggttgtagaaaatggtcaaaaatatgaagttgttaaaactgatttgaataaattaagtttagataacaataacgaaattgctaattattacaatcctgatgatgatagattattatatgatgcattaaagaatcatttaataaaatttaaagaaatgcataaggaagagaatggcaaaaagaaggtagaagatgcttttaccgaacctttctataagccaaaaagtgatggttctaagggtccacttgtaaagtcagtgaaaattatcaagaaaattacttcatcagttacattaaataataacactactatagctaaaaatggtgatatgataaggactgatgtgtttcgtacggaagacggatattatttagtgccaatttatgttgctgatacagtaaaaaatgaattgcctaataaagcaatagttcaaggtggagaatggaaagctatgaatgatgaagactttttattttctctgtacagaaatgatttaattaaaattaagtcaaacagtgatgtgacattttcattaatgaatgaaagtagcagtttgcctaaaacagaatccctacgagaggaatttgtgtattttaaaggaactagtattaatacagcttctataagggttgttactcatgacaattgttacatcaaaaaaagcttaggagtgaaaaaccttcagtctttagaaaaataccaagttgatgttttggggaatgtttcgaaagttaaaaaagaaaaacgaatgggttttagatgatgggatatagggtaatttttcttacaaatccagcaagattatatgtaaaaaatcaacaacttgtaatagataatggtgatgtttttaaagttccattagaagatattgaatgcattgctattgattctatgcaaataacaatgaattcatatttgttgtcaagactatctgaatatgctattaccttgtatgtaactgacaaaacacatcacccttgtggaacttttcttccgttattaagacattcaagacatctatcagtgctaaaaaatcagttagaaatgactttacctaataagaaaaaactatggaaacaaattgtttgtcaaaaaatagaaaatcaagcaactgttttaaaattgtgtggtatagatgagtggaaaagcatagatgttttgaaaagtatggttaagtctggcgatccggataatatggaggcagtagcagcttcaaaatattttaagttattgtttggtaaaaattatacccgaactcaagataactttataaacccaaaacttaactatggttattctattttgagaagtacaatatcaaagtatcttgtagtatatggatatgaaccttcactaggtatttttcataagagtaatctaaatagttttaatctgtcagatgatatcattgagccatttagaccaatagtagttttgtatgtaaaaaaatttgctttggaagatgaaatagatacacatacgaaggcttctctggcgaatctattaaattgtgatttaataatagacaataaattgtttgcttgtgcaaaagctattgaactaacaataaaaagtttatctaattggtataatgataagaataaatctttattattgccacagattattgatttggaacaacatacatatgaataaatttatgaga

SEQ ID NO: 991 - DNA, 23201 bp, synthetic construct
  misc_feature 1..23201: note = Synthetic
  source 1..23201: mol_type = other DNA
atatcacgaacaaggacgatcaactgatgctcaaatgatacttaagcaggcagaacaacagatggaattatggctggagtcctctctcaacggcccagatatatcgctcccaattccatggtttgattggatcgaattcctgatcaattatgaccgggctcaaaggcttattaacggtaagacttcaaccccaaatcccaagctcgctcagagaacttccagggcacttgctgtcatcgaatgatgtaggttgtcagcttgctacgcattaaggtgcaaaagtatgtgcctaccgccaaagaacggatgacgtcctaattattgcgcaaatttgagatccagccctggctctggtatggatttgattaccaaacatcaaccaaccagaaccaaggactgacgatgacgaatgtacccgaagatcgccgcagtgaagagatccgagatgcctttcagatcaacggcgagaccgcctaaggcatctcgaagacttctccccctgagcgagagtgcatggcaacgaccgtctcgatgtcagtcgtctcggcaagaaatcggacactgccatcacccaatgagaccattgctccaccaggatggaagctgtatagaccttgttggttgcaaacattgatcgcctgctgataaacattcgagctgtccgattcggcagagcaatcggagttgtaacttctaagccgtaaagcttgggggccagcccaagctgaccaaccaggttgagcggtcattgggctcgattgtggtttgccattaatatacaaaacagggcgggcacacacctctcctagcaagacggtattggacaggccgtcggtaaatttggccaaaggggtagccgcattcgaatcgaggccgacatcgagcgtgggaccgctaggccatacccacgtttgcaggcggacataatagtcaccaggagcaccatagcggtccggtatcagcgtcgattccacggggccggtcgagagttgtacttggcggtctccgttcggagtggaaggacagacgaacaaatcaatttttgttcgcaccagttcctgattgtcttcatggaagtggggcagattgtcgttgtaaagctcagctaaattgccttgctcgatgtagggtaagatagcagtcggccatccggaaaagacggaatttgccccatcataaacgcccgtaattcgcgcctggggaaaccctttattgacgtcggcatagttgtgaaatgctagacagatttgtttcaggttgttggcgcattgcatccggcgagcggcctcccgggcctgctgtaccgcaggtagtaaaagagcaatcaaaatcccaatgatggcaatcacaaccagaagctcgacaagcgtgaacgcagtacggcgatggagcattgaataaaattctcaaaatatcggtacgtctcgggaggggtttacgtgttgaaaatgctaaatgcatccctctccgcttcctgctcatcgatggtcacgtcaagtcgatgaaaacaacgcaaaggaaggacacaaccaacgtgcaatcagaatgccaagtctctgagaataacgagttagcccgtgaactgccgtatcgaactaacatcattgagatctcgtgtcgattgtagtgacacttacgtcggctggagcgacacagccgggccgatctgccatgctcatgtgcccctagtgtttaatgtctggcctagcgtgatccaaagatatttcaaaaagtggagggccttgattgacatcgaagaggctttcatcagcaaaatattcttactcaacggattgctattccgacggatttcaatgtttgaacagcttgggggccggttagcgagcgattgaaacgtctacagattttgcattcacccaaatcatggatggacaccgaaaggctatttagtccaagtgatcgcgataaaagcctcacatccttaacgggctaacgactgtcttgcgaactaattccctggccgatatcttaagtaggtacattcctgtttctcatagcgactgccaagccatatctattagccaggcttagccatttggcaatttctgaacgtgcgtttcggatcgcttttgtcacgaaacgtttcacttcagtcgctgccgtgattctcccttagtgcagacttggggcttcacgaaattcaaactactcgccaggaagatcacctcgaatatccgttcgttgattccaacagtcggaatcgaaacggttcccacgttcaagagatgtcttccaagcagttccacagaagtcttgattgatcgaaggaagacgaatgttgagcgagacaacccccccggaagaaacgaaccagtcgacacctttgcgtgccgacgaactcgttaagactttccgacaaggatccaatttggtaaaggccttaaacggcgtttctctctccattcaaaaaggtgagttcaccgcgattatggggcctagtggctgcggcaagagcacgctgctgcacgtgatggcgggcctgactcggcctgattccggtgcggtttgggtcgaaggcgaaaagctatcgagtttgtccgacgcaaagctgaccgatttccgtcgccgcaggattggactggtcttccaacagttcaacctggttaccgcgctcaccgctctcgagaatgtgatgctgcctctgatggcggaagggggacgcggtagtgcagacgcgcaagatagagccaggcatttgctggaccggctcggccttggcgatcggcttgggcatcggcccgatgccatgagtggcggcgaacaacaacgcgtcgcgatcgcccgggcactggttacggaccctgcgattatcttggcggacgagccaaccggaagtctcgattccggtaatggcaatgcgatttgctctttgctacgggaacttaaccaggaggaagggcgaagcattgtgatggtgacccatgagcctgcggttgcggcttgggccggtcgcgttgttgtcatgaaagatggtgccgtgtgttcggactggaacgccgaccaatttccggatgcccagtccctggcactccgttatcaagagatcgtctccggccaagccgccatgggggccgtatgaacctgacttggaaacttttcatcgctcacacgaggcagcaaaaggttcgtttccttctgacggccttggcgatgatcttcgcaatcggcgtcgttctgtgggtggtctccgcctatgaagccattgcctcgcaatttgacgaacagaccgaaggtttcgttggaaactattccgttttcgtcgtgccgaaagatgctgaccagcatatttcctccgacgtgatcaatgccgtcgcgagtcatccggacgttgagtccgccaatccggtgatgcaattccgcatgatgtttcgtcgtgctgaagaattaccagaaggtgagaatcgatcgcgtcgaggtctggggcgattggggcctagcgtcgtaggaaccaacgcgacggaatcacggcacccgcttctggaagggagatggctcgatccgactacggaaaccgaggccgtggtcagcagcggcgttgcggacgcgctctcgttaacaccgggagatgcgattcagttccgcaccgagaatcgagaagtggtccagttgaacgttgtcggtatcgttcaacaagcggaagccggggtagaattcgcgatgacgcgaaccaaagggggagctccaggtggggttaaccggggaccagcgtcactggcggcatacgttcctagacggattgttcctcgtttaaccggctcggcggatgccacgaacttgattgaagttcgcttgcggccagccaaaaccgcggacgttctgggggacacgattgcatccgccagccctgccttggaattgcttcgcatggaggacatccgctcgaagatatcgtccgggtttgcagcggaaggggcgcggaaccaggcctattttgtaacggccctgtccatcctggcatcagcgttcataatcttcacgacgctcagcatgggagttaacgaacgtgcccgacagatggccgtgcttcgcgcggtggggcttcgccgatcgcaggttgcctggctggtattggtcgaggcactggtttttgccatcttcggctgggttggcggcctggcaggtggctggatcttgctgcagatacttgccaatgccacgccggcactgttcccaaacggcgtgcaactgggagtggcaagcattctgttgacgggactttgttcatttctcggagcgttattggcctcaatttttcccatctggaaagcaactcgcatcagtccgctggaagcgatggctcccacgccgatgcgtcccaggacttcgcggtggtatatgttagctacggtggtcagcttgctgctgatcgccgtcaatccgttgttggtttatgccgtgacgctgcccgagcggcttaggttcgtattgattctgctgttgggtgccccggctaccgtccttggttttgcacttctggccccgctagtcgttcttggtgtcgaacggctgttaagtccgctgatcgccttgatgatgcggcttcaagcgggactcgttaaaagccagttgagtaccaacatgtggcggactacaggcattgccgcttcgctgatgctggggctggggctctatacggcaacccaggtttgggggcattccatgctgggtggttttatgccgggacgttggacgcctgacacgatcgttaaattccccagcggtctgccgctggatcagtttgaacggattcaccaggtcgacggaatcgattcgaagcgttgtctgaaagtcgcggtggagcaaaccaagctcgctggggatccgttgaatgccgcggaacgcgattccgccgtgcgacaagacaatgtgtctctgattggagtcgattgcgaaaaggcgttctccggcgacgatcccctgtttcaactcagcttcgtccaaggcagccgagaggaggcactcgcgaaactgaaggaaggacgcttctgcctggttcctgatacgttcgatcgactggcagggctgaaggtgggagaccggattaccatgattcccccgaaccgccccaaagatcctgtcgaatacacaatcgccggtatcgtttcgatgccgggttccaactggataacgaaaacaaccggcattcgacgccatttcgttcggacggcaggcattgtgttggctcctgaaaccgaagttcgggaagatttcgccttgccgacgcttgagtatctgtggctggatcccaagtcggatgtgacaggcgagcagcttcgggagaacctcaagtcgatcgttgccgtaggtcccgctgccaggcccgaagcaagcgggccgggaggcatcgggccaggacgccgcgtcggaggatttggacgcgatgaattgcaggtcacgtctcttgagaacgttcgcaacagcatgcgccgccggggcggcgccgcggttggggcaatgggatggcttccgttgatcacgctgctggtggtctcactgggtatcgtgaatacgatggccgcgtccgtccgcgcacgccgttgggagtttggcatattacgagcggtgggattaaggcgattcggtctggtcaagcttgtcatttcggaagcgattatgattggcctggtggccagcgggctaagcctggcctttggtatcttgaccgggtggacctgcctggggctggttcgttatgtcagcaatcaatggtttgagggagtgagcactccgttggtggtgccttggtcctcgctcgtatttggttatgttctcacgtttgtgctttgctttctggcggcgctgtggccggcgatctcgtccggcagggccgaaccgctgtcgctcctgcaggccggtcgcgcatccacttagaaccacgtccagctactttggaagttgagccgatgaattcctcgtcccagacgtctccgcccttggtggttgagggagtccgtaaacagttcaggcgaagtcagacggccatcaccgccctcaacgaagtcgacctgacggctgaagcgggccagttcatcgtcatcatgggtgcctccggatccggcaagagtaccttgctgcacgcaatcgccggcctgaccgatgtggacgcaggaaaagttctggtgaacgggcaggacctctccgagctcagcgacgttcgattgaccaaatttcgcggaaaggaaatcggactggtctttcaggctttcaatttgattcccagtctgaccgccgaagacaacattcgtctgccagcccctgccagcagccatctttccgagcgtgtcgatcagctgctaaagcggcttaacctgcaagatcgacggctgcataaacctggagctttgtcgggcggagaacaacagcgtgtcgccatcgctcgggctctgatctgcgatccggccattcttttggcggacgaaccgacgggaagcttggactacgacgcgggacaacagatctgccaacttcttcacgagctgtcgagagagcaggggcgaaccatcatcgcagtcacgcatgagccgaatgtggccatgtgggccgatcgtgtggtcgtgatgcgggacgggaagaacgttgctgaattcacgcctgacgggtctcgcgatccgcaggaggtggccatgcagtatcaaagtctactgcgtcgtcccatggaggccgtttaatgaggaaggttttgcgtctggcctggtcgttcctctgggagtctcccgttcgcgtcgctctgactattaccgccacggccgcggcgacctgcctggtgatttggatcgccagtggttacgacgcgttagaaaagacgttcgacgactatgccaatcttgccatgggacgttacgagttggccgttgctcccatcgaacaaaaggaagagaagttcgtccccccggaagtgttggacgatcttaggtccgacccggtcgtggcgaatgcggatccgatgtgggccgttcgcgctgaagtaatcccgccaaaatcggccagtccggcagcgcgcgataaggataactccgataacaatggtccacccactggatatggcggcgggccaaacatccggcgccccggtagcctgccgggcacattgctgatgatcacagacgcccctgaagccccgttcgagatgctgcgaggcgattggctatcgacagaagaatcggacgttccgcaagttgtcgtgcgaacggaaacagcccagcggatggggatcgatgtaggcgacatgctgacgctgaagcagaacgatcaagaccataaactgcaggtgattggaattctggatgccccgaagcttcgaggtgcaggggattccgctttgccaattctcgcccccagcaaaggcgagatctttctgactcaatccgcggtggaacgcattcttacggatacgcctaaaatcagcctgattgccgtctctttgaaggaagagaccgatatcaacactttccgttttggatgggcgccgaaactttcgtcgtatgcgacgcctgtccagtttcagcaagctttcgaggtggaagaggcactggatcagagctcctccgcggcaaatgttcgtcttcaatcgttcgccgcaacgggggtttcgatgttggtcgcatttctggtggtgctttgcacgttgagcatgggggtgaacgaacgtatccgacagtacgccattctgagatcgctctcattcacccgttttcagattgctcaattaatcacgctggaaggtctgtttctgggtggtcttggtttcctgacagggctcggcataagctatctggcactattggccgtcggtatggcagcatcgcgagtgcttgaccatggcgtaacgctggggcggcacagtgtgttgctggggatggcggcaacgctggggggcgcgttcatcgcgtcaatcatccctgcctatggagcaacccgcgtgaagccgatcgatgcgatgtcaccacgggtcgaagacgcgggagaagagcagttttctcgaatcgggttccttgtcgggctcgtattgattgccgtgaacccggttctaacatttctggttccgccgcccttcgaggcagggatcccggtcctgatgaccatcggcttcgcctcgatggcaatcggtttcattctgatttctccagcgattgtggctggagttgaccgatggataagccccgtcttggctcgttggatgggaattgatccgaagctgctggcttgccagataaccagccatttatggcgaacggtcggggcctcgatttccctggccgtcggcgttgggctgtttattggaattcaggtttggggatttacgatgctggaagggtttatcccagggccatgggcgcccaatgccctcgtacaattcaattcaggcggcctttcccgctcggaagccaacgctgtggtggatattccaggaatcaaccccgagcgaagctttccgattgtcgtcgaacagcctcggatgcgggaagacctgaccaacagcgccgagcgagcctccgtcatacgccaggataatattgttcttgtcggcatcgatgcctcccgagcattttcgggaagcgacccttttctaaagttcgagtgggtggaagggaatcccgaagaggctagtaaaaaattggtctccggaagaggctgcatcgtaccggatcactttctacgggaaacggggctgaagatcggcgatacatttgctttggtacctcctgagaacgcgaagaaggttgtcgcttatgaaatcgcaggggccgtcaagcttccgggctggcattggcaaaccaagctgactggtttccgcacccggacgcatcgcgccgccgcgctcgtttttgcaaactatgaccccgtcgcgcgggacttcgaccttccccaggcatcgcatgtctggtttgatttcgcctcatcggacgccgatccccaacagattcagaatctagccagccagttctatacaaagcgtgtccagatgcagggtaccggcacgacgccaatggaagaggccgaggtaagcgttatccctgtcaaccaaatcagagagagaacgcgaggagctgcccgacgctggatctggctcgtcagtcaggtacctctgatagcgtctctgatcgccagtatcggtgtgctcaacgtttttctggcatcggtacgtgctcgccgttgggaattcggtgtgttgagaggcattggaatcaccagttcgacgatcatccgtgccgtgttggccgaaggcattttgattggaattgtcgctggcatattgagtgtcggctttggcattatgtgcggctggtgtggatgtggcatcgcccaatacatgagcttctttggtggcatgcagcccgatcttgtaatcccgtgggaagccgtcaccatcggccttgtgggattgataattctggcaacgctgagcgctgcctggccggcgtatttgatcggcaagatacggccgctggtcttgttgcaagaaggacgaggttccttttgagggatcgatgagatactcctttggggagactcaccgcgtgtcggctgcatgaggtcaaaggggcgtggggacgttatcaccgatagacgtggcctatacgtttagttccgttatatcccgacagtgtgatggcaccgtccacactctcgttttattgtagaaccttgtgacagatgcgcaagttcttttgaacacgtaatttgcggaaaagcaacgtcatcaaggcatccttcgcgtcctcttccgagaacctcaactaaaccttgatggtgttaatagcagccaatcaggctgacatcgactttgtcaggccctcctggcacttaacatcaagtaatatttcttttcgcgaacaggcaatatttgatttccagacctgcgcaaaaaaagacgccccgctgggaggcgtcaaagggtactcgacggaatgctccgtgagcaaacctttcgctgactattgctttactatgacttgcgaagcaatcgtcgcttaggtacatgtgtaaggatacccacccatcgagccatgtcaaggagttcgcgagagtgattactgacgcgaaaagttcaaaagacgaattgattcttggtttagacctaggcgtggcatctattggatgggcactgattgcaccacagaacaagaagcggcctattgcggcgatgggagtgcggcggtttgaagccggtgttgaaggcggcgccgcgaagattgaagaaggcaaggccaccagtcgagcaaaggtacggcgagataaacgccaggtccgacgacaaggctttcgccgtgctcggcgcctggcgaacttattctatttgtttcagcaaaatggcatgctacccgctgggccttctaagaagcctgaagaaaggcacgcgatattgcagcgaatggatgcagaattagggaaaaagtttaccgatcgctgcaatgctcatgtcgttccctactatttacgggcatctgcaactgattccaatcaagacttgtcgctgctggaaattggtagggctctctatcatttggctcaacgtcgagggtttaagaccaacctcaaagcagcgaatgatgaagaagatggagtggtcaaacaaggcattggccagctctatcaagagattgaaggggctaactgccaaaccttggggcaatacttcgctacgcttgatcccgagcagcttcgcatccgaggccgatggacgtctcgccagatgttcttggatgaatttgagctgatatggaagacgcaggctggttctcatcccgaattgacgaatgaacttaaagagaaggtccatcacgcgattttctttcagcgtcccttgcgttctcaaaagcatttgatcggacactgcgaactagaaacagctaaacggcgggcacctgcggcaagcctcgaatttcaggagtttcggtacctccaaaaactcaacgacctcacctattgggatgaggattgccaaccgcaacaactctccgatcagcaacgagaggaattaatcacagaattggaagcaaatggagatcttacgtttaaagggatccgcaaagtcttaaatctcaagacctcgaagcagaacccttcgctgcatattttcaattttgaggaggggggagactccaaaatccccggcaatcgtacagccagcaagttgtccgcgattcttggtacccagtggaccagtatgccgcctgtcgagcgtggcggactagtcgattcaattctcagctttcagtctgctcctgcacttcgcaagcaccttgtatcgaaatggggaatctcggacgaaaacgctcaacggattgttgattgtcgctttgaggatggattcggatctctgtcgcgcaaagcaatcagtcggttgcttccacacatgcgccaaggattgaattactaccaggcagagaacgctgaatatcccgaagcccgtaaaatggatgcgatctatgatcgactgccaccggtcaatgtcgtttttcctagtcttcgcaacccagccgttgttcgcgtgctgaccgaattaaagaaagtagtcaatgcgctgattcgtaaatacgggcagccaacaaagattcgtatcgagcttgctcgtgatttggcaaagagtaatcgacaaaagcaagcgatcttcaaacgtaatcgtgagaacgaaaaatcccgcgaacgcgccatcaaaggccttttggccgaaatgggtgaaaagtatgtcacatcaggcaatgtcttgaaggtgcgactggccgaggaatgtaattgggactgtccttacacaggtcgtcgcatggaaatggcaacgcttgttggagaaaacccacagtttgacattgagcacattcaaccgttcagtcgctcgttgaacaattccttcctgaataagactctttgctatcacgaagagaaccgcagtcgtaagaagaaccgtacgccttgggaggcgtatggcgaaacggaatcctgggatgagatgttgatgcgagtcaagaactttatcggtcccgctcgcaacaagaaattggaacttttctcggctcatgcaatcgaagaaggcttcgcgcaacgccttttaagtgacacgcagtttgtcaccaagacggccgctgactatgtagggctgctctttggcggtagacaggatagcgatggcaagcttcgcgttgaggcgcggacaggcatgctcgtctcgtacctgcgggacgtttggcaagtaaaccgaatacttcatgggggcaaccagaagaatcgtgctgatcataggcatcacgcggttgatgcattggtagttgcgtgttcgacaaatggaaccgtaaagcagttgagcgacgcggccaaacgtgccgaagagcttggtattcggcataaattcgatgacgttgaacttccctggaagaacttcatcgaggatgccacaacggcggtgaatgaagtcattgtctcaacccgtgttcatcgtaagctcaacggacaaattcacgatgaatcgaatttcagtcctccttgcgttgacccggaaaacaagaagacgtatcaccgcattcgcaaacctctcagttctctgagtgcaaacgaagttgacgcgattattgatccggcagttcgcgacgcggtgaagactcaacttgatcgaattggaggggtacctgcccaagcatttaaggatgaggcaaacctgccgtacattcgtgggcggaatggaaggttcgtgccaattaagaaggtacggattcgctcgcgaattttgccaaaactcgttctcggcaagggggacagtcggcgctatgtggcacctggcaacaatcatcatgccgagtttctcttgaagttcgacaatgacaaggagagggccgtttgggatttcacggtagtatcgctgtatgattcgatgttgcgatctaaaaagggccaggaaggcccgtgcgaggtaattcagaaagatcacggcccaggtgcgaagtttatgttttcgctcgtgcctggagagcatcttgaagtcgagatcgagcctgggcaacgtcaggttgttcgatgcctgagcttttctgatggagatttagagttaattcttcccgaagatgctaggccaagtactgaacgaaaagcttcgcgaattagaataagaagtgcaaaacgactgaccgaaattcaaccacggaaggttcttgtcgacccaattggacaagtctttccggctaatgattgatcgcatcttagatttttccaaccgtgctgcatcactacgcatacggaatcgccagcttgatgttcgcttcaaagaggacgaacaacaggttcagattcccgtcagcgacattgctgtcgtcgttatcgcgaacccgcaggttcatttttcgcacgcggtattatcggaattatgcgatcacggggcagtgctgatcgtctgtgattcgagcagcctgccgacaggaatgttgcttccgttgaacgcgcatcactggcaggtgagccggtttgagcaacaggccaagatcaagctgccgttgaagaaagctctatggcagcaggttgttagacaaaaagttcgcaaccaagccacatcactggaacgtgcaattggctcggatcgagggctcaagcatctggctactcaggtgcgttcaggcgatccgaacaatgttgaggcccaggccgcaaggcgatattggtcggccatgttcggtgattcgacttttaaacgggatcgtgatgctaaggacgagaatctgcttctgaactatggctatgccgtattgcgggcgattgtcgctagagccatttgtgcttccggcttgcatccttcgttggggatccatcatcacaatcgcggcagtggatacccattggcagatgatctgatggaaccgtttcgtccggttgtcgatgaagccgtatggaacttcgtatcggagaatcatgttccatcaagtttaagtacgcttgagaaacaacatatcatttcgcatttgctctcgaagttcacccatttgggagaacaacgcactttatttgacattgcttgtcggacagctagaagcttagtccgcgccatcgaaggggagacaaggaagctcgaactaccggagttttagaatgctatcggagtacaagggcatgtggctatttatcatgttcgaccttcctgtcgacacacgtaaagctcgaaaaaactacgccaaatttcgcaagcaattgcttgatgaaggctttcagatgatgcaatactcggtgtattctcgatattgtgtgagcgaagaggtttcaacaaagttcgttggacaaatacaaaagaacttgccgcccgccgggcaggttagatttatggccgtaacggaccgtcaattcggcaaaatgaaggtattctatggcaaaaaacgtgcggaaaccgagcaggcacctcagcaaatgcagctgttttgatacagttgctgagggcctaactcattgctccacaacggcttggggaacgatcaagtgtacctaagcgacgattccctccaagccacagcttgaacctcgcttcaaaggtacgaaaccagagtgtacctaagcgacgattccctccaagccacagccaagaatcatggctgatgtagaccgctttgagtgtacctaagcgacgattccctccaagccacagccgtagacatagccggtaagcatcttctcgcagtgtacctaagcgacgattccctccaagccacagcccaactcgcaacggtataaccatcgagggtagtgtacctaagcgacgattccctccaagccacagcgatgcccgggtaagcctcacaaatctcgcgagtgtacctaagcgacgattccctccaagccacagctactacgcggcactgcatcagccaacctcagtgtacctaagcgacgattccctccaagccacagcgcagcagaggcacgagccacgcgagacgacagtgtacctaagcgacgattccctccaagccacagcgcgtttagctggtcgggcgttcgcctgacgagtgtacctaagcgacgattccctccaagccacagccacctgacctgctggcatcagtgcgggggcagtgtacctaagcgacgattccctccaagccacagcattggggcgacaacggatttggctacgaagtgtacctaagcgacgattccctccaagccacagctgtccctcgtgggacttgtctacatggctgagtgtacctaagcgacgattccctccaagccacagcgcctgttcgacgcgtcatcgccgcaaggggagtgtacctaagcgacgattccctccaagccacagcttgagtttaccggcactctggcagcggcatagtgtacctaagcgacgattccctccaagccacagcgtgattggcccaatcaaaagcatcgtgggagtgtacctaagcgacgattccctccaagccacagccttttgttgaagcattccaggcgaactttcagtgtacctaagcgacgattccctccaagccacagcactgccgatcacgacgccggtggaggaaagagtgtacctaagcgacgattccctccaagccacagcatcgtttccatttccagtcgcagaatatctagtgtacctaagcgacgattccctccaagccacagcatcgaacaggatctggaagaaatcggctaagtgtacctaagcgacgattccctccaagccacagcccgcgaactggaagccctgctcgatagccaagtgtacctaagcgacgattccctccaagccacagcgttccttgcgtgttggaaatgggttgtcgaagtgtacctaagcgacgattccctccaagccacagcgttgttctcgtttttgttcaccgggtacaaagtgtacctaagcgacgattccctccaagccacagcattttgaatcgttgcttctcacctgcgatcagtgtacctaagcgacgattccctccaagccacagcccatggaccgcagcccaatggatccaggcagtgtacctaagcgacgattccctccaagccacagcgcaagtttgggagtggtcgcaagaacttaaagtgtacctaagcgacgattccctccaagccacagcagattgacgtaaggatgtttgtttcctttttagtgtacctaagcgacgattccctccaagccacagcctgcttcggattccttaattgcgtgaactgagtgtacctaagcgacgattccctccaagccacagccgtcgaagctcaggcgttcctccgctttgagtgtacctaagcgacgattccctccaagccacagcgcgattttgatacacccagcgggatctctcagtgtacctaagcgacgattccctccaagccacagcagaatactctcgcgttgtaccacgctacaagtgtacctaagcgacgattccctccaagccacagcaagtgcagcgcatcgaaaaacgcctgcgtggagtgtacctaagcgacgattccctccaagccacagcaacgcctattcgtttgcagttgcggcgcagagtgtacctaagcgacgattccctccaagccacagcgaagattcggagcgtcatagggtgccgactagtgtacctaagcgacgattccctccaagccacagcaagccgtgcgggcattgcggtacagctacgagtgtacctaagcgacgattccctccaagccacagcagaggaaggtttgcacggtggtaaggtttcagtgtacctaagcgacgattccctccaagccacagcgcgtggcgctccacttgttcccgcgtggtagtgtacctaagcgacgattccctccaagccacagcaagcacgcagtcatcgagccgttcattgctagtgtacctaagcgacgattccctccaagccacagcggccaggagtggatcgagaagtgccatcggagtgtacctatgcccatgacgtaaaggttaagaagagtttctgggcgaggtatcgagttaaattttatccagaaatgaggcataattagaaaaacaaggataagaagaagcaagcgtagcgggagattagctatcagtgcgccgggagctaaattcaaggcgaattggtgtcataatacttgaggggaatggttagcaattggcgggtgaagttcgggttacttcgaaagattatgaaatctgattgaagggctcgcacctaaattctcgctgatttcgagtcataatacttggagatgaattagctctcagcagattcctgccctttatctcggtgatcggaataacgcagaattgggttttgcggtggtaaaaagaatgacgaaacgccctactgaaaacgaagacgcggaatcggatgaactagcgatccacccggtctttgctcaacatgggccgccgaccaatgtcaagttcaggaatgtgctggcacacgatcttcggtcgaggcacccgactgttcctgccgaatgccaagctcatccgctggttcgcggccagttcttttatacaatcccgccccaactgctgcagaaggtgttcgagggagaggttggcgaagccctggagtttgatcgagatctttatgacctcgaatgtaagctatcagtggtatctggagatcattgctatcgagtaggattctggcagaactggcctatcaagtctgtactgatgggccagccttcgctctgccgagaagacttgaccgagttgggggtatctgaaacggaggccgaattaacggtgaaagcagcaaacaagcattcgtcttcatttgatgagattggcggtgcctacagtggttggttgatgaccaacaccgtttttctcgacgaaatggatgttttgcttgagaagtttggcgagcagatgcttcgctggggtacttccctggttggtctgccgatcttaagttcgatagagccaggacagcttaatccgacaagcgaggaaggttggcaggaatacgacgcggcggtcctagagttctgcgttcgatggcgacttcaaggcttggcaggtccaagattacctattccgatgaagcccatgattagcggccagtttccgataaccatcgtcaagcagttaatgcgagcaggcggtgtctttaactggcctgatactttccccctgtttgctcgcgatgttttgcgagatatgatcgctgacgctttgcgtccctcttcagatactcagcatttggagggctggcacaagatcatcgacgtaagaaacaaagcgaagaatcagtttgcctcgcttgaacgtcgatttcgatttcaacacttttggcggctgctccgccaaagacatcccagcatctttagtcggcgcacggctcgcgtcgagcgggcctttgccgaattctttggcgtgactgaaagttcgatgcatgccgatcgcatggcgattcagaaggcacttggcaaagactgggatcttagagccgaattagcctgacaatctgataccgcgaaacaggtagagcgtgtcgaaacgctttcccttctttagcctagctactcgctgtaaaccttgttgaagcttccgaacgcgaatttgatcgcgtggtcactccttggtggaagcctgtgatttcagcttggtgaacgcaaatggcgagttcggatctcaaaaagacgctggtcgatattaatgctctcgtggagcattccggcctatctgagtcgacgatctggcgtttaaagcgggatggcaagatcccattttatcaaccggcgggaaagcacggccgggtcatgtttcccgaggatgcgatcgaactttgccacgctacgactgacgctaccaacacacgtcagattgaaaacaccgcttccgatgagagacttcctgggccacgacctgggtggatgtcgcgttcgaagaaataaatcatttgaaaggagggatatgcctagaaaacctaaggaagcgccgatcccgtgcgctaatttcacttggtacctgcggcggaaggcgaatggtgtcttctttgccgatggtcgtctcaacagccagtatcagctagggaaaccatccctaggtactcgcgatcgtgaagaggcgtatcgacgccttcacgaactcgatcacgtgaaggcgatcgaatgtggcttggtcgaagctaagccaatggctaacgaaaaggacgttcagataagcgacggttggcaactttacatccaacgttgcgagaagccggagttgcttggtggtgtcagtccgaagaccatccagcgttacaaggcggtgcgtgacaagcatcaggagtattgccgcaagaaggggattgagaattggtcccaagttacgaaggccaacacgctcgactacgggacggatctcgcaaagaagaaatatgccgaccgaacgatcgtgttcgaggcgaatatgatctgctccgtcgtaaagtggttgacggaagaagaccacttgccacagtcgtgccgtttcctgctgaagatgaacaaggtgagcggaagctcgacttactgttatactcagccccaagtcacgcggatggttgagttttgcaatcagtcggaggaccttgtctggatggggcaggtgatcacctgtctggcaacgtccggactgcgaatcaatgaacttgctcaactccgctggagtgatgtcgacttggaggccaagacgattcgaatcacggatgagcgttccgttccccgacgtcgacagacgggaggcgagcgtcggatcaaagggaagcggggccgggctttgcccatgcacgctgaattcttcaaggtgctgcagcagatcccgcgtcatgccgatggccgtatttttcatggcccacgcggaggtcgcctcagtgaccgtcgtgtgctccagaatctgcaagaacgaatcattgagccgcttggcaaggagtttccgacaccgcaaggtgagattggcttcggcagcggcaccgtccacgggctccggcactacttctgtagcgaagcctaccgcaacggagcacgggacgccgaactcctggaatggctcggacaccgcgactcagagatgactcagctgtaccggcatcttcatcgcgaagacagccaccgtcgaatggaacaaatcaacttcctcggacgcgacgacgaggaaagtgctgatcgtgacgtcgcatagttgtgaacttggctttcgtagcgtcgatggccaacaggtagaatagcgatgccgctgatgggtgggataaattgccgtgaaatgcttcctggttcgacctgggaaacggtcctaagggggattatttcgggctcatttgtctcagtgtttgtctcagtcactgagacaaataaaaccacctcggcgcaaaacaaaagccgacaacgacttacgttgacggcttcgctagaaagcggagagaacgggattcgaacccgtggaacggttttacaccgttcaccggtttagcaaaccggcgcattcgaccactctgccatctctcctgtgggaaagcgaaagtctacacccttttccgttggtcctcaacgggacctccttcgctttttcctaatatggcctatggttacggtgaaataagccgttcaatatgggccatctgtcccgttaaccgccaaatttggaataaccatgaccctctttactcaaagtatgccccttatcaccatagggaaatcgcgtgcttctgaggggttcaaagggaaatcgaaatgattttacgcctagggacagttgctgtgttgcttgggttcgctgcttttcaggcctcgttcgccggcgagctttcgcattcggcggcgttggacaccatccgcaaggaagacgtcaaacggcacgtcgatatcctggccgacgacagcttcgaagggcgcgaagcaggcagccgcggagggcgtgccgcagggaactacctgcaagagctattttccaagtatggtctgaaaccagcgggtgataacggcacgttctttcagttgttccatggcggttcgcgcaacatcttggggatcttgccaggcgaacagggagccgattccggcgatttgatcgtcgtgggggctcattacgatcacgtcgggtacggcagtcggaccaacagctttggcccgtttggttacgtccataacggtgccgacgacaacgccagtggtacctcggcgttgttggaagtcattcaggccctcacccagatgaaggccaagcccaaacgatcgatcttgtttatcttgtgggacggtgaagagaaggggcttttggggtcgaagtattgggtcgaacacccaaccgtcaaatgggaccgaattcgcctgtacatcaatctcgacatggttggtcgcctgcgtcctcaaggggtcgaagtctacggaacgcgaaccctgccaggaattcgtcagagaattgcccggtccaacatgaccagcgacctgaagctcgacttccgctgggagatgaccgacaacagcgatcactacacgttctattcgcgatcgatccccacgctcatgttccatacggggctgcatggtgaataccatcgtcctcaggacgatgcgcacttgatcaaccacgatggagttcaggccgttgcccgtcttacggcggaaacggtctgggaagaagctaatcgagatgtctttcctacattccgtacacgctctcgcttggaaacggaatcggatcgaaagcgattcgaggttgcccggtcggtcaatcgttcgcgactgggaatccgttggaattccgagcagcaacacatagggcaggggctatcgattgcctcggtgtcgccgggtggcccggccgcaaatgggggagttaaggcaggggaccgattgatcgagttcgccgacatccctttcaccagcgtcgaagacttcctggcccaggttcaagccgcaccggtcgatgtcgtgctgaaggtcgaaagggaaggggaagcggaaccgttggccctcaacatcaaactagacctgaatccggctccggtgggcatctcttggacgaacgatcccgccgagcctggggccgtcatgttgaccaacgtgacgactggctctgtggccgccttggcaggactcaagccacttgatcgtgtttacgaagtgaacggcaagccggtggaaagcagcgaggcctttaagaatctggtcacccaataccaggatccgaccacgctgctggtcgatcgagaagggcacatgctacagatcgagttgccacttgctgcgattcgccccctgctgaaagggacgcaagagccatctgctgagactgcgcagccatagcggtgtgcttttctggcaaacatttcgagacgagattcaattttgtcgaatctcgacgcgaggcgtatcgataattgccaagacgccctgcgcgattggcaatatcctacatggcatctaatgcagtccgcagttgcgtcccagaaccagggaacggtggactgtttcgccaacagaaccgattgccagggattcactgccatgaccacgcaagtcgtcgtcgaaaccttcgacgtttagtcaaagtgctggaagggtggctgcaggatgggtaggacgctacttcccatcctgcgtcatcttccggtatttcagcggcgataagccggtgattcgtttgaattgtttgcagaacgatggctgatcgctgaagccgcagtccatcgccaccgtggcgatgttcttgttactgtcacgcaacatcacggcggcggcttctacccgttgtcgaatcagatactgcgacggggtgatctgaatcatgcttcgcatcagccgttcgaactggctgactgaaagccccgagtcttccgccaattgctgaatccgtagcggactggcaaagtcggtttgcatcctgcgcaaagcgagcgaaagcttgttgtagcgatcgtccctttctgtcggggcatgcaggtcgcgcgacatgccgataatcgcaatcacttcctgggaaatgttcttcgccaaaaccttgctggtgatataccagcctagcgatccatcgggattggtaatcatctccagttgatcgtgtagattttgtccacggctcagcagttgacgatcttgttgctgatagccgacggccagggcctgggggtagatatcgaaggccgtcttgccgatcacatcctctcggcgaagcttggggacgctgcgtaaaaatgcactatttacgcttagatagcgtccctccagatctttgatgcagaggttcacctcatcgagtcgagcgaacaatt

SEQ ID NO: 992 - DNA, 6272 bp, synthetic construct
  source 1..6272: mol_type = other DNA
  misc_feature 1..6272: note = Synthetic
gccagcgtaaacgcaaacaactgtttcttcatccccactcctcaggttgtaattgggtcttcttggctccggtcacgaagcggaccccgcattaggaagccaaacgagcaattatagttccgggcgcgcagcgcggtcaatccgacaaccgcggaagtgtaccacggacgtgaaggcccttgtagcgctggcttgcccgcattcgggcgtcccgccggccggccctgtccgccgcggcggacgccggcactccgcattccgcactccgcattccgcactacggactcctttatctttacataactggtggagtgcaagtcctttgcttgtcggcagttgcgggccatggaaatgagtgcccttggggtttaatttcctgcaacccgctgattcgcaagaacatgctcccctggcggcctgttacctgtaaataacaggtgtagtaggggaaagaagaagccaatctcgtcccgatttatttgtaccgctggcgtcccgccggccggccctgcatgtcgcgtccgccttccgccttctgtactccgcattccgctttccgcactccgccttccgctttctgccttccgccttctgccttccgcactccgcaccgcccgcgccaactcgctatcaaatccggcagccatgatttcatatagacatatgtttgtcaagctttttttatggaccgctggcgcctgccccggcttgcccgaattcgggcttgccgtgggtcccgcccaatgccactcactttgcgggcgggcagccggaagccccggcaggggcgagagattatagcccacggtcccgccctgcgggatgggatttggggcggccaaccagtccagccccggtgggggcgaaagagcgcgctggttatgacacgccttcttcttacgccccttgcggggctggcccccttgcccgttgtttacgagtctgaaataaggccagacctattgcggagcagccagtttgctgtatactccagcccagtaccaacaaaagaccaaaacacgaaaagcgccccgaggggcgcttttcgtaaggctacggtagaaccgataccttgcgtgcgaaagccttactgggattagcagggcaatcgccgctcagatacactcagatgttaaggtactccctgctgcacccgcctgtcaagagggtaaaagcgatggacacaatggacagcaccgacgagtcagttccctacatcttgggcattgatcttggctcggcctcgattggctgggcagtgctaacccggccggcggcgggcgaaaacgctttgctcacaaacggagtgcgtgtcttcgatcccggagtaacgggcgaaatcggagacatcgaggccggcaaggacgaggcgcgcggaaaagcacgccgccaggcccgccagtcccgccggcagacctggcgccgggcgtggcgaatgaagaagctgtttcgggagctgcaaagcgccgggctgttgccgctaacggctcccggcgagcaccaggacgaggcgaccgcgcgctatgcaaccatcgaggcgctggacggagaattgcgggcgcgatggctcgcgcctcagccccttgcggttccaggatccgccaacggggccggcgcggcccctgccctacaacccgccccggcgcccgagcacgtcttgccctacttgctgcgtgcgcgggccctcgatatgcgccttgagccgtttgagatcggccgcgctctgtaccatctggcgcagcgccgagggttcctcagcaaccgtctgacggctccaaaggaggacgaagaagaagggcaggtgcgtgagggcatcagcagtctggaagaggagatgcggcaggcacaagccagaacgctgggcgagtatttctcgagactggatcccacggaggagcgcatccggcgccgctggaccgcccgctcgatgtatgagggcgaattcgatctgatttggaaggcgcaggcggtgcatcatccgcagttgctcacgccgcaactcaggaaacggctgcattctgcgatcttctaccagcggccattgaagagcgcttccgcgctgattggcgaatgcgagtttgaaaaaggccgccgccgcgcgccttgggcctgtttggaggcacagcggtttcgcctgctgcaaaaggtgaacgatcttgaggtggtgacacagggccagcggcacctcactggagacgagcgggcggccttgctggccgccctggaaacgcgcgcggacatgaaatttgcggaaatccggagattgctcggcctgaaaaaccagcgcttcaacttggaggcgggcggcgagaagaagctgaagggcaatctcaccgccgccgtcatgacgcggtgctttggtgagcgctgggagacgttcaaggatgaggagcgagcccgcatcgtcgaggaatggcgaaccatcgaaaagccggaaacactggtgcggcgcttggttgacgtttggggcgcgcccgaacctcccgcccggcaactgagcggcgagcgcgctcccaacggctactgtcacttatcccgcaaggccctgcggaagctgttgccgctgatggaagagggcgtgcaatacatggccgccgtcgataaggtttacggaacgagcttctcgggcggcctggtctccgaccggcttccgcccgtccgcgagttgctgccgcaactgcggaatccggctgtcgggcgtgcgttgaccgaattgcggaaagtggtcaacgccatcgtgcacgaatacggcaagccggccgagatccgtattgagcttggccgagacctgcgcaggccaagagaggagcgcgcacgaatctggagagagaaccgatcccggcaggacgagcgggaacgggtgcgaagcatattgagagaggaagtgggagtccctcagcccagccgggatgatatcgacaagtaccttctctggcaggagtgcggcaacttctgtccctataccggacgccccatctcccgcgaggcattgttcggcgcggcgccgcagttccaaatcgaacacatcctgccgctcagccgttttcccgacgacagtttccagaacaagacgctgtgctatcacgaagagaacgcgcggaaaaagaaccgaacgccattcgaggcttacggcgccgacccggacaactgggccaggctcctggagcgggtggggaagttcaagaaccgcgagaagctgaggcggttcgagatgcagcaaacggagacggaggcactgctccagcagttcagctcgcggcagttgaacgacacgcgctattccgccaaggtggccgcccagtacctgggggcgctatatggcgggcgagacgtggccgacccggccacgccgaccgggtctcgccgcgttgtgtttaccagcacgggccaggtgaccgccacgcttcgccgggaatggcggctgaacggcattcttccggcaccagcagggctgaccgagccagccgagaaggcgcggcacgaccatcgccagcacgccatcgatgcgattgtgaccgcgctcgccactcctgcgtgggttaaacggctgagcgaccgcgcggctggcaaccagcgccagtcgggccgcgcctcgttccgcggcctggaggggccctggcccaactttgccgacagcgtgcgggaagcagttctttcgatcaccgtgtcgcaccgtcccgagcacaagctgagcggccaactacacgaggaaaccaactacggaaggccgtacaagcacatcgagaagggaagagagacggatcgtgccaacgtgcgaaagcccctgtccgccatcaaaccaggcgagattgcgcgcatcgttgatccggccgttcgcgaggccgtcgagcgccgcctggaggggttgggcggcgatctgaaaaagctgcaactggcagccacgccgccgcgccaccggcctgcgggtgcagcgccggagccgccgccgttcttgaaggcacgcgatggccgcgagattccgatcttcaaggtccgcgtgtggcaggcactgactccgcaaaaggtgggcgaggggtcgcgcgaacgccaggtagcccttgccaacaaccaccatgccgagatttttgccttgctggacgaacagggccaggagcagcggtgggacgcggtggtcgtaagccggctcgaggcgatgaggcgcaagcggagcgggcaacccctggttcagcgggatcaggggccctcgtgcttgttcaagttctcactgatgttgggtgacaccgttcagatcgaggacgagggccacagaaccctgtttgtcgtgcgaaagatcagcgaatcagggaaaggacggatcgagttcgcgttcgcccgcgccaccgacgcgcggcgtgccaaggacatcaagctagggaaggggcgcgactggccgaggcccagtcccgacggtttgcggaaactcggctgtgcgaaggtcagtgtcgatccgctgggccgcgtgagacctgccaatgattgagcgcatcatcgaaattgccgaggacgcggcgcggttgcacgtgcgccacgcacagttggtgatcgagcgcgacgggtgcgagccagtcgccacgccgctggaggaactggcggcgttggtgcttgctcatccccgggcacagctcaccagcgctgtcctttgcggcctggccgaagccggcggcaccgtggtgatctgcgatgggaagcacctgcccaccgccttatttcttcccgtgcagtcccactttgtgcagaccgagcggatggcccggcaggcggtgatgccggccccgcttcgcaagcgcctctggcagcagatcgttcgcgccaaattgcgcgcccagtcgcggctgcttatgcaactgcggggccaggatggcgggctggcggcgatggcggcccgcgtgcgttccggtgatccgaataatgccgaagcccgcggcgcgcgcatctactggccgctgctgttcgccgattcgcgtttccggcgcgaccgcgacgccccaaaccagaatcgccatctaaactatggctacgccgtgctgcgggccttggtcgcgcgggcaatctgcgccgccggcctccatccctcgctcggtgtttgccattacaaccggtacaacgcgttctgcctggccgacgatttgttggagccgcttcggccgctggttgaccgtgcggtggtcgaatggttagccgcgcatgacccggccgcgctgctggacgctgaaacccgggcctggctcattcaaccctcgctggctcattatgcggtgggcagcgaggttcggtctctgttcaatgtgctggcgcaggtggcctccagcctggctttggtgatcatgggcgaggcgaaggatttcgatctgccggtgctcgagtcgattgacgaaactgccggctgcgggccggttgaatccgctgctgcggggggcgaggacactgcctaatcgaaacctggtggcttgcctgctcgtctttgttactcgggctgaaaagcgaaatggttcgacgacgtgttgacctctccgcttaccgttccatgtggctcttcgccatgttcgatctccccgtggacgatgccgagcaccgccgggagtacactcgtttccgcgccgccctgcttaagaacggtttcatcatgctccagtactcggtttacgcccgcttcatccccagcgaggaagccgcacaggttcaccgccggaggatccagagggcgctgccgcccgatggcgaggttcgcgtactcgctatcacggaccaccagttcgggaagatggaggttttttgtgccagaaaaccgcgcaaccctgagcgagcgcccggccagcttttgcttttttagggtgccgtggcggggatttcccccgcaacccaatgggttgcgggggacgcagtgtacctgagcggcgacccccggccaaccccagcgcatgccactgaggggaccggctatcacgaagtgtacctgagcggcgacccccggccaaccccagcacaggtctgtgaatgccggctgcgctttgaagtgtacctgagcggcgacccccggccaaccccagcccgcccaacatccgtatttggatgtagtagagtgtacctgagcggcgacccccggccaaccccagccgtccgacagcgccacgacgcgaccgttttagtgtacctgagcggcgacccccggccaaccccagcgcttcttgcccgcggttcatcaggtagtggagtgtacctgagcggcgacccccggccaaccccagcgcgcggcttctgggtgcgtgtgctct

SEQ ID NO: 993 - DNA, 6186 bp, synthetic construct
  source 1..6186: mol_type = other DNA
  misc_feature 1..6186: note = Synthetic
gcagcgccgcgctccagaacgcctgccggatcgtgtcgcgcaccagttgcggggcatcaaagagttcggcgcgccggtacagacccaggacggcgcccacaatcccccagatggccaggatgccaatcagcaccccggcaaacaccactggctccaggtagaacaggcgcagcgattcgatatgctggcggaggatataggccagttcaaaggcgactgccgttacggcggtgtcaccgagcgccagcacgacgccgaggatcttgctgcgacgactaaacatgagcgaagcggcggaagccgcggttcaacgtcttgcaaaaccaaaagcaggcgcggaaggcacacaacccacatacccggggaaggctcattctataacagcttggagtcaatgggccagtcactccgggcctgtccagcattttttgttgaaagcggcctcggggcggtccggggctgagttcttgtgttccgcctcaactggaactgcaggggccccgccggtgtggcagggagaggacataacccaacagcgccagcatctggccccggccggcgcctgccgagaaggcgtcagtccccaccgtccaccaacaagccggcccgcgccccagccagccctacgagtggcacgggtagttcgtccggaagggtgcggcggccctccgctgtggcttccgtcgattgcgttgcgtcgggcacggcagtttgctgtacacttcgggtagatgggcctggggctctcacaggaaatagaaaagcgccccgcagggcgcttttctgtaaggctacggtagaaccgataccttgcgtgcgaaagccttactgggattagcagggcaatcgccgctcagatatactcagacctaacctacgccaaagaagttgcggtgtcaagaggaaagtgagcaatgactggcactactggaagtgatacagcgacgccctacgttttgggcatcgaccttggctcggcctcggtcggctgggccatcttgaggcagcctgcccctagcggaaatgacctggtcgctaccggggtgcgtgtgttcgaccccggcgtgacaggtgaagtctcggacatcgaggcgggcaaggatgaggcccgcgggaaggagcggcgtgacgcgcgccaggcgcggcgtcaatgctggcggcgagcttggcgcatgaagaggctgttccgcgagctgcaggccgctgcgctgctgccgccgaccctgcccggcgagcacccggacgagcccacgtcgcgctacgctacaatcgagcggctggacgcagagttgcgcgagcgctggttgaacgctggctcagccgcatcccctgcgcccgccggtgcaggggccgccgcccagcccgctcaagccactgtggcggccccttcgcaggtcctgccctacctgctgcgcgcccgagccctggaccagcgtttggagccgtttgagattggccgggccatctatcaccttgcccagcgccggggctttttgagcaaccgcttggcggcccccaaggacgatgagaaagagagcgaggtatacagcggcatcagcgccttggcagccaagatgcaggaggcgaatgctcgaacgctcggcgagtatttctcccgcctcgatccacgcgaggagcgaatccgggaccgctggaccgcgcgccgcatgtacgagcgggagttcgacctgatttgggcgcctcaggcggcccaccatccccagttgctcacggcccggctctgcaagcggctgcggcgtctggttttctaccagcgggcgctgaaaagcgcctccgggctgattggtcagtgtgagttggaaaaaggccagcggcgggccccgtgggcctgtctggaagcgcagcgtttccgcctggtgcaaagcgtgaacaatctcagggtgaccagccaggggtcgcgggaactgacgcccgatgagcgctcccgtttgcttgccgctctcgaaggccgcaaggacatgacgtttgaggcagtcggcaagctggttgggctgcgcggggaacgcttcaatctcgaagcaggcggcgagaagaaactgaagggcaaccgcacagccgcgctcatgactgcttgctttggggatcgctggcaaacgttcgccgaccaggaccgggcccgaatcgtcggggaatggtgcaacatcggcaattcggagaagctggtcagccgcctggtgggagtctggggggcggccgaacctcaggcgcggaagctggccggcgagcggcctccgaagggccactgccacctgtcccggcaggccctgcgcaggctgctgcccctgatggagcggggcatgccttacatgaccgctgtcgatgaagtttacggggttcgctactccggcggccaggtctacggccagctcccgccggtccgcgagatcctgccgcaactccgcaatccggcggtggcccgcggcctgaccgagttccgcaaggtggtaaacgcgattgtgcgcgagcacggcaaaccggccgaaatccgcatcgaactgggccgggacctccgccggccgagagaacagcgtaagcgcatctggaaagaaagccgggcccgcgaggacgagcgggacagagcccgccggctattagaaagcgaaatcggcatacccaagccgacccgcggcgacatcgagaaattcctgctgtgggaagagtgcggacacttctgcccttacacgggccagccgatctccagggaggcgctgttcgtcgaaccacagtttcaggtcgagcacattcttcccttgagccgctttcccgacgacagctttcagaacaaaacgctgtgctatcacgaggagaacgcgcggaaaaggaaccgcacgcctttcgaggcttacggcgcggacccggagtggcccagaatcctggagcgtgtcaagaacttcaacaaccatgagaagctgcggcgcttccaaatgcaagagaccgatgccgggcaaatgctggagcagttcagttcccggcagttgaacgatacccgttatggcagccgcgtcgcggccgactacgttggggcgctttacggagggcgcgatgtggccgacccggcgatgcccgacgggaaacagcgccgcgtggtcttcaccagcacagggcaagtgactgccatcctgcggcgcgagtggcgcctaggtgcaatcctgcccccgcctcccaacgtcaccaacccggcggagaaggcgcggcacgaccatcgccagcatgccattgacgccgtagtcacggcgctggccaccccggcctgggtcaagcggctgagcgaccgcgccgccggcaacctccggcagtggggccgcgcgtcgttccgcgggttggaaggcccttggcccgattttgtggatgcggtgcgggaatcggtcctctccatcaacgtgtcgcaccgcgccgagcacaaggtgagcggtcagcttcacgaggagaccaactacggcaagccatacgaacgtaccgaaggcggcaaggcaagcgtctgctccaatgtgcgcaagcccctctcgggcatcacgcgggcgcagatcgcgtgcattgtggacccggctgtccgccaggccgtcgagcggcggctgcaggaactgggagacgacctaaagaagctgcaaagctcgggaacgccgcgcggccccgaggccagcgacgctctggagccgcccttcctggtggcccgcgacggtcgcaggattcccatctacaaggtccgcatccggcaggtgctgagcaccgagaagctgggccagggttcgcgcgaacgccacgtggcgctcggcaacaaccatcacgcggagattgtcgccgaactggatgagagcggtgaggaagggcgctgggaagcggttgtggtcagccgcttcgaggccgcggcccgcctcgaggacatgaggcgcaagcgaagcggcctgccggtggttcagcgcgatcacggctcgtcccgcgtcttcaaattctcgctgatgaacggcgacactgtggaaatggccgatggcgagcggcgggccctgtttatcgtccacaagatcagccggttcgccacggggcaggtcgagttcgcgttctgccgagcgaccgacgcacggcgtgtcaagcagatacaggaagggaagggagttgactggccgaggccgggtccggatgggctacggaagctgggctgcgtcaaagtcagcgtggatgcgctggggcgcgtgaggcccgccaatgactgaccgcatcatagagatcgccgaggagggcgcccgcctgcacgtgcgccatgcccaattggtcatcgagcgccaaggccatgacccggtgagcacgccgctggaggagctggcggcgctggtgctctcccaccctgcggctcagctcaccagcacggtcctctccgggctggcggaggcgggcggcacggtggtcatttgcgaccgcaaatacctgcccacggcgctcttcctgcccgtgcaggcccacttcgtgcagaccgagcgcatggcgcggcaggccgccatgcccgccccgctccggaagcgtctgtggcagcaggtcgtgtgtgccaagctacgcgctcaggcccgtctgctgctcgagttgcgtggtgaggacggcggattagcggccatggtcccgcgggtccgctccggcgacccggataatgccgaagctcgggccgcccgcatctactggccgcggctgttcgccgacccgcatttccggcgccatcgcgacgccccggaccaaaaccgccacctgaactacggctatgccgtgttgcgggcgcttgtctcgcgggcggtctgtgccgcgggcctgcacccctccctgggcttctgccattacaaccgctacaacgccttctgcctggccgacgacctgatggagccgctccggcccttgaccgaccgcgccgtggtccagtggctgcgcgaccatgatccgacggctccgctcgattctgagacccgtgcctggctgatccagccggcgctggcccgctacgtggtcggtaaggaggtgcgcactctttttgattctctctcccaggtcgcctccagcctggcctcggtggtcatgggccaagcgaaggcgctctatctgccggttctcgatgcggttgaggaagcggctgccgcggcagaggatgaggctctgggcgagagcgaagcgggcgctgtgcctgatggcggcccggcagcggccctgcctggttagtctttcggcccctttggatgtacgatggcccgacgtcgcgttgacctttccgcctatcgttccatgtggctgtttgccatgttcgatctgcccgttgacgacgccgagcgccgccgcgagtacacgcgcttccgcgccaccctcctgaaagacggcttcatcatgctgcagtattcggtttacggccgcttcatctccagcgaagaggccgcccaggttcaccggcgaaaaatccagcgggccctgcccccggagggcgaagtccgtttgcttgccgttacggaccaccagtttggcaagatggaggtgttttgccgaagaaaaccgcgcaagccggagggagccccggcccagttgatgctgttctagcgcctcagcaggggagattcccccgcaaacccaagggcttgcgggggacgcagtatatctgagcggcgactcccggccaaccccagcgcgctgagcggcgcgcaacagacgctgtggagtatatctgagcggcgactcccggccaaccccagcgcaccggcacggtcttcctccgctgtccgcagtatatctgagcggcgactcccggccaaccccagcgcgtgtggtcacggccccggaacggtcggagtatatctgagcggcgactcccggccaaccccagcccgggctggattgggtggaggggtgagcgcggcgagtgtccgccaactcccgtgctttgggagttggcggacactcgccgcgcgattatctaaattcgtgctcggccccggcaagcaatgcccggcggcagttcgctgcgccctttcttgttggcaggcggccggggggcgcggcaagcagcgcccctacatgtgtcataatcgacgcgaatgcccacaaccgtctccgagcgccgctggcaggaagcgcagaagcacgagcgcgagttctgggcccgctggcggcaaatgcccgtgtatcaggggtttgacctcgatg

SEQ ID NO: 994 - DNA, 15087 bp, synthetic construct
  misc_feature 1..15087: note = Synthetic
  source 1..15087: mol_type = other DNA
gccgtcgccgaaattccacaagaacgtattcgctccttgcgatgtgttggtaaaggtgacctttagcgtgtctaccgaaaaggtaaagttagacgacggtatgttttgtaccgaaatataattcgtcttggtgatctggttagtaccggtagagttgatagccgtcagcgtaaccgaatacgtacccgacaagttgtaagagacgatgggatttttcaagttagagctggaaggagcgccgcctggaaattgccagataaacgaattggcgttggaggaagactgattggtgaattgcaccaccagcggagcacaacccgaggtgggatctgccgaaaagtctgccgtaggaagggtattgataacaaccgtttttgtagccgtaccgcagtcgttttgcaccgtcagcactatcgtgtaaatgccggcctcggcgtaagtgtgtaccgggttttcctcgttgctgaagccgccgtcgccgaagtcccaattaaagctcgtagcgttctgcgaggtgttggtaaacgtatacgttagaccgctgaatgtaaaggtgaagttggccgtcggggtaggcttgatgagcaccggcttggtgacggaagcggtgccgcccgggccggagaccgtcagcacgacgttgtacgtacctgccgtgctccaggtgaccaccggattttgctgggtagaagaggtaggcgagcctcctggaaattgccagctgcgcgaggtgatgttgccggtggataggtctgtaaattgcaccggttggaggcgacaacccgggtcgggcgaccactcaaagtttgccgtaggcggctggttggcgccgcagggttggaagcagcccgagttgatgcggttggtgatataattgctgataacggtgaccgaattgctgctccaggtgttcgaggtgctcacaaaggggcacatgatgtagttcggagggcagctccctccgccgacggggtcgtgattggccgacatgttgtggccgatctcgtgcgacgtaaggcagcgcagcaactcggagttcgtagaaaaatcttgtaggcagtggtacttgttggagttgcacatgccgttcaggtaagcgataccgatagtgttgccgtcgaagttgcgattcgtccacagctcgccgttgtcgaagggcactccgaagccgttgttgttgccccagtttcggaacgaggccaacagctcgccggcgttagtggagctcgtccacgggtctgtgccggtgaccacaaactgggtgacgatgacaaattccatatcgtggttaaacacgcccgtgtagtccccttggacgttgttgatgatgccgatgttgcgcgcctccaccgcgcctaccgagccgtacttgttaaacatggacttgtcggaggcgatggcgatttcgatctcatagcaaccggcggactccggcacgtcgtctttgtacttttccctgaaatgctcgtgctcgtcggccgccacttcgatgcagttgccgtaatcgcggtctcttatgacggcgctcataggataaaccagtatcaggtcgcgagaagcctcaggttggtggtaccacagcggctcgatgtagtagcgttcgcctccggcttcgacaaagccgtatagaaagtccttatctaccgtcaggcgcactttgccggaggtgcttatttcgtaacccttataggcaatctggcgcaagcggcgatacgtctccacctttttatcggtggccacttggagaaaataacccggggctaacacccggctgggctgcagcctaagggaccattcgtagcggtcgcccaaccggagagtaaaagccgcctgctccggagactcgccaaggaattcttgtagcacggccggattcaagcgatacacttgccagtgggtcagtacctcctggatgccttgcggcaccgagatatttacctcctgccccgtgatggtctgagcactcagagaaatagaaaacaccatcggcgcaagccaaacggccggccgacaaaccttcagtaaacgattgagcataattccggaaagtgttgtttaaaagcctgggaaaaaagagcagttgcctgtaagagccaaacagagtggtcttcatcccgttcaagggggcgcctgacacttatacgaaaaaaaggcaggcgcaggctgctctcggcttttgaaattgggaaaggaaggagcgataaagccaattccggcgtttatttgcgcatccaaacgctttacggcggcgaatgtagaaacagttggattattttccggctatttgtagccaaaatgcacccttggtcgagagtacgacaatgccttatcttctttaacactacgcccagtcggcttttctatgagaaagatacgcccattcctcctcctatttgtgctctttgtcggtggagctgtaccttccgccgtagcgcagagccggcgctcgggtaccggccgcagctcctctgagtcgccctttgccgatcggctctggtatggcgctttcttgggtcttggctttggcggcaccggcttctcgtcgactttcggaatgaatgtttcgcccatggtgggctataaaatactgcctgcgttttccgtagggcctcgcataggcatcgactacacgtatcaaaaattccagggtatcaaagcctttaatcttttcgatgttgagttggcgcttttcgcccgtttgcatgtgttccgcgggttctttttacaaggcgaaatcggcacgcgctctgaccagtatctggagacggacggcatagacttcgccaagcgaacgcgcacgcgcccagtgcaaatggccggcatcggctacaacttcagcggcggccgtggaggcttcggccaagagattgccatcctgtacgacttcttcgtcggctccgatatttacagtatcgaaaatccctggcaataccgcatcgcctttacctacggtttttagcgccgtgcttagcgtgcatctggagtctctgctggtaacgcattttaaaaactatgcgcaccattgcatcgagctgtcgccccgcctaaacgggctggtaggccctaacggcaccggcaagaccaacctcttggaagccgttcacgtcctctgcctgacgcgcagccaccgagggctatcggatcgctatctggtgcagcgcggcgccgatttctatcgcatcgagggcctctttcggcgaaacgacgcgccggagcgcatcgccgttaagtacgacggccggcgcaaagaagtcgtgcgcgacggcgtcccctacgagcgtcttaccgactatatcggccgctttcccgttgtcatgatctctccggacgacattgccctcgttcgagaaggcagcgaagaacgccgccgcctgatggatgtaacgctttgtcagctgtcgcccaattatttgcaccagctgacggtgtatacctccttgctcaagcagcgcaacgccttgctcaaagcctttgccgaacaacggcgcttcgatgccctgcttcttgatgctttcgaccgacaaatggccgcctcggcagttgtgctgtggcaagagcgccgctctttcgcccaaagcctgtcgcccatttttcaaagcatatacgccgaaatcgccggccctgccgaagcagccgcccttcacctggaaccggggaatagctccaacgactttttggcggagctggcggcctaccgcgagcgcgaccgcgccttacagcgcactaccgtaggtcctcatcgcgatgacctggagctcaccctggacggccaaccggtaaaaaaatacgcttctcaaggtcagatgaagtcctttctgctggcgctgcgcctatctcaatacgaaatcctgcgacaagaaaaacacctccctcctctcctgctgctggacgacatcttcgacaagttggacgagcggcgcgtccaacgacttatcgacctgctgtggcggcgcaactttgggcagatttttattaccgacacccatcgcccgcgcctcgaaggcgtagtaaaggccttcgggaccgactatcgcatttatgctaccggctcataggcgcgctactgaggcgccacaactacccgacgagccagcgtcccggtcgaggtgcgcacctgcaacaggtatacgcctgcctccggaggtctttctttgcctatgaaaattgttgccctcccggccggcatgtcttccgcgtgggcctctttaagcctaccacaggcatcgaacaactcggcgcgcaccgtcgtcggccggtgaagtaccaactccacggcaaaaaggccgttgttggggttgggcattacgcgtgcattctccacctcttgcggctcgcgggtgctcacgactaccgtcacattttgttgacgaacggccggtgtagccgagcagcggtttctcgtccgcaacgtaacgctgtactcccccggctcggcatacacgtgcacaggatgcacggccgcactggtattgccgtcgccaaaatcccactcgtgttgctctgcatgagtacttagattggtgaacgccacctcttgcccattcgatacccaggaaaagttggccgtcgccgtaccgataacgtgcagccggtaatagccggtgtccgaccggaccgggttggaggcgattaggcgaaccgaaaaagcgccgggcaccaaaaagcgcactctatgagggccggggccgaaagccgtgttcggctgactgcccgtcccgaaagaccagttgtattggtgctgaacattgggcgacgctacccaaaagcgcaccgtatctgtgctcctacaggccgtatcggtcgaggcctcgatggcggcctgcggcaaggtggtgtccggcccgacgatgccgatattatctaaaaagaggttgtttccgtagtcgtttacccccgtcagccggatgacgagtgacttgcccgcaaagctatccaaaggtatgctcgcctgacgccaatcacccgccgccgtgggagcaaaagggccggtctgcggagggcgagtagccagactggttcctcctctctcccacaaaactacaggtggctgctgcaacgaacagcccggaaagacctccacccgcaaggagtcggcggagtcgacggagtaattggcatgtgcccagtgaaacaccagacgcgcgctctgaccgttgggcagttctacgggaggaagatagagatagtccttttctctcgtttccggataagagaagaagctcaggtgcacggcactggttggcagcccatcggggcctattacggaaatagggtatcgaagccacgtaacgtcaccatcaggattgaccacagaccaataaaggggcggaaatattgctccctcgaagtcctcttcgagaggcggagcgagcgtttctaccgtagcgcgaaactcgaacgtcaaagtatcgttaaaaaacaccgtttccgcagcgagcgaagtccacacccgcaggcggttcgtgccacttttcgccaccaccatcggctgggtaaaggtatagacaaggctgttgccgggtgccagttcgggcaagccctccgataccggcggagcatcgttcagttggaagaagatagcagcgccgttggcaggcagggtgccttcgttggctacgcggacctgaacggtccacgttgtcggcgcacacgaaacggccgcctctaagtcggattttctcggcaagagcagctcttttaatgccaagtcgtagggctgtgcacactcttttagtccgccggaccacgatgccgccacggcgcgccgaccggccaagcccgaaggggtggaagcgcgcaccgaaaaccacagctcttcctggggctttgcgatgaacaccgtagcgcgaggggtcgctaccgttgtcaccaactccatgtagcgctcgccaagcagatagacgtcgtaccgaagcgtatcgctcaggggcttccacgaaagcgtggcggagtccaagcagacccgctctatcatcagatcggtaggtaccgccacgatgctgagcggcagctccgagcggtcttcgtaccctcctcgcgatacccgaacgcgcacccgaccgctcggcacaatcggcacgctccaatcgtgccaacgcctgctgccctcgacggtggctatgggccaccagctttgtccgtcgtctaaagagtagtccagaacaaagggtaagtcgctgccgtaggcatcccaatgtattcggcaggtatcgcccggagccagcccttctcctccggcgggatagacgagcttgaggctgtcataccaaaagtcccacgccaggaaataggtctgaggccccaacggaacctcgtagccgcttacgcgcacggtgtatacccccggaatgggatcgattaacgccacctgctcggcgttgttaagggagtcgcgcccgaattgagcgggggtatctaaggctaccgggtccggtgaagggttgagcacccagggcacatacacggtattatcgggaccgacgacctgtaggtccaagtcgttgatcaaagcgcgttttgcgccggcttcggccggagggtctgcccagtaaagcataatgcgcccttggcgcacaccgggcggaacgacaaggatgtgcgcctccgtcgtttgatggtcggcctgggcttggagccatcgcttttccacgagcagtcgataggccctccaggcgttgacgaggccccagccgaaccggaaatcgggcccgacgtggcccatgtcggtggccgtgttgagcagagcggctttcagcagagcagccggcggctgttcgccgttgaaatgctctttgtaggcttgagtcaattgggccagcacgccggcaacaccgggtgcagcggctgaggtgccgccaaacgtctgataatcattatcatgagtagtggagcgctgcccttggccgtgggccgtcaggtcgggcttcaagcgaccgtcgtgaacgggccctcggctcgaggtaggcattagcgtaccgtctgcgcgcaggttggccacggcaatggcgtttttggctaccttatgcccaccggtgatgttgccccatcccggcccggcgccgtaattacaatcggattgcccgtcgttgccggcagaaaagacgtgcatcagcgtaggaaattggtacagctgcgtctctaccgtctgggcagagagggtataacccgcgttgcaaccgttcgaatacgaggaattcgtgatggtggcgttgagcgtctcgtgcagcgcgagcgtggcgtcttggaagctggcccgatagcgcacggtgtacagctgagcgccggcggccatgccgcgcacccgcgggtctaaattgcctgctcctcccagaatgccggccacaccatcgccgtgcgtgccgtcggagccggcctccgctgctccgtagtcgatgtatcgacccctaaagtcgatgtgcggccccagagggccgtcgtcgcgcacaatcgccgacacgccactgccgtcgtagcggcgccccaggggagagtccatatccagcagcccggagcgatgccacgaacggccgttgacatcttccggcacagagggcggcggcatcagctccaagtagcgcacgaagggcaaatccgccaaggccgatagacgcacctgaggtaccaataagtggagaaacccgttctggttgcctacctccaccacctcatagccttggctccgaaaatgcgctgctgcctccgtcatacgcacttgaggatacacctgagcgtatacgtgtacgcggtctccgtctaaggcccacgagccgtagggctgctcgcggaggttgcggtgcatcttctcctccgcctgcaccggccgcagccggcggacgtgaacgagcgacaagcgctcctgcgaaaagccctccggtagcgccaccaaatacgtctgatcgcccacgtagcttataaagtgcacgccttccgactccagcgccgcccgtcgtctcgacgaaggcaaggggtcacacgtcaaataacggtagtaaaagccgttgaccaattcctccgagcgaggctccgataggattagcggtgctcccgccggcgtcccaggcggttgcggtcgggaaggctgtgccgacgcccatactccaaggagcacactcattcccagaaaactcagccggtgcattgaactaattgggttaaatgccgtttgcttcagaccgaaaatcattaagccggaatgatttatgatgcgaatatccagcacaatgttacgacaattgagcggtctttctcttttcatacacgatacgccgtagttttggcgccacaatagacgaacaataagatgattcccatatacgtatgggtcggttttgtgaccctgattattgggctaatggccctcgatctaggtgtttttaatcgcaaggcgcatacgcctaccgtccgagaagcgctcttttccacgagtgtctgggttggcttggccttgctgttcaacatcttcgtatactttgcttacgagtacaaatggctgggattgggcctgtttgtgcacgaacccatgggcgggcgcgaggcggcggtcaaatacttcacggcctacttgctcgaggagtcgctcagcgtagacaatttgttcgtcatggcactcgtctttgcccagttcagagtgcccaaagcctaccaacaccgagtgctcttttggggcatcttgggcgtactggtgttccgcggaacccttatcggattgggactggccttggtgcatcacttcacctggctgttttacttctttggagggctgctgatttggtctgcctataaaatgtggcgaaacggcgaagcagtagatgagccgcccggagaccacggcatcactcggtggattcgccgcttttaccccgtcagcaaccattacgacggcgggcgcttttttacccgggagaacggacgacgcgtagccacgccgctgctggtggccctgctggtcgtggagaccggcgacatcatgttcgccttcgactccgtgccggccgtgttttctatcactacagacccctttttggtgttctcctccaacattttcgccatcctggggttgcgctccttgtactttttgctgtcgaacatgctcgaccgattcgcttatctgaactacagcttgatcggcattctgacgtttatcggcgtgaaaatgctgctcttgcccttgcatatacacattcacgaactgctatccttgggcatcatcgcctcgctgctgctggccggcgtattgtcctctatctggcgctcgccgaaggaggagtcgccctgcgaggacgtccacgaccacgctccctccggcaacggcagcgccttgccaaccgaagtacccaaaatgcctcagcagacgctcccgaagcgggaaatttcgcatgccacaaaattttaacggattaaactcttgtgcgcgtggcgaagccacttatttttgtgcgtgcttggcgcggcagattgccgttttgcatggccaagcgcctactttcttaccctttcacctacaccttagtcaaattccttctgccatgcgacatgaggaaaaaagcaaaaaagacgggcggtatgccgacgaacgctcctactatccgaacaagtcctcgcacaagaaaaagaagctgaaacccgtcgaaaaaatcaagtaccgcctaaaaggatatgtagacgaagaagaagagtaaggagctctcccgctgcacctaaacgccgctgcctctacacagcggcgtttttttatatcgtgcctaagggcagcacaagggtcggcgcgtaaatgtttgtgcccattgccggctgtggcaagggataggagataagcgtcccatcgagccaacgctccggccactccggtttttcgggacaacaggcaataaaaaagggaagcgcagggcgccccccagtagatgttctcacaacggaacaaaatccttattgtgagttgcttcaaattgtgcagcaaaactaatatcttcatgctcgtaaaccaaataaatgcgtcattcaaatgaaaaaagttttagggctggacttaggcatagcatccatcgggtgggcgctcattgcacaaaactctgaaaatgaggagatatcccacataatagactgcggtgtgcgcgtcgttccgctttccacagatgagcacagcgaatttgccaaaggaggtagtgtacccaccaaccaaatacggcgaagggcgcgcggtatgcgccgaaacctgcagcgctaccggtggcgccgccaccggctctactgcgttttagggcagctcggcatgatgcccgaccaacggctgatgacacggctctctcccttagagctatactcgttgcgaagccgagcattgagtgagcccctgtcgctgcaagaaatcggccgcattctcattcacctcaacaactggcgcggctaccgcagtaatcggcgagaggcggtaaaagacgacgaaaaaagccggtacctcaaggaaataaaaaataacgaagaccaactcaaagtcgaggacaaaaccataggccagttctttgccgagcgcttgcaccaaggcgatagacaacgcattcgaggaaggatattcggccgaaacacctatatagacgagtttaatcgaatatgggacgcccaggcgcaataccacccctcggtactcaccgaggagcatcgccgcctaatccgcgaccgcattatttattaccaacgcccccttaagtcggccaaaggccttgtaggtacttgcgccttggagtggtactatgctttatataaagaaacccgtcaacctaaatatgaaaacggccggaagaaaatcgtgcgcccgaagtgcgcgcccaagtcctctccgctcaaccaggagtgcaaggtctgggagagcatccacaacctgcgcatctaccggcgcgaccgcaacggccggcgcgaatctcaaccgatagcgctgacccttgagcagaaaaaacacctcttctggtaccttcaggaaagcaagaaaaatctgaaagccgaagaggcgctccgcttattgggcttttcggccggcgcatacgcggtggatgaccacaccttagagaataatcgcaccttatcccgcctaaaagaggttttcaaaaagctgggcattcggcgagacgacttgctgaggtttgaccctgccatcgaggaagtcgaatgggacgacctcgaaacgggcgagcgcaggcggcgcctacaggtgcgcggcgatttcgaccgagagcctttgtatcaactctggcacctcatctatgccaccgaagacgaaggagacctcatccaactgcttgaagagcgatacggcttcaccacagaacaggcgcgagaaatagccaaaatagacttcacttccgaaggttacgcccgaaaaagccaccgcgccctgcgtcgcctgttgccccattatcgcgaaggcttagactacaccaaagcctgcgaagccgccggctatcgccatgccgactacatcaccaaggcggaaaacgaagcccggatactgtcggaacgcttggaactactgcccaaaaacgccctgcgaaatcccgtagtggagaaaatactcaaccagatggtccacctggtcaacgaccttatgaccacctatgggcgacccgacgaggtccgcgtcgaactggcccgcgagctcaagcagagtgctcaggagcgcaaaaagacccacgagctgaaccagaaacgcagaagggagaatgagcgaataaaaaaagacattgccgaccacctcgctatacccccggaaaaggttactcgagcacaaatagaaaagtaccggttttacaaggaaatcgacggcatatccctatataccggtaagcgcttctcccttgccgacgtcctcaacggagatacggtagacgtagagcacatcatcccgcgcacgcttcgcttcgacgactcctatcacaacaaaaccttgtgcgaacggaatatcaaccaagaaaagggcaatatgacggcctgtgattacatgaggagtcgcggggcacaggagtacgaagcatacctggagagagtaaaagcattttacgaaaaaaacggcagagaggtccggctcaagtacaagaatctgaccaccacgcaagaggatttgctcaaagacaacgagtttttgcagcgccagttgcgcgagagccagtacatcgcccgcaaggccgtggaggtgcttcgagaagtgtgtcggaacgtgtacaccaccaccggcagcattaccgattttttgcgccaccggtggggctgggacgaagtcattccctatctgcgccttccacagtttaaagaggcgggactaaccgagataatccccgttcaaaacgggcaaaagaccaaggaagtcatcaaagggtggagcaagcgcgacgaccatcgccatcacgccctggatgctctcgtcgtagcctgcacccgtcaaagtcacattcagcgcattaatgagctgagcccaatcctcgcgggcacttacggcgaggagcgccgccaacagcttctcgacatagtccgagataagtacattgccggaaagatacctttttcttttcggcaggtatgcgaggctatgaatcaggtgctggtctcccacaaacagcgcactcgggtggctacccgcaattgcccaaaaggcagccaaaaggtccaaattacccttacccctcgcggacgccttcacgaagaaaccatctacggccgcattcgccgctacaaaaaggtgtccctcgacggcaaattttctgtagccatgctggacgacatggtacatcctcaccagcgcgagttggtcgaggcgcgcttagcccaatatgccaacaatcccaaggctgccttcaaggacttggacaaaaaccccatccgctatgggcctaacggcgagaaacacctcagagaagtgaccgtctgggaatacatcatggtctctcgaaaggctctcgacccaaaggcaacaggcaaggcattgaagggcattatagaccccgtcgttcaccaggtcgtaaaacagcacttcgaggcaggtaacgtcggcgggctgccgtttcggcatgtgcgtgtagagaaccgtgcaaaagaatggatccgcctgcccagaggctacgccgagcccggctccaatcaccacatcgccatttaccgcgacgccgacggcaaaaaacacgagcatgtcgtcaccttctgggaagccttccaacgcgtgcacataggcctaccgccgatcatcaccgacgtggccggagccttggagtaccttagccacctacccggagaactgcccgagctgcacctgcccgaaaaccccgactggcagttcgtcgtctccttggcccgaaacgacatgttcgtgttcggtctcgaccctgcagatatagacctgcgcgaccttaaaaaccgcagctacgttagcaagcatttgttccgagtcaggaagatatcctcaggcgattattggttttcctaccacctcgaatcaaaggcgttggatgatcgtgattcaaaaagcgccaatcgctacaagcgatgtcgttctatagcatccctagccggagccattaaggtaacggtaaaccgcttagggcacattgtggcggtaggccaaccgatataacggaatgccctgccgggccgacggcgggcctgctcggctgttgtcaaaacgacaggctatcgaaaaaaaacaccggccatgaaaaaaacgctttgttttagcgtccctgcttatttgcgcgtttcgctccggcggttggaggttgagctgcccgcccgaggcgagcgaccggcgcagctgacaaccattcccttcgaagatatcggagtgctcattttggagcacccgcagatcaccatcagccacgttgcgctggccgctttgctcgaggagaacgtagccgtcatcgtttgcaacgagaagtatctacccaccggactgctgttgcccttggacgggcacaccctgcagagccgccgcttcagagagcagatcgaggcctccctaccgatgaaaaagcagttgtggcaacaaacggtccggcaaaaaatctacaaccaagcgctggtgctcagacgacagggcatagacagcgccccgctgctgcgctggatgcgagaagtgcgcagcggcgaccccgacggcgtagaagcgcgggccgccggctggtactggccccgcctgtttcaacacaccccacttcagccggaaagctcggaggaagaccccgatgatttcatccgagaccgctacggagagtggcccaattgcctgctcaactacggctatgccgtgctgcgcgccgtcatcgcccgagccctcgtaggagccggacttctgcccacactgggcatccaccaccgcaaccaatacaacgcctactgtctggccgatgacatcatggaaccctatcgccctttcgtagacgatttggtttgccaaatcctccgcaagcaccctcaccctcccgagccatccgacgaaggaaacattctgactccagagcttaaacgcgaactgctcctcatacccgtactcgacgtgcgcatggaaaaaaaactaaagcccctccaaacggccgcacaccgcaccgcagcctccctcgccgcttgcttcagcggtcaagagcgcgaaatcctctaccctaccttcagctaaccggataaatcacgcgtcactaccgccgcacatgagatacccaccctctaacgccaaacgcctcagcgcctaccgccttatgtggatcatcgtattcttcgacctgcccaccggaaccgataccgagcgcaaagccgcccatcaattccgccaaaacctgctcgaggaaggtttcaccatgtttcaattttccatctacgtccgaccctgccccagccgcgaaaacgccgaaacgcacgtccggcggattgcgcaaatcctaccacccgccggcaaagtcggcatcctcaccattaccgacaagcaattcgccatgatgcaaatcttctacggccgccgaaccgcccctaaacccgaaggctatcaacagctcatgctcttcagcgactaaaccgccagaaaaaactgcaaaaatgccgctccaccaacctctcggaacg
